United States Patent Application Publication US 2024/0398993 A1 - sequence listing, part 4

SEQ ID NO: 9611 - protein, 1740 aa, Homo sapiens
MAKPTSKDSGLKEKFKILLGLGTPRPNPRSAEGKQTEFIITAEILRELSMECGLNNRIRMIGQICEVAKTKKFEEHAVEALWKAVADLLQPERPLEARHAVLALLKAIVQGQGERLGVLRALFFKVIKDYPSNEDLHERLEVFKALTDNGRHITYLEEELADFVLQWMDVGLSSEFLLVLVNLVKFNSCYLDEYIARMVQMICLLCVRTASSVDIEVSLQVLDAVVCYNCLPAESLPLFIVTLCRTINVKELCEPCWKLMRNLLGTHLGHSAIYNMCHLMEDRAYMEDAPLLRGAVFFVGMALWGAHRLYSLRNSPTSVLPSFYQAMACPNEVVSYEIVLSITRLIKKYRKELQVVAWDILLNIIERLLQQLQTLDSPELRTIVHDLLTTVEELCDQNEFHGSQERYFELVERCADQRPESSLLNLISYRAQSIHPAKDGWIQNLQALMERFFRSESRGAVRIKVLDVLSFVLLINRQFYEEELINSVVISQLSHIPEDKDHQVRKLATQLLVDLAEGCHTHHFNSLLDIIEKVMARSLSPPPELEERDVAAYSASLEDVKTAVLGLLVILQTKLYTLPASHATRVYEMLVSHIQLHYKHSYTLPIASSIRLQAFDFLLLLRADSLHRLGLPNKDGVVRFSPYCVCDYMEPERGSEKKTSGPLSPPTGPPGPAPAGPAVRLGSVPYSLLFRVLLQCLKQESDWKVLKLVLGRLPESLRYKVLIFTSPCSVDQLCSALCSMLSGPKTLERLRGAPEGFSRTDLHLAVVPVLTALISYHNYLDKTKQREMVYCLEQGLIHRCASQCVVALSICSVEMPDIIIKALPVLVVKLTHISATASMAVPLLEFLSTLARLPHLYRNFAAEQYASVFAISLPYTNPSKFNQYIVCLAHHVIAMWFIRCRLPFRKDFVPFITKGLRSNVLLSFDDTPEKDSFRARSTSLNERPKRIQTSLTSASLGSADENSVAQADDSLKNLHLELTETCLDMMARYVFSNFTAVPKRSPVGEFLLAGGRTKTWLVGNKLVTVTTSVGTGTRSLLGLDSGELQSGPESSSSPGVHVRQTKEAPAKLESQAGQQVSRGARDRVRSMSGGHGLRVGALDVPASQFLGSATSPGPRTAPAAKPEKASAGTRVPVQEKTNLAAYVPLLTQGWAEILVRRPTGNTSWLMSLENPLSPFSSDINNMPLQELSNALMAAERFKEHRDTALYKSLSVPAASTAKPPPLPRSNTDSAVVMEEGSPGEVPVLVEPPGLEDVEAALGMDRRTDAYSRSSSVSSQEEKSLHAEELVGRGIPIERVVSSEGGRPSVDLSFQPSQPLSKSSSSPELQTLQDILGDPGDKADVGRLSPEVKARSQSGTLDGESAAWSASGEDSRGQPEGPLPSSSPRSPSGLRPRGYTISDSAPSRRGKRVERDALKSRATASNAEKVPGINPSFVFLQLYHSPFFGDESNKPILLPNESQSFERSVQLLDQIPSYDTHKIAVLYVGEGQSNSELAILSNEHGSYRYTEFLTGLGRLIELKDCQPDKVYLGGLDVCGEDGQFTYCWHDDIMQAVFHIATLMPTKDVDKHRCDKKRHLGNDFVSIVYNDSGEDFKLGTIKGQFNFVHVIVTPLDYECNLVSLQCRKDMEGLVDTSVAKIVSDRNLPFVARQMALHANMASQVHHSRSNPTDIYPSKWIARLRHIKRLRQRICEEAAYSNPSLPLVHPPSHSKAPAQTPAEPTPGYEVGQRKRLISSVEDFTEFV

SEQ ID NO: 9612 - protein, 1704 aa, Homo sapiens
MAKPTSKDSGLKEKFKILLGLGTPRPNPRSAEGKQTEFIITAEILRELSMECGLNNRIRMIGQICEVAKTKKFEEGERLGVLRALFFKVIKDYPSNEDLHERLEVFKALTDNGRHITYLEEELADFVLQWMDVGLSSEFLLVLVNLVKFNSCYLDEYIARMVQMICLLCVRTASSVDIEVSLQVLDAVVCYNCLPAESLPLFIVTLCRTINVKELCEPCWKLMRNLLGTHLGHSAIYNMCHLMEDRAYMEDAPLLRGAVFFVGMALWGAHRLYSLRNSPTSVLPSFYQAMACPNEVVSYEIVLSITRLIKKYRKELQVVAWDILLNIIERLLQQLQTLDSPELRTIVHDLLTTVEELCDQNEFHGSQERYFELVERCADQRPESSLLNLISYRAQSIHPAKDGWIQNLQALMERFFRSESRGAVRIKVLDVLSFVLLINRQFYEEELINSVVISQLSHIPEDKDHQVRKLATQLLVDLAEGCHTHHFNSLLDIIEKVMARSLSPPPELEERDVAAYSASLEDVKTAVLGLLVILQTKLYTLPASHATRVYEMLVSHIQLHYKHSYTLPIASSIRLQAFDFLLLLRADSLHRLGLPNKDGVVRFSPYCVCDYMEPERGSEKKTSGPLSPPTGPPGPAPAGPAVRLGSVPYSLLFRVLLQCLKQESDWKVLKLVLGRLPESLRYKVLIFTSPCSVDQLCSALCSMLSGPKTLERLRGAPEGFSRTDLHLAVVPVLTALISYHNYLDKTKQREMVYCLEQGLIHRCASQCVVALSICSVEMPDIIIKALPVLVVKLTHISATASMAVPLLEFLSTLARLPHLYRNFAAEQYASVFAISLPYTNPSKFNQYIVCLAHHVIAMWFIRCRLPFRKDFVPFITKGLRSNVLLSFDDTPEKDSFRARSTSLNERPKSRIQTSLTSASLGSADENSVAQADDSLKNLHLELTETCLDMMARYVFSNFTAVPKRSPVGEFLLAGGRTKTWLVGNKLVTVTTSVGTGTRSLLGLDSGELQSGPESSSSPGVHVRQTKEAPAKLESQAGQQVSRGARDRVRSMSGGHGLRVGALDVPASQFLGSATSPGPRTAPAAKPEKASAGTRVPVQEKTNLAAYVPLLTQGWAEILVRRPTGNTSWLMSLENPLSPFSSDINNMPLQELSNALMAAERFKEHRDTALYKSLSVPAASTAKPPPLPRSNTDSAVVMEEGSPGEVPVLVEPPGLEDVEAALGMDRRTDAYSRSSSVSSQEEKSLHAEELVGRGIPIERVVSSEGGRPSVDLSFQPSQPLSKSSSSPELQTLQDILGDPGDKADVGRLSPEVKARSQSGTLDGESAAWSASGEDSRGQPEGPLPSSSPRSPSGLRPRGYTISDSAPSRRGKRVERDALKSRATASNAEKVPGINPSFVFLQLYHSPFFGDESNKPILLPNESQSFERSVQLLDQIPSYDTHKIAVLYVGEGQSNSELAILSNEHGSYRYTEFLTGLGRLIELKDCQPDKVYLGGLDVCGEDGQFTYCWHDDIMQAVFHIATLMPTKDVDKHRCDKKRHLGNDFVSIVYNDSGEDFKLGTIKGQFNFVHVIVTPLDYECNLVSLQCRKDMEGLVDTSVAKIVSDRNLPFVARQMALHANMASQVHHSRSNPTDIYPSKWIARLRHIKRLRQRICEEAAYSNPSLPLVHPPSHSKAPAQTPAEPTPGYEVGQRKRLISSVEDFTEFV

SEQ ID NO: 9613 - protein, 1692 aa, Homo sapiens
MECGLNNRIRMIGQICEVAKTKKFEEHAVEALWKAVADLLQPERPLEARHAVLALLKAIVQGQGERLGVLRALFFKVIKDYPSNEDLHERLEVFKALTDNGRHITYLEEELADFVLQWMDVGLSSEFLLVLVNLVKFNSCYLDEYIARMVQMICLLCVRTASSVDIEVSLQVLDAVVCYNCLPAESLPLFIVTLCRTINVKELCEPCWKLMRNLLGTHLGHSAIYNMCHLMEDRAYMEDAPLLRGAVFFVGMALWGAHRLYSLRNSPTSVLPSFYQAMACPNEVVSYEIVLSITRLIKKYRKELQVVAWDILLNIIERLLQQLQTLDSPELRTIVHDLLTTVEELCDQNEFHGSQERYFELVERCADQRPESSLLNLISYRAQSIHPAKDGWIQNLQALMERFFRSESRGAVRIKVLDVLSFVLLINRQFYEEELINSVVISQLSHIPEDKDHQVRKLATQLLVDLAEGCHTHHFNSLLDIIEKVMARSLSPPPELEERDVAAYSASLEDVKTAVLGLLVILQTKLYTLPASHATRVYEMLVSHIQLHYKHSYTLPIASSIRLQAFDFLLLLRADSLHRLGLPNKDGVVRFSPYCVCDYMEPERGSEKKTSGPLSPPTGPPGPAPAGPAVRLGSVPYSLLFRVLLQCLKQESDWKVLKLVLGRLPESLRYKVLIFTSPCSVDQLCSALCSMLSGPKTLERLRGAPEGFSRTDLHLAVVPVLTALISYHNYLDKTKQREMVYCLEQGLIHRCASQCVVALSICSVEMPDIIIKALPVLVVKLTHISATASMAVPLLEFLSTLARLPHLYRNFAAEQYASVFAISLPYTNPSKFNQYIVCLAHHVIAMWFIRCRLPFRKDFVPFITKGLRSNVLLSFDDTPEKDSFRARSTSLNERPKSRIQTSLTSASLGSADENSVAQADDSLKNLHLELTETCLDMMARYVFSNFTAVPKRSPVGEFLLAGGRTKTWLVGNKLVTVTTSVGTGTRSLLGLDSGELQSGPESSSSPGVHVRQTKEAPAKLESQAGQQVSRGARDRVRSMSGGHGLRVGALDVPASQFLGSATSPGPRTAPAAKPEKASAGTRVPVQEKTNLAAYVPLLTQGWAEILVRRPTGNTSWLMSLENPLSPFSSDINNMPLQELSNALMAAERFKEHRDTALYKSLSVPAASTAKPPPLPRSNTDSAVVMEEGSPGEVPVLVEPPGLEDVEAALGMDRRTDAYSRSSSVSSQEEKSLHAEELVGRGIPIERVVSSEGGRPSVDLSFQPSQPLSKSSSSPELQTLQDILGDPGDKADVGRLSPEVKARSQSGTLDGESAAWSASGEDSRGQPEGPLPSSSPRSPSGLRPRGYTISDSAPSRRGKRVERDALKSRATASNAEKVPGINPSFVFLQLYHSPFFGDESNKPILLPNESQSFERSVQLLDQIPSYDTHKIAVLYVGEGQSNSELAILSNEHGSYRYTEFLTGLGRLIELKDCQPDKVYLGGLDVCGEDGQFTYCWHDDIMQAVFHIATLMPTKDVDKHRCDKKRHLGNDFVSIVYNDSGEDFKLGTIKGQFNFVHVIVTPLDYECNLVSLQCRKDMEGLVDTSVAKIVSDRNLPFVARQMALHANMASQVHHSRSNPTDIYPSKWIARLRHIKRLRQRICEEAAYSNPSLPLVHPPSHSKAPAQTPAEPTPGYEVGQRKRLISSVEDFTEFV

SEQ ID NO: 9614 - protein, 239 aa, Homo sapiens
MAKPTSKDSGLKEKFKILLGLGTPRPNPRSAEGKQTEFIITAEILRELSMECGLNNRIRMIGQICEVAKTKKFEEHAVEALWKAVADLLQPERPLEARHAVLALLKAIVQGQVRPRATLGWVTSGCPLTVLSLLGRVWTPASVSCWAQGLGADGLWSWMACGVSWCHEVCVTVGTASSPVNRWSLHLPLMGCSGDHMRQFSQSAEIVPGSWCGATVLFCPCTLSGPLPCSLHSICAGLG

SEQ ID NO: 9615 - protein, 157 aa, Homo sapiens
MQLTVKALQGRECSLQVPEDELVSTLKQLVSEKLNVPVRQQRLLFKGKALADGKRLSDYSIGPNSKLNLVVKPLEKVLLEEGEAQRLADSPPPQVWQLISKVLARHFSAADASRVLEQLQRDYERSLSRLTLDDIERLASRFLHPEVTETMEKGFSK

SEQ ID NO: 9616 - protein, 308 aa, Homo sapiens; identical to SEQ ID NO: 6370

SEQ ID NO: 9617 - protein, 362 aa, Homo sapiens
MELGSCLEGGREAAEEEGEPEVKKRRLLCVEFASVASCDAAVAQCFLAENDWEMERALNSYFEPPVEESALERRPETISEPKTYVDLTNEETTDSTTSKISPSEDTQQENGSMFSLITWNIDGLDLNNLSERARGVCSYLALYSPDVIFLQEVIPPYYSYLKKRSSNYEIITGHEEGYFTAIMLKKSRVKLKSQEIIPFPSTKMMRNLLCVHVNVSGNELCLMTSHLESTRGHAAERMNQLKMVLKKMQEAPESATVIFAGDTNLRDREVTRCGGLPNNIVDVWEFLGKPKHCQYTWDTQMNSNLGITAACKLRFDRIFFRAAAEEGHIIPRSLDLLGLEKLDCGRFPSDHWGLLCNLDIIL

SEQ ID NO: 9618 - protein, 392 aa, Homo sapiens
MRERHDTGACAEPRVGLLFRLKGRCRGGRKMELGSCLEGGREAAEEEGEPEVKKRRLLCVEFASVASCDAAVAQCFLAENDWEMERALNSYFEPPVEESALERRPETISEPKTYVDLTNEETTDSTTSKISPSEDTQQENGSMFSLITWNIDGLDLNNLSERARGVCSYLALYSPDVIFLQEVIPPYYSYLKKRSSNYEIITGHEEGYFTAIMLKKSRVKLKSQEIIPFPSTKMMRNLLCVHVNVSGNELCLMTSHLESTRGHAAERMNQLKMVLKKMQEAPESATVIFAGDTNLRDREVTRCGGLPNNIVDVWEFLGKPKHCQYTWDTQMNSNLGITAACKLRFDRIFFRAAAEEGHIIPRSLDLLGLEKLDCGRFPSDHWGLLCNLDIIL

SEQ ID NO: 9619 - protein, 284 aa, Homo sapiens
MELGSCLEGGREAAEEEGEPEVKKRRLLCVEFASVASCDAAVAQCFLAENDWEMERALNSYLALYSPDVIFLQEVIPPYYSYLKKRSSNYEIITGHEEGYFTAIMLKKSRVKLKSQEIIPFPSTKMMRNLLCVHVNVSGNELCLMTSHLESTRGHAAERMNQLKMVLKKMQEAPESATVIFAGDTNLRDREVTRCGGLPNNIVDVWEFLGKPKHCQYTWDTQMNSNLGITAACKLRFDRIFFRAAAEEGHIIPRSLDLLGLEKLDCGRFPSDHWGLLCNLDIIL

SEQ ID NO: 9620 - protein, 534 aa, Homo sapiens
MARGLQVPLPRLATGLLLLLSVQPWAESGKVLVVPTDGSPWLSMREALRELHARGHQAVVLTPEVNMHIKEEKFFTLTAYAVPWTQKEFDRVTLGYTQGFFETEHLLKRYSRSMAIMNNVSLALHRCCVELLHNEALIRHLNATSFDVVLTDPVNLCGAVLAKYLSIPAVFFWRYIPCDLDFKGTQCPNPSSYIPKLLTTNSDHMTFLQRVKNMLYPLALSYICHTFSAPYASLASELFQREVSVVDLVSYASVWLFRGDFVMDYPRPIMPNMVFIGGINCANGKPLSQEFEAYINASGEHGIVVFSLGSMVSEIPEKKAMAIADALGKIPQTVLWRYTGTRPSNLANNTILVKWLPQNDLLGHPMTRAFITHAGSHGVYESICNGVPMVMMPLFGDQMDNAKRMETKGAGVTLNVLEMTSEDLENALKAVINDKSYKENIMRLSSLHKDRPVEPLDLAVFWVEFVMRHKGAPHLRPAAHDLTWYQYHSLDVIGFLLAVVLTVAFITFKCCAYGYRKCLGKKGRVKKAHKSKTH

SEQ ID NO: 9621 - protein, 445 aa, Homo sapiens
MARGLQVPLPRLATGLLLLLSVQPWAESGKVLVVPTDGSPWLSMREALRELHARGHQAVVLTPEVNMHIKEEKFFTLTAYAVPWTQKEFDRVTLGYTQGFFETEHLLKRYSRSMAIMNNVSLALHRCCVELLHNEALIRHLNATSFDVVLTDPVNLCGAVLAKYLSIPAVFFWRYIPCDLDFKGTQCPNPSSYIPKLLTTNSDHMTFLQRVKNMLYPLALSYICHTFSAPYASLASELFQREVSVVDLVSYASVWLFRGDFVMDYPRPIMPNMVFIGGINCANGKPLSQEFEAYINASGEHGIVVFSLGSMVSEIPEKKAMAIADALGKIPQTVLWRYTGTRPSNLANNTILVKWLPQNDLLGHPMTRAFITHAGSHGVYESICNGVPMVMMPLFGDQMDNAKRMETKGAGVTLNVLEMTSEDLENALKAVINDKRKKQQSGRQM

SEQ ID NO: 9622 - protein, 475 aa, Homo sapiens
MWHAISRTSRMSQSGCPSGLLADKNISSSATRVIVKTAGNQKDFMVADDISVRQFKEMLLAHFQCQMDQLVLVFMGCLLKDHDTLSQRGIMDGHTIYLVIKSKQGSRSLAHSFRDLPTNDPCHRDRNTKGNSSRVHQPTGMNQAPVELAHFVGSDAPKVHTQNLEVSHPECKAQMLENPSIQRLLSNMEFMWQFISEHLDTQQLMQQNPEVSRLLLDNSEILLQTLELARNLAMIQEIMQIQQPSQNLEYPLNPQPYLGLETMPGGNNALGQNYADINDQMLNSMQDPFGGNPFTALLAGQVLEQVQSSPPPPPPSQEQQDQLTQHPATRVIYNSSGGFSSNTSANDTLNKVNHTSKANTAMISTKGQSHICATRQPAWIPALPSIELTQQLQEEYKDATVSLSSSRQTLKGDLQLSDEQSSSQITGGMMQLLMNNPYLAAQIMLFTSMPQLSEQWRQQLPTFLQQTQISDLLSA

SEQ ID NO: 9623 - protein, 260 aa, Homo sapiens
MWHAISRTSRMSQSGCPSGLLADKNISSSATRVIVKTAGNQKDFMVADDISVRQFKEMLLAHFQCQMDQLVLVFMGCLLKDHDTLSQRGIMDGHTIYLVIKSKQGSRSLAHSFRDLPTNDPCHRDRNTSANDTLNKVNHTSKANTAMISTKGQSHICATRQPAWIPALPSIELTQQLQEEYKDATVSLSSSRQTLKGDLQLSDEQSSSQITGGMMQLLMNNPYLAAQIMLFTSMPQLSEQWRQQLPTFLQQTQISDLLSA

SEQ ID NO: 9624 - protein, 520 aa, Homo sapiens
MECPHLSSSVCIAPDSAKFPNGSPSSWCCSVCRSNKSPWVCLTCSSVHCGRYVNGHAKKHYEDAQVPLTNHKKSEKQDKVQHTVCMDCSSYSTYCYRCDDFVVNDTKLGLVQKVREHLQNLENSAFTADRHKKRKLLENSTLNSKLLKVNGSTTAICATGLRNLGNTCFMNAILQSLSNIEQFCCYFKELPAVELRNGKTAGRRTYHTRSQGDNNVSLVEEFRKTLCALWQGSQTAFSPESLFYVVWKIMPNFRGYQQQDAHEFMRYLLDHLHLELQGGFNGVSRSAILQENSTLSASNKCCINGASTVVTAIFGGILQNEVNCLICGTESRKFDPFLDLSLDIPSQFRSKRSKNQENGPVCSLRDCLRSFTDLEELDETELYMCHKCKKKQKSTKKFWIQKLPKVLCLHLKRFHWTAYLRNKVDTYVEFPLRGLDMKCYLLEPENSGPESCLYDLAAVVVHHGSGVGSGHYTAYATHEGRWFHFNDSTVTLTDEETVVKAKAYILFYVEHQAKAGSDKL

SEQ ID NO: 9625 - protein, 476 aa, Homo sapiens
MECPHLSSSVCIAPDSAKFPNGSPSSWCCSVCRSNKSPWVCLTCSSVHCGSYRCDDFVVNDTKLGLVQKVREHLQNLENSAFTADRHKKRKLLENSTLNSKLLKVNGSTTAICATGLRNLGNTCFMNAILQSLSNIEQFCCYFKELPAVELRNGKTAGRRTYHTRSQGDNNVSLVEEFRKTLCALWQGSQTAFSPESLFYVVWKIMPNFRGYQQQDAHEFMRYLLDHLHLELQGGFNGVSRSAILQENSTLSASNKCCINGASTVVTAIFGGILQNEVNCLICGTESRKFDPFLDLSLDIPSQFRSKRSKNQENGPVCSLRDCLRSFTDLEELDETELYMCHKCKKKQKSTKKFWIQKLPKVLCLHLKRFHWTAYLRNKVDTYVEFPLRGLDMKCYLLEPENSGPESCLYDLAAVVVHHGSGVGSGHYTAYATHEGRWFHFNDSTVTLTDEETVVKAKAYILFYVEHQAKAGSDKL

SEQ ID NO: 9626 - protein, 1755 aa, Homo sapiens
MASELEPEVQAIDRSLLECSAEEIAGKWLQATDLTREVYQHLAHYVPKIYCRGPNPFPQKEDMLAQHVLLGPMEWYLCGEDPAFGFPKLEQANKPSHLCGRVFKVGEPTYSCRDCAVDPTCVLCMECFLGSIHRDHRYRMTTSGGGGFCDCGDTEAWKEGPYCQKHELNTSEIEEEEDPLVHLSEDVIARTYNIFAITFRYAVEILTWEKESELPADLEMVEKSDTYYCMLFNDEVHTYEQVIYTLQKAVNCTQKEAIGFATTVDRDGRRSVRYGDFQYCEQAKSVIVRNTSRQTKPLKVQVMHSSIVAHQNFGLKLLSWLGSIIGYSDGLRRILCQVGLQEGPDGENSSLVDRLMLSDSKLWKGARSVYHQLFMSSLLMDLKYKKLFAVRFAKNYQQLQRDFMEDDHERAVSVTALSVQFFTAPTLARMLITEENLMSIIIKTFMDHLRHRDAQGRFQFERYTALQAFKFRRVQSLILDLKYVLISKPTEWSDELRQKFLEGFDAFLELLKCMQGMDPITRQVGQHIEMEPEWEAAFTLQMKLTHVISMMQDWCASDEKVLIEAYKKCLAVLMQCHGGYTDGEQPITLSICGHSVETIRYCVSQEKVSIHLPVSRLLAGLHVLLSKSEVAYKFPELLPLSELSPPMLIEHPLRCLVLCAQVHAGMWRRNGFSLVNQIYYYHNVKCRREMFDKDVVMLQTGVSMMDPNHFLMIMLSRFELYQIFSTPDYGKRFSSEITHKDVVQQNNTLIEEMLYLIIMLVGERFSPGVGQVNATDEIKREIIHQLSIKPMAHSELVKSLPEDENKETGMESVIEAVAHFKKPGLTGRGMYELKPECAKEFNLYFYHFSRAEQSKAEEAQRKLKRQNREDTALPPPVLPPFCPLFASLVNILQSDVMLCIMGTILQWAVEHNGYAWSESMLQRVLHLIGMALQEEKQHLENVTEEHVVTFTFTQKISKPGEAPKNSPSILAMLETLQNAPYLEVHKDMIRWILKTFNAVKKMRESSPTSPVAETEGTIMEESSRDKDKAERKRKAEIARLRREKIMAQMSEMQRHFIDENKELFQQTLELDASTSAVLDHSPVASDMTLTALGPAQTQVPEQRQFVTCILCQEEQEVKVESRAMVLAAFVQRSTVLSKNRSKFIQDPEKYDPLFMHPDLSCGTHTSSCGHIMHAHCWQRYFDSVQAKEQRRQQRLRLHTSYDVENGEFLCPLCECLSNTVIPLLLPPRNIFNNRLNFSDQPNLTQWIRTISQQIKALQFLRKEESTPNNASTKNSENVDELQLPEGFRPDFRPKIPYSESIKEMLTTFGTATYKVGLKVHPNEEDPRVPIMCWGSCAYTIQSIERILSDEDKPLFGPLPCRLDDCLRSLTRFAAAHWTVASVSVVQGHFCKLFASLVPNDSHEELPCILDIDMFHLLVGLVLAFPALQCQDFSGISLGTGDLHIFHLVTMAHIIQILLTSCTEENGMDQENPPCEEESAVLALYKTLHQYTGSALKEIPSGWHLWRSVRAGIMPFLKCSALFFHYLNGVPSPPDIQVPGTSHFEHLCSYLSLPNNLICLFQENSEIMNSLIESWCRNSEVKRYLEGERDAIRYPRESNKLINLPEDYSSLINQASNFSCPKSGGDKSRAPTLCLVCGSLLCSQSYCCQTELEGEDVGACTAHTYSCGSGVGIFLRVRECQVLFLAGKTKGCFYSPPYLDDYGETDQGLRRGNPLHLCKERFKKIQKLWHQHSVTEEIGHAQEANQTLVGIDWQHL

SEQ ID NO: 9627 - protein, 439 aa, Homo sapiens
MASELEPEVQAIDRSLLECSAEEIAGKWLQATDLTREVYQHLAHYVPKIYCRGPNPFPQKEDMLAQHVLLGPMEWYLCGEDPAFGFPKLEQANKPSHLCGRVFKVGEPTYSCRDCAVDPTCVLCMECFLGSIHRDHRYRMTTSGGGGFCDCGDTEAWKEGPYCQKHELNTSEIEEEEDPLVHLSEDVIARTYNIFAITFRYAVEILTWEKESELPADLEMVEKSDTYYCMLFNDEVHTYEQVIYTLQKAVNCTQKEAIGFATTVDRDGRRSVRYGDFQYCEQAKSVIVRNTSRQTKPLKVQVMHSSIVAHQNFGLKLLSWLGSIIGYSDGLRRILCQVGLQEGPDGENSSLVDRLMLSDSKLWKGARSVYHQLFMSSLLMDLKYKKLFAVRFAKNYERLQSDYVTDDHDREFSVADLSVQIFTVPSLFSISAGRSGSPL

SEQ ID NO: 9628 - protein, 575 aa, Homo sapiens
MYAGNIPIYKTESRSRNEQGMDPITRQVGQHIEMEPEWEAAFTLQMKLTHVISMMQDWCASDEKVLIEAYKKCLAVLMQCHGGYTDGEQPITLSICGHSVETIRYCVSQEKVSIHLPVSRLLAGLHVLLSKSEVAYKFPELLPLSELSPPMLIEHPLRCLVLCAQVHAGMWRRNGFSLVNQIYYYHNVKCRREMFDKDVVMLQTGVSMMDPNHFLMIMLSRFELYQIFSTPDYGKRFSSEITHKDVVQQNNTLIEEMLYLIIMLVGERFSPGVGQVNATDEIKREIIHQLSIKPMAHSELVKSLPEDENKETGMESVIEAVAHFKKPGLTGRGMYELKPECAKEFNLYFYHFSRAEQSKAEEAQRKLKRQNREDTALPPPVLPPFCPLFASLVNILQSDVMLCIMGTILQWAVEHNGYAWSESMLQRVLHLIGMALQEEKQHLENVTEEHVVTFTFTQKISKPGEAPKNSPSILAMLETLQNAPYLEVHKDMIRWILKTFNAVKKMRESSPTSPVAETEGTIMEEHNFRVQGTKTKLRGREKQRLPDCAEKRSWLRCLKCSGILLMKTKNSFSRH

SEQ ID NO: 9629 - protein, 1755 aa, Homo sapiens
MASELEPEVQAIDRSLLECSAEEIAGKWLQATDLTREVYQHLAHYVPKIYCRGPNPFPQKEDMLAQHVLLGPMEWYLCGEDPAFGFPKLEQANKPSHLCGRVFKVGEPTYSCRDCAVDPTCVLCMECFLGSIHRDHRYRMTTSGGGGFCDCGDTEAWKEGPYCQKHELNTSEIEEEEDPLVHLSEDVIARTYNIFAITFRYAVEILTWEKESELPADLEMVEKSDTYYCMLFNDEVHTYEQVIYTLQKAVNCTQKEAIGFATTVDRDGRRSVRYGDFQYCEQAKSVIVRNTSRQTKPLKVQVMHSSIVAHQNFGLKLLSWLGSIIGYSDGLRRILCQVGLQEGPDGENSSLVDRLMLSDSKLWKGARSVYHQLFMSSLLMDLKYKKLFAVRFAKNYERLQSDYVTDDHDREFSVADLSVQIFTVPSLARMLITEENLMSIIIKTFMDHLRHRDAQGRFQFERYTALQAFKFRRVQSLILDLKYVLISKPTEWSDELRQKFLEGFDAFLELLKCMQGMDPITRQVGQHIEMEPEWEAAFTLQMKLTHVISMMQDWCASDEKVLIEAYKKCLAVLMQCHGGYTDGEQPITLSICGHSVETIRYCVSQEKVSIHLPVSRLLAGLHVLLSKSEVAYKFPELLPLSELSPPMLIEHPLRCLVLCAQVHAGMWRRNGFSLVNQIYYYHNVKCRREMFDKDVVMLQTGVSMMDPNHFLMIMLSRFELYQIFSTPDYGKRFSSEITHKDVVQQNNTLIEEMLYLIIMLVGERFSPGVGQVNATDEIKREIIHQLSIKPMAHSELVKSLPEDENKETGMESVIEAVAHFKKPGLTGRGMYELKPECAKEFNLYFYHFSRAEQSKAEEAQRKLKRQNREDTALPPPVLPPFCPLFASLVNILQSDVMLCIMGTILQWAVEHNGYAWSESMLQRVLHLIGMALQEEKQHLENVTEEHVVTFTFTQKISKPGEAPKNSPSILAMLETLQNAPYLEVHKDMIRWILKTFNAVKKMRESSPTSPVAETEGTIMEESSRDKDKAERKRKAEIARLRREKIMAQMSEMQRHFIDENKELFQQTLELDASTSAVLDHSPVASDMTLTALGPAQTQVPEQRQFVTCILCQEEQEVKVESRAMVLAAFVQRSTVLSKNRSKFIQDPEKYDPLFMHPDLSCGTHTSSCGHIMHAHCWQRYFDSVQAKEQRRQQRLRLHTSYDVENGEFLCPLCECLSNTVIPLLLPPRNIFNNRLNFSDQPNLTQWIRTISQQIKALQFLRKEESTPNNASTKNSENVDELQLPEGFRPDFRPKIPYSESIKEMLTTFGTATYKVGLKVHPNEEDPRVPIMCWGSCAYTIQSIERILSDEDKPLFGPLPCRLDDCLRSLTRFAAAHWTVASVSVVQGHFCKLFASLVPNDSHEELPCILDIDMFHLLVGLVLAFPALQCQDFSGISLGTGDLHIFHLVTMAHIIQILLTSCTEENGMDQENPPCEEESAVLALYKTLHQYTGSALKEIPSGWHLWRSVRAGIMPFLKCSALFFHYLNGVPSPPDIQVPGTSHFEHLCSYLSLPNNLICLFQENSEIMNSLIESWCRNSEVKRYLEGERDAIRYPRESNKLINLPEDYSSLINQASNFSCPKSGGDKSRAPTLCLVCGSLLCSQSYCCQTELEGEDVGACTAHTYSCGSGVGIFLRVRECQVLFLAGKTKGCFYSPPYLDDYGETDQGLRRGNPLHLCKERFKKIQKLWHQHSVTEEIGHAQEANQTLVGIDWQHL

SEQ ID NO: 9630 - protein, 141 aa, Homo sapiens
MPPKFKRHLNDDDVTGSVKSERRNLLEDDSDEEEDFFLRGPSGPRFGPRNDKIKHVQNQVDEVIDVMQENITKVIERGERLDELQDKSESLSDNATAFSNRSKQLRRQMWWRGCKIKAIMALVAAILLLVIIILIVMKYRT

SEQ ID NO: 9631 - protein, 140 aa, Homo sapiens
MPPKFKRHLNDDDVTGSVKSERRNLLEDDSDEEEDFFLGPSGPRFGPRNDKIKHVQNQVDEVIDVMQENITKVIERGERLDELQDKSESLSDNATAFSNRSKQLRRQMWWRGCKIKAIMALVAAILLLVIIILIVMKYRT

SEQ ID NO: 9632 - protein, 1092 aa, Homo sapiens
MMDSPKIGNGLPVIGPGTDIGISSLHMVGYLGKNFDSAKVPSDEYCPACREKGKLKALKTYRISFQESIFLCEDLQCIYPLGSKSLNNLISPDLEECHTPHKPQKRKSLESSYKDSLLLANSKKTRNYIAIDGGKVLNSKHNGEVYDETSSNLPDSSGQQNPIRTADSLERNEILEADTVDMATTKDPATVDVSGTGRPSPQNEGCTSKLEMPLESKCTSFPQALCVQWKNAYALCWLDCILSALVHSEELKNTVTGLCSKEESIFWRLLTKYNQANTLLYTSQLSGVKDGDCKKLTSEIFAEIETCLNEVRDEIFISLQPQLRCTLGDMESPVFAFPLLLKLETHIEKLFLYSFSWDFECSQCGHQYQNRHMKSLVTFTNVIPEWHPLNAAHFGPCNNCNSKSQIRKMVLEKVSPIFMLHFVEGLPQNDLQHYAFHFEGCLYQITSVIQYRANNHFITWILDADGSWLECDDLKGPCSERHKKFEVPASEIHIVIWERKISQVTDKEAACLPLKKTNDQHALSNEKPVSLTSCSVGDAASAETASVTHPKDISVAPRTLSQDTAVTHGDHLLSGPKGLVDNILPLTLEETIQKTASVSQLNSEAFLLENKPVAENTGILKTNTLLSQESLMASSVSAPCNEKLIQDQFVDISFPSQVVNTNMQSVQLNTEDTVNTKSVNNTDATGLIQGVKSVEIEKDAQLKQFLTPKTEQLKPERVTSQVSNLKKKETTADSQTTTSKSLQNQSLKENQKKPFVGSWVKGLISRGASFMPLCVSAHNRNTITDLQPSVKGVNNFGGFKTKGINQKASHVSKKARKSASKPPPISKPPAGPPSSNGTAAHPHAHAASEVLEKSGSTSCGAQLNHSSYGNGISSANHEDLVEGQIHKLRLKLRKKLKAEKKKLAALMSSPQSRTVRSENLEQVPQDGSPNDCESIEDLLNELPYPIDIASESACTTVPGVSLYSSQTHEEILAELLSPTPVSTELSENGEGDFRYLGMGDSHIPPPVPSEFNDVSQNTHLRQDHNYCSPTKKNPCEVQPDSLTNNACVRTLNLESPMKTDIFDEFFSSSALNALANDTLDLPHFDEYLFENY

SEQ ID NO: 9633 - protein, 763 aa, Homo sapiens
MESPVFAFPLLLKLETHIEKLFLYSFSWDFECSQCGHQYQNRHMKSLVTFTNVIPEWHPLNAAHFGPCNNCNSKSQIRKMVLEKVSPIFMLHFVEGLPQNDLQHYAFHFEGCLYQITSVIQYRANNHFITWILDADGSWLECDDLKGPCSERHKKFEVPASEIHIVIWERKISQVTDKEAACLPLKKTNDQHALSNEKPVSLTSCSVGDAASAETASVTHPKDISVAPRTLSQDTAVTHGDHLLSGPKGLVDNILPLTLEETIQKTASVSQLNSEAFLLENKPVAENTGILKTNTLLSQESLMASSVSAPCNEKLIQDQFVDISFPSQVVNTNMQSVQLNTEDTVNTKSVNNTDATGLIQGVKSVEIEKDAQLKQFLTPKTEQLKPERVTSQVSNLKKKETTADSQTTTSKSLQNQSLKENQKKPFVGSWVKGLISRGASFMPLCVSAHNRNTITDLQPSVKGVNNFGGFKTKGINQKASHVSKKARKSASKPPPISKPPAGPPSSNGTAAHPHAHAASEVLEKSGSTSCGAQLNHSSYGNGISSANHEDLVEGQIHKLRLKLRKKLKAEKKKLAALMSSPQSRTVRSENLEQVPQDGSPNDCESIEDLLNELPYPIDIASESACTTVPGVSLYSSQTHEEILAELLSPTPVSTELSENGEGDFRYLGMGDSHIPPPVPSEFNDVSQNTHLRQDHNYCSPTKKNPCEVQPDSLTNNACVRTLNLESPMKTDIFDEFFSSSALNALANDTLDLPHFDEYLFENY

SEQ ID NO: 9634 - protein, 160 aa, Homo sapiens
MEEGSSSPVSPVDSLGTSEEELERQPKRFGRKRRYSKKSSEDGSPTPGKRGKKGSPSAQSFEELQSQRILANVRERQRTQSLNEAFAALRKIIPTLPSDKLSKIQTLKLAARYIDFLYQVLQSDEMDNKMTSCSYVAHERLSYAFSVWRMEGAWSMSASH

SEQ ID NO: 9635 - protein, 341 aa, Homo sapiens
MLLRPRRPPPLAPPAPPSPASPDPEPRTPGDAPGTPPRRPASPSALGELGLPVSPGSAQRTPWSARETELLLGTLLQPAVWRALLLDRRQALPTYRRVSAALAQQQVRRTPAQCRRRYKFLKDKFREAHGQPPGPFDEQIRKLMGLLGDNGRKRPRRRSPGSGRPQRARRPVPNAHAPAPSEPDATPLPTARDRDADPTWTLRFSPSPPKSADASPAPGSPPAPAPTALATCIPEDRAPVRGPGSPPPPPAREDPDSPPGRPEDCAPPPAAPPSLNTALLQTLGHLGDIANILGPLRDQLLTLNQHVEQLRGAFDQTVSLAVGFILGSAAAERGVLRDPCQ

SEQ ID NO: 9636 - protein, 114 aa, Homo sapiens
MRLLILALLGICSLTAYIVEGVGSEVSDKRTCVSLTTQRLPVSRIKTYTITEGSLRAVIFITKRGLKVCADPQATWVRDVVRSMDRKSNTRNNMIQTKPTGTQQSTNTAVTLTG

SEQ ID NO: 9637 - protein, 224 aa, Homo sapiens
MRTQSLLLLGALLAVGSQLPAVFGRKKGEKSGGCPPDDGPCLLSVPDQCVEDSQCPLTRKCCYRACFRQCVPRVSVKLGSCPEDQLRCLSPMNHLCHKDSDCSGKKRCCHSACGRDCRDPARGTAPGCPGQANSDLGSVALHLSWGPTERVHDGRPGALPAGQHYLYQRWFQPSDNHWPADTSLQPIHPWFLLLGVKVHSLSSEEGLCITPVLCTTAIRASHPS

SEQ ID NO: 9638 - protein, 123 aa, Homo sapiens
MRTQSLLLLGALLAVGSQLPAVFGRKKGEKSGGCPPDDGPCLLSVPDQCVEDSQCPLTRKCCYRACFRQCVPRVSVKLGSCPEDQLRCLSPMNHLCHKDSDCSGKKRCCHSACGRDCRDPARG

SEQ ID NO: 9639 - protein, 93 aa, Homo sapiens
MDSLRKMLISVAMLGAGAGVGYALLVIVTPGERRKQEMLKEMPLQDPRSREEAARTQQLLLATLQEAATTQENVAWRKNWMVGGEGGAGGRSP

SEQ ID NO: 9640 - protein, 955 aa, Homo sapiens
MWAGLLLRAACVALLLPGAPARGYTGRKPPGHFAAERRRLGPHVCLSGFGSGCCPGWAPSMGGGHCTLPLCSFGCGSGICIAPNVCSCQDGEQGATCPETHGPCGEYGCDLTCNHGGCQEVARVCPVGFSMTETAVGIRCTDIDECVTSSCEGHCVNTEGGFVCECGPGMQLSADRHSCQDTDECLGTPCQQRCKNSIGSYKCSCRTGFHLHGNRHSCVDVNECRRPLERRVCHHSCHNTVGSFLCTCRPGFRLRADRVSCEAFPKAVLAPSAILQPRQHPSKMLLLLPEAGRPALSPGHSPPSGAPGPPAGVRTTRLPSPTPRLPTSSPSAPVWLLSTLLATPVPTASLLGNLRPPSLLQGEVMGTPSSPRGPESPRLAAGPSPCWHLGAMHESRSRWTEPGCSQCWCEDGKVTCEKVRCEAACSHPIPSRDGGCCPSCTGCFHSGVVRAEGDVFSPPNENCTVCVCLAGNVSCISPECPSGPCQTPPQTDCCTCVPVRCYFHGRWYADGAVFSGGGDECTTCVCQNGEVECSFMPCPELACPREEWRLGPGQCCFTCQEPTPSTGCSLDDNGVEFPIGQIWSPGDPCELCICQADGSVSCKRTDCVDSCPHPIRIPGQCCPDCSAGCTYTGRIFYNNETFPSVLDPCLSCICLLGSVACSPVDCPITCTYPFHPDGECCPVCRDCNYEGRKVANGQVFTLDDEPCTRCTCQLGEVSCEKVPCQRACADPALLPGDCCSSCPDSLSPLEEKQGLSPHGNVAFSKAGRSLHGDTEAPVNCSSCPGPPTASPSRPVLHLLQLLLRTNLMKTQTLPTSPAGAHGPHSLALGLTATFPGEPGASPRLSPGPSTPPGAPTLPLASPGAPQPPPVTPERSFSASGAQIVSRWPPLPGTLLTEASALSMMDPSPSKTPITLLGPRVLSPTTSRLSTALAATTHPGPQQPPVGASRGEESTM

SEQ ID NO: 9641 - protein, 219 aa, Homo sapiens
MWAGLLLRAACVALLLPGAPARGYTGRKPPGHFAAERRRLGPHVCLSGFGSGCCPGWAPSMGGGHCTLPLCSFGCGSGICIAPNVCSCQDGEQGATCPETHGPCGEYGCDLTCNHGGCQEVARVCPVGFSMTETAVGIRCTDIDECVTSSCEGHCVNTEGGFVCECGPGMQLSADRHSCQDTDECLGTPCQQRCKNSIGSYKCSCRTGFHLHGNRHSCM

SEQ ID NO: 9642 - protein, 1173 aa, Homo sapiens
MAVETLSPDWEFDRVDDGSQKIHAEVQLKNYGKFLEEYTSQLRRIEDALDDSIGDVWDFNLDPIALKLLPYEQSSLLELIKTENKVLNKVITVYAALCCEIKKLKYEAETKFYNGLLFYGEGATDASMVEGDCQIQMGRFISFLQELSCFVTRCYEVVMNVVHQLAALYISNKIAPKIIETTGVHFQTMYEHLGELLTVLLTLDEIIDNHITLKDHWTMYKRLLKSVHHNPSKFGIQEEKLKPFEKFLLKLEGQLLDGMIFQACIEQQFDSLNGGVSVSKNSTFAEEFAHSIRSIFANVEAKLGEPSEIDQRDKYVGICGLFVLHFQIFRTIDKKFYKSLLDICKKVPAITLTANIIWFPDNFLIQKIPAAAKLLDRKSLQAIKIHRDTFLQQKAQSLTKDVQSYYVFVSSWMMKMESILSKEQRMDKFAEDLTNRCNVFIQGFLYAYSISTIIKTTMNLYMSMQKPMTKTSVKALCRLVELLKAIEHMFYRRSMVVADSVSHITQHLQHQALHSISVAKKRVISDKKYSEQRLDVLSALVLAENTLNGPSTKQRRLIVSLALSVGTQMKTFKDEELFPLQVVMKKLDLISELRERVQTQCDCCFLYWHRAVFPIYLDDVYENAVDAARLHYMFSALRDCVPAMMHARHLESYEILLDCYDKEIMEILNEHLLDKLCKEIEKDLRLSVHTHLKLDDRNPFKVGMKDLALFFSLNPIRFFNRFIDIRAYVTHYLDKTFYNLTTVALHDWATYSEMRNLATQRYGLVMTEAHLPSQTLEQGLDVLEIMRNIHIFVSRYLYNLNNQIFIERTSNNKHLNTINIRHIANSIRTHGTGIMNTTVNFTYQFLKKKFYIFSQFMYDEHIKSRLIKDIRFFREIKDQNDHKYPFDRAEKFNRGIRKLGVTPEGQSYLDQFRQLISQIGNAMGYVRMIRSGGLHCSSNAIRFVPDLEDIVNFEELVKEEGLAEETLKAARHLDSVLSDHTRNSAEGTEYFKMLVDVFAPEFRRPKNIHLRNFYIIVPPLTLNFVEHSISCKEKLNKKNKIGAAFTDDGFAMGVAYILKLLDQYREFDSLHWFQSVREKYLKEIRAVAKQQNVQSASQDEKLLQTMNLTQKRLDVYLQEFELLYFSLSSARIFFRADKTAAEENQEKKEKEEETKTSNGDLSDSTVSADPVVK

SEQ ID NO: 9643 - protein, 851 aa, Homo sapiens
MAVETLSPDWEFDRVDDGSQKIHAEVQLKNYGKFLEEYTSQLRRIEDALDDSIGDVWDFNLDPIALKLLPYEQSSLLELIKTENKVLNKVITVYAALCCEIKKLKYEAETKFYNGLLFYGEGATDASMVEGDCQIQMGRFISFLQELSCFVTRCYEVVMNVVHQLAALYISNKIAPKIIETTGVHFQTMYEHLGELLTVLLTLDEIIDNHITLKDHWTMYKRLLKSVHHNPSKFGIQEEKLKPFEKFLLKLEGQLLDGMIFQACIEQQFDSLNGGVSVSKNSTFAEEFAHSIRSIFANVEAKLGEPSEIDQRDKYVGICGLFVLHFQIFRTIDKKFYKSLLDICKKVPAITLTANIIWFPDNFLIQKIPAAAKLLDRKSLQAIKIHRDTFLQQKAQSLTKDVQSYYVFVSSWMMKMESILSKEQRMDKFAEDLTNRCNVFIQGFLYAYSISTIIKTTMNLYMSMQKPMTKTSVKALCRLVELLKAIEHMFYRRSMVVADSVSHITQHLQHQALHSISVAKKRVISDKKYSEQRLDVLSALVLAENTLNGPSTKQRRLIVSLALSVGTQMKTFKDEELFPLQVVMKKLDLISELRERVQTQCDCCFLYWHRAVFPIYLDDVYENAVDAARLHYMFSALRDCVPAMMHARHLESYEILLDCYDKEIMEILNEHLLDKLCKEIEKDLRLSVHTHLKLDDRNPFKVGMKDLALFFSLNPIRFFNRFIDIRAYVTHYLDKTFYNLTTVALHDWATYSEMRNLATQRYGLVMTEAHLPSQTLEQGLDVLEIMRNIHIFVSRYLYNLNNQIFIERTSNNKHLNTINIRHIANSIRTHGTGIMNTTKWAFTAWRGGPRL

SEQ ID NO: 9644 - protein, 485 aa, Homo sapiens
MAAVWQQVLAVDARYNAYRTPTFPQFRTQYIRRRSQLLRENAKAGHPPALRRQYLRLRGQLLGQRYGPLSEPGSARAYSNSIVRSSRTTLDRMEDFEDDPRALGARGHRRSVSRGSYQLQAQMNRAVYEDRPPGSVVPTSAAEASRAMAGDTSLSENYAFAGMYHVFDQHVDEAVPRVRFANDDRHRLACCSLDGSISLCQLVPAPPTVLRVLRGHTRGVSDFAWSLSNDILVSTSLDATMRIWASEDGRCIREIPDPDSAELLCCTFQPVNNNLTVVGNAKHNVHVMNISTGKKVKGGSSKLTGRVLALSFDAPGRLLWAGDDHGSVFSFLFDMATGKLTKAKRLVVHEGSPVTSISARSWVSREARDPSLLINACLNKLLLYRVVDNEGTLQLKRSFPIEQSSHPVRSIFCPLMSFRQGACVVTGSEDMCVHFFDVERAAKAAVNKLQGHSAPVLDVSFNCDESLLASSDASGMVIVWRREQK

SEQ ID NO: 9645 - protein, 393 aa, Homo sapiens
MEDFEDDPRALGARGHRRSVSRGSYQLQAQMNRAVYEDRPPGSVVPTSAAEASRAMAGDTSLSENYAFAGMYHVFDQHVDEAVPRVRFANDDRHRLACCSLDGSISLCQLVPAPPTVLRVLRGHTRGVSDFAWSLSNDILVSTSLDATMRIWASEDGRCIREIPDPDSAELLCCTFQPVNNNLTVVGNAKHNVHVMNISTGKKVKGGSSKLTGRVLALSFDAPGRLLWAGDDHGSVFSFLFDMATGKLTKAKRLVVHEGSPVTSISARSWVSREARDPSLLINACLNKLLLYRVVDNEGTLQLKRSFPIEQSSHPVRSIFCPLMSFRQGACVVTGSEDMCVHFFDVERAAKAAVNKLQGHSAPVLDVSFNCDESLLASSDASGMVIVWRREQK

SEQ ID NO: 9646 - protein, 82 aa, Homo sapiens
MRNMIPQDNENPPQQGEANQNDSVAFEDVAVNFTPDEWALLDPSQKNLYREVMQETLRNLASIEVLWKRDSLKVKVISMEKF

SEQ ID NO: 9647 - protein, 62 aa, Homo sapiens
MDSVAFEDVAVNFTPDEWALLDPSQKNLYREVMQETLRNLASIEVLWKRDSLKVKVISMEKF

SEQ ID NO: 9648 - protein, 300 aa, Homo sapiens
MHSLEKVTFEDVAIDFTQEEWDMMDTSKRKLYRDVMLENISHLVSLGYQISKSYIILQLEQGKELWWEGRVFLQDQNPDRESALKKKHMISMHPIIRKDTSTSMTMENSLILEDPFEYNDSGEDCTHSSTITQCLLTHSGKKPCVSKQCGKSLRNLLSPKPRKQIHTKGKSYQCNLCEKAYTNCFYLRRHKMTHTGERPYACHLCGKAFTQCSHLRRHEKTHTGERPYKCHQCGKAFIQSFNLRRHERTHLGQKCYECDKSGKAFSQSSGFRGNKIIHIGEKPPACLLCGKAFSLSSDLR

SEQ ID NO: 9649 - protein, 531 aa, Homo sapiens
MLENYRNLVFVGIAASKPDLITCLEQGKEPWNVKRHEMVAEPPVVCSYFARDLWPKQGKKNYFQKVILRRYKKCGCENLQLRKYCKSMDECKVHKECYNGLNQCLTTTQNKIFQCDKYVKVFHKFSNSNRHTIRHTGKKSFKCKECEKSFCMLSHLAQHKRIHSGEKPYKCKECGKAYNETSNLSTHKRIHTGKKPYKCEECGKAFNRLSHLTTHKIIHTGKKPYKCEECGKAFNQSANLTTHKRIHTGEKPYKCEECGRAFSQSSTLTAHKIIHAGEKPYKCEECGKAFSQSSTLTTHKIIHTGEKFYKCEECGKAFSQLSHLTTHKRIHSGEKPYKCEECGKAFKQSSTLTTHKRIHAGEKFYKCEVCSKAFSRFSHLTTHKRIHTGEKPYKCEECGKAFNLSSQLTTHKIIHTGEKPYKCEECGKAFNQSSTLSKHKVIHTGEKPYKYEECGKAFNQSSHLTTHKMIHTGEKPYKCEECGKAFNNSSILNRHKMIHTGEKLYKPESCNNACDNIAKISKYKRNCAGEK

SEQ ID NO: 9650 - protein, 531 aa, Homo sapiens
MGFLHVGQDGLELPTSGDPPASASQSAGITGVSHRTQPPCFEGLTSKDLVREEKTRKRKRKAKESGMALLQGLLTFRDVAIEFSQEEWKCLDPAQRTLYRDVMLENYRNLVSLDTSSKCMMKMFSSTGQGNTEVVHTGTLQIHASHHIGDTCFQEIEKDIHDFVFQWQENETNGHEALMTKTKKLMSSTERHDQRHAGNKPIKNELGSSFHSHLPEVHIFHPEGKIGNQVEKAINDAFSVSASQRISCRPKTRISNKYRNNFLQSSLLTQKREVHTREKSFQRNESGKAFNGSSLLKKHQIIHLGDKQYKCDVCGKDFHQKRYLACHRCHTGENPYTCNECGKTFSHNSALLVHKAIHTGEKPYKCNECGKVFNQQSNLARHHRVHTGEKPYKCEECDKVFSRKSHLERHRRIHTGEKPYKCKVCDKAFRRDSHLAQHTVIHTGEKPYKCNECGKTFVQNSSLVMHKVIHTGEKRYKCNECGKVFNHKSNLACHRRLHTGEKPYKCNECGKVFNRKSNLERHHRLHTGKKS

SEQ ID NO: 9651 - protein, 465 aa, Homo sapiens
MALLQGLLTFRDVAIEFSQEEWKCLDPAQRTLYRDVMLENYRNLVSLDTSSKCMMKMFSSTGQGNTEVVHTGTLQIHASHHIGDTCFQEIEKDIHDFVFQWQENETNGHEALMTKTKKLMSSTERHDQRHAGNKPIKNELGSSFHSHLPEVHIFHPEGKIGNQVEKAINDAFSVSASQRISCRPKTRISNKYRNNFLQSSLLTQKREVHTREKSFQRNESGKAFNGSSLLKKHQIIHLGDKQYKCDVCGKDFHQKRYLACHRCHTGENPYTCNECGKTFSHNSALLVHKAIHTGEKPYKCNECGKVFNQQSNLARHHRVHTGEKPYKCEECDKVFSRKSHLERHRRIHTGEKPYKCKVCDKAFRRDSHLAQHTVIHTGEKPYKCNECGKTFVQNSSLVMHKVIHTGEKRYKCNECGKVFNHKSNLACHRRLHTGEKPYKCNECGKVFNRKSNLERHHRLHTGKKS

SEQ ID NO: 9652 - protein, 837 aa, Homo sapiens
MASKRKSTTPCMVRTSQVVEQDVPEEVDRAKEKGIGTPQPDVAKDSWAAELENSSKENEVIEVKSMGESQSKKLQGGYECKYCPYSTQNLNEFTEHVDMQHPNVILNPLYVCAECNFTTKKYDSLSDHNSKFHPGEANFKLKLIKRNNQTVLEQSIETTNHVVSITTSGPGTGDSDSGISVSKTPIMKPGKPKADAKKVPKKPEEITPENHVEGTARLVTDTAEILSRLGGVELLQDTLGHVMPSVQLPPNINLVPKVPVPLNTTKYNSALDTNATMINSFNKFPYPTQAELSWLTAASKHPEEHIRIWFATQRLKHGISWSPEEVEEARKKMFNGTIQSVPPTITVLPAQLAPTKVTQPILQTALPCQILGQTSLVLTQVTSGSTTVSCSPITLAVAGVTNHGQKRPLVTPQAAPEPKRPHIAQVPEPPPKVANPPLTPASDRKKTKEQIAHLKASFLQSQFPDDAEVYRLIEVTGLARSEIKKWFSDHRYRCQRGIVHITSESLAKDQLAIAASRHGRTYHAYPDFAPQKFKEKTQGQVKILEDSFLKSSFPTQAELDRLRVETKLSRREIDSWFSERRKLRDSMEQAVLDSMGSGKKGQDVGAPNGALSRLDQLSGAQLTSSLPSPSPAIAKSQEQVHLLRSTFARTQWPTPQEYDQLAAKTGLVRTEIVRWFKENRCLLKTGTVKWMEQYQHQPMADDHGYDAVARKATKPMAESPKNGGDVVPQYYKDPKKLCEEDLEKLVTRVKVGSEPAKDCLPAKPSEATSDRSEGSSRDGQGSDENEESSVVDYVEVTVGEEDAISDRSDSWSQAAAEGVSELAESDSDCVPAEAGQA

SEQ ID NO: 9653 - protein, 570 aa, Homo sapiens
MENLKSGVYPLKEASGCPGADRNLLVYSFYEKGPLTFRDVAIEFSLEEWQCLDTAQQDLYRKVMLENYRNLVFLAGIAVSKPDLITCLEQGKEPWNMKRHAMVDQPPVTYSHFAQDLWPEQGIKDSFQEVILRRYGKCGHEDLQLRTGCKSVDECNLHKECYDELNQCLTTTQSEIFQYDKYVNVFYKFSNPNIQKIRHTGKKPFKCKKCDKSFCMLLHLTQHKRIHIRENSYQCEECGKVFNWFSTLTRHRRIHTGEKPYKCEQCGKAFKQSSTLTTHKIIHTGEKPYRCEECGKTFNRSSHLTTHKRIHTGEKPYRCEECGRAFNRSSHLTTHKIIHTGEKPYKCEECGKAFNQSSTLTTHKIIHAGEKPYKCEECGKAFYRFSYLTKHKIIHTGEKFYKCEECGKGFNWSSTLTKHKRIHTGEKPYKCEQCGKAFNESSNLTAHKIIHTGEKPYKCEECGKAFNRSPKLTAHKVIHSGEKPYKCEECGKAFNQFSNLTKHKITHIGDTSYKYLECDKAFSQSSTLTKHKVIHTGEKPYNCEEYGKAFNQSSNLIEQSNSYWRETLQM

SEQ ID NO: 9654 - protein, 271 aa, Homo sapiens
MNSSQISLRMKHGRVNMQKKPSKCSECGKFFTQRSSLTQHQRIHRGEKPYVCSECGSCFRKQSNLTQHLRIHTGEKPYKCNECEKAFQTKAILVQHLRIHTGEKPYKCNECGKAFCQSPSLIKHQRIHTGEKPYKCTECGKAFSQSICLTRHQRSHSGDKPFKCNECGKAFNQSACLMQHQRIHSGEKPYTCTECGKAFTQNSSLVEHERTHTGEKLYKCSECEKTFRKQAHLSEHYRIHTGEKPYECVGCGKSFRHSSALLRHQRLHAGE

SEQ ID NO: 9655 - protein, 215 aa, Homo sapiens
MNSSQISLRMKHGRVNMQKKPSKCSECGKFFTQRSSLTQHQRIHRGEKPYVCSECGSCFRKQSNLTQHLRIHTGEKPYKCNECEKAFQTKAILVQHLRIHTGEKPYKCNECGKAFCQSPSLIKHQRIHTGEKPYKCTECGKAFTQNSSLVEHERTHTGEKLYKCSECEKTFRKQAHLSEHYRIHTGEKPYECVGCGKSFRHSSALLRHQRLHAGE

SEQ ID NO: 9656 - protein, 594 aa, Homo sapiens
MAAAVLRDSTSVPVTAEAKLMGFTQGCVTFEDVAIYFSQEEWGLLDEAQRLLYRDVMLENFALITALVCWHGMEDEETPEQSVSVEGVPQVRTPEASPSTQKIQSCDMCVPFLTDILHLTDLPGQELYLTGACAVFHQDQKHHSAEKPLESDMDKASFVQCCLFHESGMPFTSSEVGKDFLAPLGILQPQAIANYEKPNKISKCEEAFHVGISHYKWSQCRRESSHKHTFFHPRVCTGKRLYESSKCGKACCCECSLVQLQRVHPGERPYECSECGKSFSQTSHLNDHRRIHTGERPYVCGQCGKSFSQRATLIKHHRVHTGERPYECGECGKSFSQSSNLIEHCRIHTGERPYECDECGKAFGSKSTLVRHQRTHTGEKPYECGECGKLFRQSFSLVVHQRIHTTARPYECGQCGKSFSLKCGLIQHQLIHSGARPFECDECGKSFSQRTTLNKHHKVHTAERPYVCGECGKAFMFKSKLVRHQRTHTGERPFECSECGKFFRQSYTLVEHQKIHTGLRPYDCGQCGKSFIQKSSLIQHQVVHTGERPYECGKCGKSFTQHSGLILHRKSHTVERPRDSSKCGKPYSPRSNIV

SEQ ID NO: 9657 - protein, 661 aa, Homo sapiens
MPANEDAPQPGEHGSACEVSVSFEDVTVDFSREEWQQLDSTQRRLYQDVMLENYSHLLSVGFEVPKPEVIFKLEQGEGPWTLEGEAPHQSCSDGKFGIKPSQRRISGKSTFHSEMEGEDTRDDSLYSILEELWQDAEQIKRCQEKHNKLLSRTTFLNKKILNTEWDYEYKDFGKFVHPSPNLILSQKRPHKRDSFGKSFKHNLDLHIHNKSNAAKNLDKTIGHGQVFTQNSSYSHHENTHTGVKFCERNQCGKVLSLKHSLSQNVKFPIGEKANTCTEFGKIFTQRSHFFAPQKIHTVEKPHELSKCVNVFTQKPLLSIYLRVHRDEKLYICTKCGKAFIQNSELIMHEKTHTREKPYKCNECGKSFFQVSSLLRHQTTHTGEKLFECSECGKGFSLNSALNIHQKIHTGERHHKCSECGKAFTQKSTLRMHQRIHTGERSYICTQCGQAFIQKAHLIAHQRIHTGEKPYECSDCGKSFPSKSQLQMHKRIHTGEKPYICTECGKAFTNRSNLNTHQKSHTGEKSYICAECGKAFTDRSNFNKHQTIHTGEKPYVCADCGRAFIQKSELITHQRIHTTEKPYKCPDCEKSFSKKPHLKVHQRIHTGEKPYICAECGKAFTDRSNFNKHQTIHTGDKPYKCSDCGKGFTQKSVLSMHRNIHT

SEQ ID NO: 9658 - protein, 478 aa, Homo sapiens
MATALVSAHSLAPLNLKKEGLRVVREDHYSTWEQGFKLQGNSKGLGQEPLCKQFRQLRYEETTGPREALSRLRELCQQWLQPETHTKEQILELLVLEQFLIILPKELQARVQEHHPESREDVVVVLEDLQLDLGETGQQDPDQPKKQKILVEEMAPLKGVQEQQVRHECEVTKPEKEKGEETRIENGKLIVVTDSCGRVESSGKISEPMEAHNEGSNLERHQAKPKEKIEYKCSEREQRFIQHLDLIEHASTHTGKKLCESDVCQSSSLTGHKKVLSREKGHQCHECGKAFQRSSHLVRHQKIHLGEKPYQCNECGKVFSQNAGLLEHLRIHTGEKPYLCIHCGKNFRRSSHLNRHQRIHSQEEPCECKECGKTFSQALLLTHHQRIHSHSKSHQCNECGKAFSLTSDLIRHHRIHTGEKPFKCNICQKAFRLNSHLAQHVRIHNEEKPYQCSECGEAFRQRSGLFQHQRYHHKDKLA

SEQ ID NO: 9659 - protein, 325 aa, Homo sapiens [sequence omitted]

SEQ ID NO: 9660 - protein, 242 aa, Homo sapiens
MGAKQSGPAAANGRTRAYSGSDLPSSSSGGANGTAGGGGGARAAAAGRFPAQVPSAHQPSASGGAAAAAAAPAAPAAPRSRSLGGAVGSVASGARAAQSPFSIPNSSSGPYGSQDSVHSSPEDGGGGRDRPVGGSPGGPRLVIGSLPAHLSPHMFGGFKCPVCSKFVSSDEMDLHLVMCLTKPRITYNEDVLSKDAGECAICLEELQQGDTIARLPCLCIYHKGCIDEWFEVNRSCPEHPSD

SEQ ID NO: 9661 - protein, 277 aa, Homo sapiens
MEAAETEAEAAALEVLAEVAGILEPVGLQEEAELPAKILVEFVVDSQKKDKLLCSQLQVADFLQNILAQEDTAKGLDPLASEDTSRQKAIAAKEQWKELKATYREHVEAIKIGLTKALTQMEEAQRKRTQLREAFEQLQAKKQMAMEKRRAVQNQWQLQQEKHLQHLAEVSAEVRERKTGTQQELDRVFQKLGNLKQQAEQERDKLQRYQTFLQLLYTLQGKLLFPEAEAEAENLPDDKPQQPTRPQEQSTGDTMGRDPGVSFKAVGLQPAGDVNLP

SEQ ID NO: 9662 - protein, 230 aa, Homo sapiens
MEAAETEAEAAALEVLAEVAGILEPVGLQEEAELPAKILVEFVVDSQKKDKLLCSQLQVADFLQNILAQEDTAKGLDPLASEDTSRQKAIAAKEQWKELKATYREHVEAIKIGLTKALTQMEEAQRKRTQLREAFEQLQAKKQMAMEKRRAVQNQWQLQQEKHLQHLAEVSAEGKLLFPEAEAEAENLPDDKPQQPTRPQEQSTGDTMGRDPGVSFKAVGLQPAGDVNLP

SEQ ID NO: 9663 - protein, 1191 aa, Homo sapiens
MPGTPGSLEMGLLTFRDVAIEFSPEEWQCLDTAQQNLYRNVMLENYRNLAFLGIALSKPDLITYLEQGKEPWNMKQHEMVDEPTGICPHFPQDFWPEQSMEDSFQKVLLRKYEKCGHENLQLRKGCKSVDECKVHKEGYNKLNQCLTTAQSKVFQCGKYLKVFYKFLNSNRHTIRHTGKKCFKCKKCVKSFCIRLHKTQHKCVYITEKSCKCKECEKTFHWSSTLTNHKEIHTEDKPYKCEECGKAFKQLSTLTTHKIICAKEKIYKCEECGKAFLWSSTLTRHKRIHTGEKPYKCEECGKAFSHSSTLAKHKRIHTGEKPYKCEECGKAFSRSSTLAKHKRIHTGEKPYKCKECGKAFSNSSTLANHKITHTEEKPYKCKECDKAFKRLSTLTKHKIIHAGEKLYKCEECGKAFNRSSNLTIHKFIHTGEKPYKCEECGKAFNWSSSLTKHKRFHTREKPFKCKECGKAFIWSSTLTRHKRIHTGEKPYKCEECGKAFRQSSTLTKHKIIHTGEKPYKFEECGKAFRQSLTLNKHKIIHSREKPYKCKECGKAFKQFSTLTTHKIIHAGKKLYKCEECGKAFNHSSSLSTHKIIHTGEKSYKCEECGKAFLWSSTLRRHKRIHTGEKPYKCEECGKAFSHSSALAKHKRIHTGEKPYKCKECGKAFSNSSTLANHKITHTEEKPYKCKECDKTFKRLSTLTKHKIIHAGEKLYKCEECGKAFNRSSNLTIHKFIHTGEKPYKCEECGKAFNWSSSLTKHKRIHTREKPFKCKECGKAFIWSSTLTRHKRIHTGEKPYKCEECGKAFSRSSTLTKHKTIHTGEKPYKCKECGKAFKHSSALAKHKIIHAGEKLYKCEECGKAFNQSSNLTTHKIIHTKEKPSKSEECDKAFIWSSTLTEHKRIHTREKTYKCEECGKAFSQPSHLTTHKRMHTGEKPYKCEECGKAFSQSSTLTTHKIIHTGEKPYKCEECGKAFRKSSTLTEHKIIHTGEKPYKCEECGKAFSQSSTLTRHTRMHTGEKPYKCEECGKAFNRSSKLTTHKIIHTGEKPYKCEECGKAFISSSTLNGHKRIHTREKPYKCEECGKAFSQSSTLTRHKRLHTGEKPYKCGECGKAFKESSALTKHKIIHTGEKPYKCEKCGKAFNQSSILTNHKKIHTITPVIPLLWEAEAGGSRGQEMETILANTVKPLLY

SEQ ID NO: 9664 - protein, 1159 aa, Homo sapiens
MPGTPGSLEMGLLTFRDVAIEFSPEEWQCLDTAQQNLYRNVMLENYRNLAFLGICPHFPQDFWPEQSMEDSFQKVLLRKYEKCGHENLQLRKGCKSVDECKVHKEGYNKLNQCLTTAQSKVFQCGKYLKVFYKFLNSNRHTIRHTGKKCFKCKKCVKSFCIRLHKTQHKCVYITEKSCKCKECEKTFHWSSTLTNHKEIHTEDKPYKCEECGKAFKQLSTLTTHKIICAKEKIYKCEECGKAFLWSSTLTRHKRIHTGEKPYKCEECGKAFSHSSTLAKHKRIHTGEKPYKCEECGKAFSRSSTLAKHKRIHTGEKPYKCKECGKAFSNSSTLANHKITHTEEKPYKCKECDKAFKRLSTLTKHKIIHAGEKLYKCEECGKAFNRSSNLTIHKFIHTGEKPYKCEECGKAFNWSSSLTKHKRFHTREKPFKCKECGKAFIWSSTLTRHKRIHTGEKPYKCEECGKAFRQSSTLTKHKIIHTGEKPYKFEECGKAFRQSLTLNKHKIIHSREKPYKCKECGKAFKQFSTLTTHKIIHAGKKLYKCEECGKAFNHSSSLSTHKIIHTGEKSYKCEECGKAFLWSSTLRRHKRIHTGEKPYKCEECGKAFSHSSALAKHKRIHTGEKPYKCKECGKAFSNSSTLANHKITHTEEKPYKCKECDKTFKRLSTLTKHKIIHAGEKLYKCEECGKAFNRSSNLTIHKFIHTGEKPYKCEECGKAFNWSSSLTKHKRIHTREKPFKCKECGKAFIWSSTLTRHKRIHTGEKPYKCEECGKAFSRSSTLTKHKTIHTGEKPYKCKECGKAFKHSSALAKHKIIHAGEKLYKCEECGKAFNQSSNLTTHKIIHTKEKPSKSEECDKAFIWSSTLTEHKRIHTREKTYKCEECGKAFSQPSHLTTHKRMHTGEKPYKCEECGKAFSQSSTLTTHKIIHTGEKPYKCEECGKAFRKSSTLTEHKIIHTGEKPYKCEECGKAFSQSSTLTRHTRMHTGEKPYKCEECGKAFNRSSKLTTHKIIHTGEKPYKCEECGKAFISSSTLNGHKRIHTREKPYKCEECGKAFSQSSTLTRHKRLHTGEKPYKCGECGKAFKESSALTKHKIIHTGEKPYKCEKCGKAFNQSSILTNHKKIHTITPVIPLLWEAEAGGSRGQEMETILANTVKPLLY

SEQ ID NO: 9665 - protein, 485 aa, Homo sapiens
MGRYSGKTCRLLFMLVLTVAFFVAELVSGYLGNSIALLSDSFNMLSDLISLCVGLSAGYIARRPTRGFSATYGYARAEVVGALSNAVFLTALCFTIFVEAVLRLARPERIDDPELVLIVGVLGLLVNVVGLLIFQDCAAWFACCLRGRSRRLQQRQQLAEGCVPGAFGGPQGAEDPRRAADPTAPGSDSAVTLRGTSVERKREKGATVFANVAGDSFNTQNEPEDMMKKEKKSEALNIRGVLLHVMGDALGSVVVVITAIIFYVLPLKSEDPCNWQCYIDPSLTVLMVIIILSSAFPLIKETAAILLQMVPKGVNMEELMSKLSAVPGISSVHEVHIWELVSGKIIATLHIKYPKDRGYQDASTKIREIFHHAGIHNVTIQFENVDLKEPLEQKDLLLLCNSPCISKGCAKQLCCPPGALPLAHVNGCAEHNGGPSLDTYGSDGLSRRDAREVAIEVSLDSCLSDHGQSLNKTQEDQCYVNRTHF

SEQ ID NO: 9666 - protein, 240 aa, Homo sapiens
MGDALGSVVVVITAIIFYVLPLKSEDPCNWQCYIDPSLTVLMVIIILSSAFPLIKETAAILLQMVPKGVNMEELMSKLSAVPGISSVHEVHIWELVSGKIIATLHIKYPKDRGYQDASTKIREIFHHAGIHNVTIQFENVDLKEPLEQKDLLLLCNSPCISKGCAKQLCCPPGALPLAHVNGCAEHNGGPSLDTYGSDGLSRRDAREVAIEVSLDSCLSDHGQSLNKTQEDQCYVNRTHF

SEQ ID NO: 9667 - protein, 223 aa, Homo sapiens
MGRYSGKTCRLLFMLVLTVAFFVAELVSGYLGNSIALLSDSFNMLSDLISLCVGLSAGYIARRPTRGFSATYGYARAEVVGALSNAVFLTALCFTIFVEAVLRLARPERIDDPELVLIVGVLGLLVNVVGLLIFQDCAAWFACCLRGRSRRLQQRQQLAEGCVPGAFGGPQGAEDPRRAADPTAPGSDSAVTLRGTSVERKREKGATVFANVAELIHNTRFLL

SEQ ID NO: 9668 - protein, 424 aa, Homo sapiens
MELSYRLFICLLLWGSTELCYPQPLWLLQGGASHPETSVQPVLVECQEATLMVMVSKDLFGTGKLIRAADLTLGPEACEPLVSMDTEDVVRFEVGLHECGNSMQVTDDALVYSTFLLHDPRPVGNLSIVRTNRAEIPIECRYPRQGNVSSQAILPTWLPFRTTVFSEEKLTFSLRLMEENWNAEKRSPTFHLGDAAHLQAEIHTGSHVPLRLFVDHCVATPTPDQNASPYHTIVDFHGCLVDGLTDASSAFKVPRPGPDTLQFTVDVFHFANDSRNMIYITCHLKVTLAEQDPDELNKACSFSKPSNSWFPVEGSADICQCCNKGDCGTPSHSRRQPHVMSQWSRSASRNRRHVTEEADVTVGPLIFLDRRGDHEVEQWALPSDTSVVLLGVGLAVVVSLTLTAVILVLTRRCRTASHPVSASE

SEQ ID NO: 9669 - protein, 372 aa, Homo sapiens
MELSYRLFICLLLWGSTELCYPQPLWLLQGGASHPETSVQPVLVECQEATLMVMVSKDLFGTGKLIRAADLTLGPEACEPLVSMDTEDVVRFEVGLHECGNSMQVTDDALVYSTFLLHDPRPVGNLSIVRTNRAEIPIECRYPRQGNVSSQAILPTWLPFRTTVFSEEKLTFSLRLMEENWNAEKRSPTFHLGDAAHLQAEIHTGSHVPLRLFVDHCVATPTPDQNASPYHTIVDFHGCLVDGLTDASSAFKVPRPGPDTLQFTVDVFHFANDSRNMIYITCHLKVTLAEQDPDELNKACSFSKPSNSWFPVEGSADICQCCNKGDCGTPSHSRRQPHVMSQWSRSASRNRRHVTEEADVTVGATDLPGQEW

SEQ ID NO: 9670 - protein, 373 aa, Homo sapiens
MVMVSKDLFGTGKLIRAADLTLGPEACEPLVSMDTEDVVRFEVGLHECGNSMQVTDDALVYSTFLLHDPRPVGNLSIVRTNRAEIPIECRYPRQGNVSSQAILPTWLPFRTTVFSEEKLTFSLRLMEENWNAEKRSPTFHLGDAAHLQAEIHTGSHVPLRLFVDHCVATPTPDQNASPYHTIVDFHGCLVDGLTDASSAFKVPRPGPDTLQFTVDVFHFANDSRNMIYITCHLKVTLAEQDPDELNKACSFSKPSNSWFPVEGSADICQCCNKGDCGTPSHSRRQPHVMSQWSRSASRNRRHVTEEADVTVGPLIFLDRRGDHEVEQWALPSDTSVVLLGVGLAVVVSLTLTAVILVLTRRCRTASHPVSASE

SEQ ID NO: 9671 - protein, 586 aa, Homo sapiens
MGPLTFRDVKIEFSLEEWQCLDTAQRNLYRDVMLENYRNLVFLGIAVSKPDLITWLEQGKEPWNLKRHEMVDKTPVMCSHFAQDVWPEHSIKDSFQKVILRTYGKYGHENLQLRKDHKSVDACKVYKGGYNGLNQCLTTTDSKIFQCDKYVKVFHKFPNVNRNKIRHTGKKPFKCKNRGKSFCMLSQLTQHKKIHTREYSYKCEECGKAFNWSSTLTKHKIIHTGEKPYKCEECGKAFNRSSNLTKHKIIHTGEKPYKCEECGKAFNRSSTLTKHKRIHTEEKPYKCEECGKAFNQFSILNKHKRIHMEDKPYKCEECGKAFRVFSILKKHKIIHTGEKPYKCEECGKAFNQFSNLTKHKIIHTGEKPYKCDECGKAFNQSSTLTKHKRIHTGEKPYKCEECGKAFKQSSTLTEHKIIHTGEKPYKCEKCGKAFSWSSAFTKHKRNHMEDKPYKCEECGKAFSVFSTLTKHKIIHTREKPYKCEECGKAFNQSSIFTKHKIIHTEGKSYKCEKCGNAFNQSSNLTARKIIYTGEKPYKYEECDKAFNKFSTLITHQIIYTGEKPCKHECGRAFNKSSNYTKEKLQT

SEQ ID NO: 9672 - protein, 517 aa, Homo sapiens
MVDKTPVMCSHFAQDVWPEHSIKDSFQKVILRTYGKYGHENLQLRKDHKSVDACKVYKGGYNGLNQCLTTTDSKIFQCDKYVKVFHKFPNVNRNKIRHTGKKPFKCKNRGKSFCMLSQLTQHKKIHTREYSYKCEECGKAFNWSSTLTKHKIIHTGEKPYKCEECGKAFNRSSNLTKHKIIHTGEKPYKCEECGKAFNRSSTLTKHKRIHTEEKPYKCEECGKAFNQFSILNKHKRIHMEDKPYKCEECGKAFRVFSILKKHKIIHTGEKPYKCEECGKAFNQFSNLTKHKIIHTGEKPYKCDECGKAFNQSSTLTKHKRIHTGEKPYKCEECGKAFKQSSTLTEHKIIHTGEKPYKCEKCGKAFSWSSAFTKHKRNHMEDKPYKCEECGKAFSVFSTLTKHKIIHTREKPYKCEECGKAFNQSSIFTKHKIIHTEGKSYKCEKCGNAFNQSSNLTARKIIYTGEKPYKYEECDKAFNKFSTLITHQIIYTGEKPCKHECGRAFNKSSNYTKEKLQT

SEQ ID NO: 9673 - protein, 554 aa, Homo sapiens
MGPLTFRDVKIEFSLEEWQCLDTAQRNLYRDVMLENYRNLVFLVMCSHFAQDVWPEHSIKDSFQKVILRTYGKYGHENLQLRKDHKSVDACKVYKGGYNGLNQCLTTTDSKIFQCDKYVKVFHKFPNVNRNKIRHTGKKPFKCKNRGKSFCMLSQLTQHKKIHTREYSYKCEECGKAFNWSSTLTKHKIIHTGEKPYKCEECGKAFNRSSNLTKHKIIHTGEKPYKCEECGKAFNRSSTLTKHKRIHTEEKPYKCEECGKAFNQFSILNKHKRIHMEDKPYKCEECGKAFRVFSILKKHKIIHTGEKPYKCEECGKAFNQFSNLTKHKIIHTGEKPYKCDECGKAFNQSSTLTKHKRIHTGEKPYKCEECGKAFKQSSTLTEHKIIHTGEKPYKCEKCGKAFSWSSAFTKHKRNHMEDKPYKCEECGKAFSVFSTLTKHKIIHTREKPYKCEECGKAFNQSSIFTKHKIIHTEGKSYKCEKCGNAFNQSSNLTARKIIYTGEKPYKYEECDKAFNKFSTLITHQIIYTGEKPCKHECGRAFNKSSNYTKEKLQT

SEQ ID NO: 9674 - protein, 444 aa, Homo sapiens
MKVVPSLLLSVLLAQVWLVPGLAPSPQSPETPAPQNQTSRVVQAPKEEEEDEQEASEEKASEEEKAWLMASRQQLAKETSNFGFSLLRKISMRHDGNMVFSPFGMSLAMTGLMLGATGPTETQIKRGLHLQALKPTKPGLLPSLFKGLRETLSRNLELGLTQGSFAFIHKDFDVKETFFNLSKRYFDTECVPMNFRNASQAKRLMNHYINKETRGKIPKLFDEINPETKLILVDYILFKGKWLTPFDPVFTEVDTFHLDKYKTIKVPMMYGAGKFASTFDKNFRCHVLKLPYQGNATMLVVLMEKMGDHLALEDYLTTDLVETWLRNMKTRNMEVFFPKFKLDQKYEMHELLRQMGIRRIFSPFADLSELSATGRNLQVSRVLQRTVIEVDERGTEAVAGILSEITAYSMPPVIKVDRPFHFMIYEETSGMLLFLGRVVNPTLL

SEQ ID NO: 9675 - protein, 389 aa, Homo sapiens
MAITLTLQTAEMQEGLLAVKVKEEEEEHSCGPESGLSRNNPHTREIFRRRFRQFCYQESPGPREALQRLQELCHQWLRPEMHTKEQILELLVLEQFLTILPEELQAWVRQHRPVSGEEAVTVLEDLERELDDPGEQVLSHAHEQEEFVKEKATPGAAQESSNDQFQTLEEQLGYNLREVCPVQEIDGKAGTWNVELAPKREISQEVKSLIQVLGKQNGNITQIPEYGDTCDREGRLEKQRVSSSVERPYICSECGKSFTQNSILIEHQRTHTGEKPYECDECGRAFSQRSGLFQHQRLHTGEKRYQCSVCGKAFSQNAGLFHHLRIHTGEKPYQCNQCNKSFSRRSVLIKHQRIHTGERPYECEECGKNFIYHCNLIQHRKVHPVAESS

SEQ ID NO: 9676 - protein, 572 aa, Homo sapiens
MPGPLGSLEMGVLTFRDVALEFSLEEWQCLDTAQQNLYRNVMLENYRNLVFVGIAASKPDLITCLEQGKEPWNVKRHEMVTEPPVVYSYFAQDLWPKQGKKNYFQKVILRTYKKCGRENLQLRKYCKSMDECKVHKECYNGLNQCLTTTQNKIFQYDKYVKVFHKFSNSNRHKIGHTGKKSFKCKECEKSFCMLSHLAQHKRIHSGEKPYKCKECGKAYNEASNLSTHKRIHTGKKPYKCEECGKAFNRLSHLTTHKIIHTGKKPYKCEECGKAFNQSANLTTHKRIHTGEKPYKCEECGRAFSQSSTLTAHKIIHAGEKPYKCEECGKAFSQSSTLTTHKIIHTGEKFYKCEECGKAFSRLSHLTTHKRIHSGEKPYKCEECGKAFKQSSTLTTHKRIHAGEKFYKCEVCSKAFSRFSHLTTHKRIHTGEKPYKCEECGKAFNLSSQLTTHKIIHTGEKPYKCEECGKAFNQSSTLSKHKVIHTGEKPYKCEECGKAFNQSSHLTTHKMIHTGEKPYKCEECGKAFNNSSILNRHKMIHTGEKLYKPESCNNACDNIAKISKYKRNCAGEK

SEQ ID NO: 9677 - protein, 433 aa, Homo sapiens
MALDLRTIFQCEPSENNLGSENSAFQQSQGPAVQREEGISEFSRMVLNSFQDSNNSYARQELQRLYRIFHSWLQPEKHSKDEIISLLVLEQFMIGGHCNDKASVKEKWKSSGKNLERFIEDLTDDSINPPALVHVHMQGQEALFSEDMPLRDVIVHLTKQVNAQTTREANMGTPSQTSQDTSLETGQGYEDEQDGWNSSSKTTRVNENITNQGNQIVSLIIIQEENGPRPEEGGVSSDNPYNSKRAELVTARSQEGSINGITFQGVPMVMGAGCISQPEQSSPESALTHQSNEGNSTCEVHQKGSHGVQKSYKCEECPKVFKYLCHLLAHQRRHRNERPFVCPECQKGFFQISDLRVHQIIHTGKKPFTCSMCKKSFSHKTNLRSHERIHTGEKPYTCPFCKTSYRQSSTYHRHMRTHEKITLPSVPSTPEAS

SEQ ID NO: 9678 - protein, 633 aa, Homo sapiens
MLRRGYKASERRRHLSERLSWHQDQALSSSIYLLREMGPTGFLLREEEPEYMDFRVFLGNPHVCNCSTFPKGGELCKHICWVLLKKFKLPRNHESALQLGLGEREISDLLRGIHRVQTPQPGTNDENEHVEEDGYIKQKEIDSEDICSICQELLLEKKLPVTFCRFGCGNSIHIKCMKILANYQSTSNTSMLKCPLCRKEFAPLKLILEEFKNSSKLVAAAEKERLDKHLGIPCNNCKQFPIEGKCYKCTECIEYHLCQECFDSCCHLSHTFTFREKRNQKWRSLEKRADEVVKYIDTKNEIEEKMSHFQEKQGQVYTPKHIVRSLPLQLITKNSKLLAPGYQCLLCLKAFHLGQHTRLLPCTHKFHRKCIDNWLFHKCNSCPIDGQVIYNPLTWKNSAVNGQAHQSVSNRDIIHLSKQKEPDLFIPGTGLVLKQNRLGILPSIPQCNFDELNTPQSPKDAYENTTIDNLCSIKLDNSNSKKLTYDYKISQHFPRYLQDLPTVSFGKIPSQTLLPPIVHKNIVCPTAMESPCISGKFHTSLSRMTKGCKCNNHNLKKTPATKIREDNKRSTLLPEDFNLIVNWSTAKLSLSKRYSNCMGEITRKCSHLSRQPVSHSVNTKSTELSLIIEGVQL

SEQ ID NO: 9679 - protein, 765 aa, Homo sapiens
MEEKYGGDVLAGPGGGGGLGPVDVPSARLTKYIVLLCFTKFLKAVGLFESYDLLKAVHIVQFIFILKLGTAFFMVLFQKPFSSGKTITKHQWIKIFKHAVAGCIISLLWFFGLTLCGPLRTLLLFEHSDIVVISLLSVLFTSSGGGPAKTRGAAFFIIAVICLLLFDNDDLMAKMAEHPEGHHDSALTHMLYTAIAFLGVADHKGGVLLLVLALCCKVGFHTASRKLSVDVGGAKRLQALSHLVSVLLLCPWVIVLSVTTESKVESWFSLIMPFATVIFFVMILDFYVDSICSVKMEVSKCARYGSFPIFISALLFGNFWTHPITDQLRAMNKAAHQESTEHVLSGGVVVSAIFFILSANILSSPSKRGQKGTLIGYSPEGTPLYNFMGDAFQHSSQSIPRFIKESLKQILEESDSRQIFYFLCLNLLFTFVELFYGVLTNSLGLISDGFHMLFDCSALVMGLFAALMSRWKATRIFSYGYGRIEILSGFINGLFLIVIAFFVFMESVARLIDPPELDTHMLTPVSVGGLIVNLIGICAFSHAHSHAHGASQGSCHSSDHSHSHHMHGHSDHGHGHSHGSAGGGMNANMRGVFLHVLADTLGSIGVIVSTVLIEQFGWFIADPLCSLFIAILIFLSVVPLIKDACQVLLLRLPPEYEKELHIALEKIQKIEGLISYRDPHFWRHSASIVAGTIHIQVTSDVLEQRIVQQVTGILKDAGVNNLTIQVEKEAYFQHMSGLSTGFHDVLAMTKQMESMKYCKDGTYIM

SEQ ID NO: 9680 - protein, 523 aa, Homo sapiens
MAKMAEHPEGHHDSALTHMLYTAIAFLGVADHKGGVLLLVLALCCKVGFHTASRKLSVDVGGAKRLQALSHLVSVLLLCPWVIVLSVTTESKVESWFSLIMPFATVIFFVMILDFYVDSICSVKMEVSKCARYGSFPIFISALLFGNFWTHPITDQLRAMNKAAHQESTEHVLSGGVVVSAIFFILSANILSSPSKRGQKGTLIGYSPEGTPLYNFMGDAFQHSSQSIPRFIKESLKQILEESDSRQIFYFLCLNLLFTFVELFYGVLTNSLGLISDGFHMLFDCSALVMGLFAALMSRWKATRIFSYGYGRIEILSGFINGLFLIVIAFFVFMESVARLIDPPELDTHMLTPVSVGGLIVNLIGICAFSHAHSHAHGASQGSCHSSDHSHSHHMHGHSDHGHGHSHGSAGGGMNANMRGVFLHVLADTLGSIGVIVSTVLIEQFGWFIADPLCSLFIAILIFLSVVPLIKDACQVLLLRLPPEYEKELHIALEKVLYVISSLLSSLKITFLKSLLEVKQTTK

SEQ ID NO: 9681 - protein, 118 aa, Homo sapiens
MEEKYGGDVLAGPGGGGGLGPVDVPSARLTKYIVLLCFTKFLKAVGLFESYDLLKAVHIVQFIFILKLGTAFFMVLFQKPFSSGKTITKHQIIGSLKIPGRKEFKDKKLNDPRKLVGN

SEQ ID NO: 9682 - protein, 77 aa, Homo sapiens
MEEKYGGDVLAGPGGGGGLGPVDVPSARTAFFMVLFQKPFSSGKTITKHQIIGSLKIPGRKEFKDKKLNDPRKLVGN

SEQ ID NO: 9683 - protein, 696 aa, Homo sapiens
MELGSCFKTYEDFKECFSAYKRENRCSFILRDCVSVRFHNLNHGTSIREDILYVQVKFVCIRTQSNRKRTREADMCPAYLLLRYNERLDRLFISELNTQHIHGDSKVASPGGDTTGKSQKTMCLQRLQPVQPTTKKDLDTAEKSLVEPSFCLDKVQVSSKPEQEGITPSDLAKIAKVMKNFLKVDEGSMASFSVGDSQHLDRLSFQSSKMTDLFIRFPENLLLHRVENTQGHILYAFLVENKERESRVVHFAVLKAETVTSVAKMLSIFTEFNSDWPKVKVVFVDPSFHYRAILQEIFPAARILLSIYHTTRLLEKKLHRSSANPSFKRLMKEALREAVFVTSEASLKNLCQMSQAVLDEDLFNFLQAHWFTCELLWYMHVRKGLLACNTYMDSLDIVTSKVSSLFREQQSLLDCILCFVDYIDFFNTKGLKNLPTPPPKLKRARPASMPLKSKKAFGICGESLTSLPAEETKPDAQQVQVQQQSQVPPSQVGMLDTLHQSGSELAYKLCHNEWEVVQNSTHLVDMAGSSVDVQLLEDSHQVSKDGCSCSCSFQQWYHLPCRHILALLHTSQQPVGEAMVCRRWQKKYQYLLGPNGELQDRGMVPNTGQPEKQGRNDMIQDLSRELANLLMQTEGPELEERYSTLRKIVDIWAGPSQPSELFQQPGDFKDVGRLPFLWGKQEEGEGFPPATAVMHY

SEQ ID NO: 9684 - protein, 394 aa, Homo sapiens
MNTNSKEVLSLGVQVPEAWEELLTMKVEAKSHLQWQESRLKRSNPLAREIFRRHFRQLCYQETPGPREALTRLQELCYQWLRPHVSTKEQILDLLVLEQFLSILPKELQGWVREHCPESGEEAVILLEDLERELDEPQHEMVAHRHRQEVLCKEMVPLAEQTPLTLQSQPKEPQLTCDSAQKCHSIGETDEVTKTEDRELVLRKDCPKIVEPHGKMFNEQTWEVSQQDPSHGEVGEHKDRIERQWGNLLGEGQHKCDECGKSFTQSSGLIRHQRIHTGERPYECNECGKAFSRSSGLFNHRGIHNIQKRYHCKECGKVFSQSAGLIQHQRIHKGEKPYQCSQCSKSYSRRSFLIEHQRSHTGERPHQCIECGKSFNRHCNLIRHQKIHTVAELV

SEQ ID NO: 9685 - protein, 445 aa, Homo sapiens
MNTNSKEVLSLGVQVPEAWEELLTMKVEAKSHLQWQESRLKRSNPLAREIFRRHFRQLCYQETPGPREALTRLQELCYQWLRPHVSTKEQILDLLVLEQFLSILPKELQGWVREHCPESGEEAVILLEDLERELDEPQHEMVAHRHRQEVLCKEMVPLAEQTPLTLQSQPKEPQLTCDSAQKCHSIGETDLIRSLRRRAVLIPLGAHLFSTDTFLFSKPVVIPQLKGGGETWPNNRGVLRDEVTKTEDRELVLRKDCPKIVEPHGKMFNEQTWEVSQQDPSHGEVGEHKDRIERQWGNLLGEGQHKCDECGKSFTQSSGLIRHQRIHTGERPYECNECGKAFSRSSGLFNHRGIHNIQKRYHCKECGKVFSQSAGLIQHQRIHKGEKPYQCSQCSKSYSRRSFLIEHQRSHTGERPHQCIECGKSFNRHCNLIRHQKIHTVAELV

SEQ ID NO: 9686 - protein, 531 aa, Homo sapiens
MDSVAFEDVAVNFTQEEWALLDPSQKNLYREVMQETLRNLTSIGKKWNNQYIEDEHQNPRRNLRRLIGERLSESKESHQHGEVLTQVPDDTLKKKTPGVQSYESSVCGEIGIGLSSLNRHLRAFSYSSSLAIHGRTHTGEKPYECKECGKAFRFPSSVRRHERIHSAKKPYECKQCGKAFSFPSSVRRHERIHSAKKPYECKQCGKALSYLVSFQTHMRMHTGERPHKCNICGKAFFSPSSLKRHEKSHTGEKRYKCKQCDKAFNCPSSFQYHERTHSGEKPYECTQCRKAFRSVKYLRVHERKHTGEKPYECKLCGKGFISSTSFRYHEKTHTGEKPYECKKCVKAFSFVKDLRIHERTHTGEKPFECKQCGKTFTSSNSFHYHERTHTGEKPYECKQCGKAFRSASVLQKHIRTHTGEKPYGCKQCGKVFRVASQLKMHERTHTGEKPYECKQCGKAFISSNSIRYHKRTHTGEKPYKCKQCGKAFISSNSFLYHERIHTGEKPYECKQCGKAFRSASILQKHVRTHAG

SEQ ID NO: 9687 - protein, 440 aa, Homo sapiens
MGDLELLLPGEAEVLVRGLRSFPLREMGSEGWNQQHENLEKLNMQAILDATVSQGEPIQELLVTHGKVPTLVEELIAVEMWKQKVFPVFCRVEDFKPQNTFPIYMVVHHEASIINLLETVFFHKEVCESAEDTVLDLVDYCHRKLTLLVAQSGCGGPPEGEGSQDSNPMQELQKQAELMEFEIALKALSVLRYITDCVDSLSLSTLSRMLSTHNLPCLLVELLEHSPWSRREGGKLQQFEGSRWHTVAPSEQQKLSKLDGQVWIALYNLLLSPEAQARYCLTSFAKGRLLKLRAFLTDTLLDQLPNLAHLQSFLAHLTLTETQPPKKDLVLEQIPEIWERLERENRGKWQAIAKHQLQHVFSPSEQDLRLQARRWAETYRLDVLEAVAPERPRCAYCSAEASKRCSRCQNEWYCCRECQVKHWEKHGKTCVLAAQGDRAK

SEQ ID NO: 9688 - protein, 435 aa, Homo sapiens
MGDLELLLPGEAEVLVRGLRSFPLREMGSEGWNQQHENLEKLNMQAILDATVSQGEPIQELLVTHGKVPTLVEELIAVEMWKQKVFPVFCRVEDFKPQNTFPIYMVVHHEASIINLLETVFFHKEVCESAEDTVLDLVDYCHRKLTLLVAQSGCGGPPEGEGSQDSNPMQELQKQAELMEFEIALKALSVLRYITDCVDRQWSVSQPPQLAHLKRIQRLHPVCWFLSPGKLQQFEGSRWHTVAPSEQQKLSKLDGQVWIALYNLLLSPEAQARYCLTSFAKGRLLKLRAFLTDTLLDQLPNLAHLQSFLAHLTLTETQPPKKDLVLEQIPEIWERLERENRGKWQAIAKHQLQHVFSPSEQDLRLQARRWAETYRLDVLEAVAPERPRCAYCSAEASKRCSRCQNEWYCCRECQVKHWEKHGKTCVLAAQGDRAK

SEQ ID NO: 9689 - protein, 463 aa, Homo sapiens
MPGPLRSLEMESLQFRDVAVEFSLEEWHCLDTAQQNLYRDVMLENYRHLVFLGIIVSKPDLITCLEQGIKPLTMKRHEMIAKPPVVCSHFAQDLWPEQSIKDSYQKVILRKFEKCGHGNLHFKKGCESVDECKLHKRGYNGLNQCLTTTQSKIFQCGKYVKVFHQFSNSKRHKRRHTEKKPLKYIEGDKAFNQSSTHTTHKKIDTGEKPYKCEECGKAFNRSSHLTTHKITHTREKPYKCEECGKVFKYFSSFTTHKKIHSGEKPYICEECGKAFMYPYTLTTHKIIHTGEQPYKCKECDKAFNHPATLSSHKKIHTGEKPYTCDKCGKAFISSSILSKHEKIHTGEKPYKCEECGKAFTRSSHLTMHKIIHTGEKPYKCEECGKAFTWSAGLHKHRRTHTGEKPYKCEECGKAYTTSSNLTEHKTTHTGEKPYKCKECGKAFNWSSDLNKHKRIHIGQKPRT

SEQ ID NO: 9690 - protein, 270 aa, Homo sapiens
MASRGVVGIFFLSAVPLVCLELRRGIPDIGIKDFLLLCGRILLLLALLTLIISVTTSWLNSFKSPQVYLKEEEEKNEKRQKLVRKKQQEAQGEKASRYIENVLKPHQEMKLRKLEERFYQMTGEAWKLSSGHKLGGDEGTSQTSFETSNREAAKSQNLPKPLTEFPSPAEQPTCKEIPDLPEEPSQTAEEVVTVALRCPSGNVLRRRFLKSYSSQVLFDWMTRIGYHISLYSLSTSFPRRPLAVEGGQSLEDIGITVDTVLILEEKEQTN

SEQ ID NO: 9691 - protein, 229 aa, Homo sapiens
MASRGVVGIFFLSAVPLVCLELRRGIPDIGIKDFLLLCGRILLLLALLTLIISVTTSWLNSFKSPQVYLKEEEEKNEKRQKLVRKKQQEAQGEKGDEGTSQTSFETSNREAAKSQNLPKPLTEFPSPAEQPTCKEIPDLPEEPSQTAEEVVTVALRCPSGNVLRRRFLKSYSSQVLFDWMTRIGYHISLYSLSTSFPRRPLAVEGGQSLEDIGITVDTVLILEEKEQTN

SEQ ID NO: 9692 - protein, 233 aa, Homo sapiens
MASRGVVGIFFLSAVPLVCLELRRGIPDIVYLKEEEEKNEKRQKLVRKKQQEAQGEKASRYIENVLKPHQEMKLRKLEERFYQMTGEAWKLSSGHKLGGDEGTSQTSFETSNREAAKSQNLPKPLTEFPSPAEQPTCKEIPDLPEEPSQTAEEVVTVALRCPSGNVLRRRFLKSYSSQVLFDWMTRIGYHISLYSLSTSFPRRPLAVEGGQSLEDIGITVDTVLILEEKEQTN

SEQ ID NO: 9693 - protein, 101 aa, Homo sapiens
MAAPLSVEVEFGGGAELLFDGIKKHRVTLPGQEEPWDIRNLLIWIKKNLLKERPELFIQGDSVRPGILVLINDADWELLGELDYQLQDQDSVLFISTLHGG

SEQ ID NO: 9694 - protein, 146 aa, Homo sapiens
MAAPLSVEVEFGGGAELLFDGIKKHRVTLPGQEEPWDIRNLLIWIKKNLLKERPELFIQGDSVRPGILVLINDADWELLVSTLGDIPPPAPALAASVGKRWASPQAHIEWLGNPPPHSSPTLRLLESPTPGEEGMGSWGHGSTPPS

SEQ ID NO: 9695 - protein, 63 aa, Homo sapiens
MAAPLSVEVEFGGGAELLFDGIKKHRVTLPGQEEPWDIRNLLIWIKKNLLKERPELFIQGDSV

SEQ ID NO: 9696 - protein, 576 aa, Homo sapiens
MWAPRCRRFWSRWEQVAALLLLLLLLGVPPRSLALPPIRYSHAGICPNDMNPNLWVDAQSTCRRECETDQECETYEKCCPNVCGTKSCVAARYMDVKGKKGPVGMPKEATCDHFMCLQQGSECDIWDGQPVCKCKDRCEKEPSFTCASDGLTYYNRCYMDAEACSKGITLAVVTCRYHFTWPNTSPPPPETTMHPTTASPETPELDMAAPALLNNPVHQSVTMGETVSFLCDVVGRPRPEITWEKQLEDRENVVMRPNHVRGNVVVTNIAQLVIYNAQLQDAGIYTCTARNVAGVLRADFPLSVVRGHQAAATSESSPNGTAFPAAECLKPPDSEDCGEEQTRWHFDAQANNCLTFTFGHCHRNLNHFETYEACMLACMSGPLAACSLPALQGPCKAYAPRWAYNSQTGQCQSFVYGGCEGNGNNFESREACEESCPFPRGNQRCRACKPRQKLVTSFCRSDFVILGRVSELTEEPDSGRALVTVDEVLKDEKMGLKFLGQEPLEVTLLHVDWACPCPNVTVSEMPLIIMGEVDGGMAMLRPDSFVGASSARRVRKLREVMHKKTCDVLKEFLGLH

SEQ ID NO: 9697 - protein, 114 aa, Homo sapiens
MRLLILALLGICSLTAYIVEGVGSEVSHRRTCVSLTTQRLPVSRIKTYTITEGSLRAVIFITKRGLKVCADPQATWVRDVVRSMDRKSNTRNNMIQTKPTGTQQSTNTAVTLTG

SEQ ID NO: 9698 - protein, 285 aa, Homo sapiens
MEQRNRLGALGYLPPLLLHALLLFVADAAFTEVPKDVTVREGDDIEMPCAFRASGATSYSLEIQWWYLKEPPRELLHELALSVPGARSKVTNKDATKISTVRVQGNDISHRLRLSAVRLQDEGVYECRVSDYSDDDTQEHKAQAMLRVLSRFAPPNMQAAEAVSHIQSSGPRRHGPASAANANNAGAASRTTSEPGRGDKSPPPGSPPAAIDPAVPEAAAASAAHTPTTTVAAAAAASSASPPSGQAVLLRQRHGSGTGRSYTTDPLLSLLLLALHKFLRLLLGH

SEQ ID NO: 9699 - protein, 1432 aa, Homo sapiens
MSEKKLETTAQQRKCPEWMNVQNKRCAVEERKACVRKSVFEDDLPFLEFTGSIVYSYDASDCSFLSEDISMSLSDGDVVGFDMEWPPLYNRGKLGKVALIQLCVSESKCYLFHVSSMSVFPQGLKMLLENKAVKKAGVGIEGDQWKLLRDFDIKLKNFVELTDVANKKLKCTETWSLNSLVKHLLGKQLLKDKSIRCSNWSKFPLTEDQKLYAATDAYAGFIIYRNLEILDDTVQRFAINKEEEILLSDMNKQLTSISEEVMDLAKHLPHAFSKLENPRRVSILLKDISENLYSLRRMIIGSTNIETELRPSNNLNLLSFEDSTTGGVQQKQIREHEVLIHVEDETWDPTLDHLAKHDGEDVLGNKVERKEDGFEDGVEDNKLKENMERACLMSLDITEHELQILEQQSQEEYLSDIAYKSTEHLSPNDNENDTSYVIESDEDLEMEMLKHLSPNDNENDTSYVIESDEDLEMEMLKSLENLNSGTVEPTHSKCLKMERNLGLPTKEEEEDDENEANEGEEDDDKDFLWPAPNEEQVTCLKMYFGHSSFKPVQWKVIHSVLEERRDNVAVMATGYGKSLCFQYPPVYVGKIGLVISPLISLMEDQVLQLKMSNIPACFLGSAQSENVLTDIKLGKYRIVYVTPEYCSGNMGLLQQLEADIGITLIAVDEAHCISEWGHDFRDSFRKLGSLKTALPMVPIVALTATASSSIREDIVRCLNLRNPQITCTGFDRPNLYLEVRRKTGNILQDLQPFLVKTSSHWEFEGPTIIYCPSRKMTQQVTGELRKLNLSCGTYHAGMSFSTRKDIHHRFVRDEIQCVIATIAFGMGINKADIRQVIHYGAPKDMESYYQEIGRAGRDGLQSSCHVLWAPADINLNRHLLTEIRNEKFRLYKLKMMAKMEKYLHSSRCRRQIILSHFEDKQVQKASLGIMGTEKCCDNCRSRLDHCYSMDDSEDTSWDFGPQAFKLLSAVDILGEKFGIGLPILFLRGSNSQRLADQYRRHSLFGTGKDQTESWWKAFSRQLITEGFLVEVSRYNKFMKICALTKKGRNWLHKANTESQSLILQANEELCPKKLLLPSSKTVSSGTKEHCYNQVPVELSTEKKSNLEKLYSYKPCDKISSGSNISKKSIMVQSPEKAYSSSQPVISAQEQETQIVLYGKLVEARQKHANKMDVPPAILATNKILVDMAKMRPTTVENVKRIDGVSEGKAAMLAPLLEVIKHFCQTNSVQTDLFSSTKPQEEQKTSLVAKNKICTLSQSMAITYSLFQEKKMPLKSIAESRILPLMTIGMHLSQAVKAGCPLDLERAGLTPEVQKIIADVIRNPPVNSDMSKISLIRMLVPENIDTYLIHMAIEILKHGPDSGLQPSCDVNKRRCFPGSEEICSSSKRSKEEVGINTETSSAERKRRLPVWFAKGSDTSKKLMDKTKRGGLFS

SEQ ID NO: 9700 - protein, 459 aa, Homo sapiens
MLRWLIGGGREPQGLAEKSPLQTIGEEQTQNPYTELLVLKAHHDIVRFLVQLDDYRFASAGDDGIVVVWNAQTGEKLLELNGHTQKITAIITFPSLESCEEKNQLILTASADRTVIVWDGDTTRQVQRISCFQSTVKCLTVLQRLDVWLSGGNDLCVWNRKLDLLCKTSHLSDTGISALVEIPKNCVVAAVGKELIIFRLVAPTEGSLEWDILEVKRLLDHQDNILSLINVNDLSFVTGSHVGELIIWDALDWTMQAYERNFWDPSPQLDTQQEIKLCQKSNDISIHHFTCDEENVFAAVGRGLYVYSLQMKRVIACQKTAHDSNVLHVARLPNRQLISCSEDGSVRIWELREKQQLAAEPVPTGFFNMWGFGRVSKQASQPVKKQQENATSCSLELIGDLIGHSSSVEMFLYFEDHGLVTCSADHLIILWKNGERESGLRSLRLFQKLEENGDLYLAV

SEQ ID NO: 9701 - protein, 404 aa, Homo sapiens
MLRWLIGGGREPQGLAETGEKLLELNGHTQKITAIITFPSLESCEEKNQLILTASADRTVIVWDGDTTRQVQRISCFQSTVKCLTVLQRLDVWLSGGNDLCVWNRKLDLLCKTSHLSDTGISALVEIPKNCVVAAVGKELIIFRLVAPTEGSLEWDILEVKRLLDHQDNILSLINVNDLSFVTGSHVGELIIWDALDWTMQAYERNFWDPSPQLDTQQEIKLCQKSNDISIHHFTCDEENVFAAVGRGLYVYSLQMKRVIACQKTAHDSNVLHVARLPNRQLISCSEDGSVRIWELREKQQLAAEPVPTGFFNMWGFGRVSKQASQPVKKQQENATSCSLELIGDLIGHSSSVEMFLYFEDHGLVTCSADHLIILWKNGERESGLRSLRLFQKLEENGDLYLAV

SEQ ID NO: 9702 - protein, 661 aa, Homo sapiens
MQANGAGGGGGGGGGGGGGGGGGGGQGQTPELACLSAQNGESSPSSSSSAGDLAHANGLLPSAPSAASNNSNSLNVNNGVPGGAAAASSATVAAASATTAASSSLATPELGSSLKKKKRLSQSDEDVIRLIGQHLNGLGLNQTVDLLMQESGCRLEHPSATKFRNHVMEGDWDKAENDLNELKPLVHSPHAIVVRGALEISQTLLGIIVRMKFLLLQQKYLEYLEDGKVLEALQVLRCELTPLKYNTERIHVLSGYLMCSHAEDLRAKAEWEGKGTASRSKLLDKLQTYLPPSVMLPPRRLQTLLRQAVELQRDRCLYHNTKLDNNLDSVSLLIDHVCSRRQFPCYTQQILTEHCNEVWFCKFSNDGTKLATGSKDTTVIIWQVDPDTHLLKLLKTLEGHAYGVSYIAWSPDDNYLVACGPDDCSELWLWNVQTGELRTKMSQSHEDSLTSVAWNPDGKRFVTGGQRGQFYQCDLDGNLLDSWEGVRVQCLWCLSDGKTVLASDTHQRIRGYNFEDLTDRNIVQEDHPIMSFTISKNGRLALLNVATQGVHLWDLQDRVLVRKYQGVTQGFYTIHSCFGGHNEDFIASGSEDHKVYIWHKRSELPIAELTGHTRTVNCVSWNPQIPSMMASASDDGTVRIWGPAPFIDHQNIEEECSSMDS

SEQ ID NO: 9703 - protein, 645 aa, Homo sapiens
MQANGAGGGGGGGGGGGGGGGGGGGQGQTPELACLSAQNGESSPSSSSSAGDLAHANGLLPSAPSAASNNSNSLNVNNGVPGGAAAASSATVAAASATTAASSSLATPELGSSLKKKKRLSQSDEDVIRLIGQHLNGLGLNQTVDLLMQESGCRLEHPSATKFRNHVMEGDWDKAENDLNELKPLVHSPHAIVRMKFLLLQQKYLEYLEDGKVLEALQVLRCELTPLKYNTERIHVLSGYLMCSHAEDLRAKAEWEGKGTASRSKLLDKLQTYLPPSVMLPPRRLQTLLRQAVELQRDRCLYHNTKLDNNLDSVSLLIDHVCSRRQFPCYTQQILTEHCNEVWFCKFSNDGTKLATGSKDTTVIIWQVDPDTHLLKLLKTLEGHAYGVSYIAWSPDDNYLVACGPDDCSELWLWNVQTGELRTKMSQSHEDSLTSVAWNPDGKRFVTGGQRGQFYQCDLDGNLLDSWEGVRVQCLWCLSDGKTVLASDTHQRIRGYNFEDLTDRNIVQEDHPIMSFTISKNGRLALLNVATQGVHLWDLQDRVLVRKYQGVTQGFYTIHSCFGGHNEDFIASGSEDHKVYIWHKRSELPIAELTGHTRTVNCVSWNPQIPSMMASASDDGTVRIWGPAPFIDHQNIEEECSSMDS

SEQ ID NO: 9704 - protein, 216 aa, Homo sapiens
MQANGAGGGGGGGGGGGGGGGGGGGQGQTPELACLSAQNGESSPSSSSSAGDLAHANGLLPSAPSAASNNSNSLNVNNGVPGGAAAASSATVAAASATTAASSSLATPELGSSLKKKKRLSQSDEDVIRLIGQHLNGLGLNQTVDLLMQESGCRLEHPSATKFRNHVMEGDWDKAENDLNELKPLVHSPHAIVAQTFSETSINFFPLTAAFCHVRG

SEQ ID NO: 9705 - protein, 223 aa, Homo sapiens
MQANGAGGGGGGGGGGGGGGGGGGGQGQTPELACLSAQNGESSPSSSSSAGDLAHANGLLPSAPSAASNNSNSLNVNNGVPGGAAAASSATVAAASATTAASSSLATPELGSSLKKKKRLSQSDEDVIRLIGQHLNGLGLNQTVDLLMQESGCRLEHPSATKFRNHVMEGDWDKAENDLNELKPLVHSPHAIVVRGALEISQTLLGIIVVNTLLFLVSHLCLF

SEQ ID NO: 9706 - protein, 593 aa, Homo sapiens
MTMFKEAVTFKDVAVVFTEEELGLLDVSQRKLYRDVMLENFRNLLSVGHQLSHRDTFHFQREEKFWIMETATQREGNSGGKIQTELESVPETGPHEEWSCQQIWEQTASELTRPQDSISSSQFSTQGDVPSQVDAGLSIIHIGETPSEHGKCKKFFSDVSILDLHQQLHSGKISHTCNEYRKRFCYSSALCLHQKVHMGEKRYKCDVCSKAFSQNSQLQTHQRIHTGEKPFKCEQCGKSFSRRSGMYVHCKLHTGEKPHICEECGKAFIHNSQLREHQRIHTGEKPFKCYICGKSFHSRSNLNRHSMVHMQEKSFRCDTCSNSFGQRSALNSHCMDHTKEKLYKCEECGRSFTCRQDLCKHQMDHTGDKPYNCNVCGKGFRWSSCLSRHQRVHNGETTFKCDGCGKRFYMNSQGHSHQRAYREEELYKCQKCGKGYISKFNLDLHQRVHTGERPYNCKECGKSFRWASGILRHKRLHTGEKPFKCEECGKRFTENSKLRFHQRIHTGEKPYKCEECGKGFRWASTHLTHQRLHSREKLFQCEDCGKSSEHSSCLQDQQSDHSGEKTSKCEDCGKRYERRLNLDMILSLFLNDI

SEQ ID NO: 9707 - protein, 544 aa, Homo sapiens
MTARTLSLMASLVAYDDSDSEAETEHAGSFNATGQQKDTSGVARPPGQDFASGTLDVPKAGAQPTKHGSCEDPGGYRLPLAQLGRSDWGSCPSQRLQWPGKEPQVTFPIKEPSCSSLWTSHVPASHMPLAAARFKQVKLSRNFPKSSFHAQSESETVGKNGSSFQKKKCEDCVVPYTPRRLRQRQALSTETGKGKDVEPQGPPAGRAPAPLYVGPGVSEFIQPYLNSHYKETTVPRKVLFHLRGHRGPVNTIQWCPVLSKSHMLLSTSMDKTFKVWNAVDSGHCLQTYSLHTEAVRAARWAPCGRRILSGGFDFALHLTDLETGTQLFSGRSDFRITTLKFHPKDHNIFLCGGFSSEMKAWDIRTGKVMRSYKATIQQTLDILFLREGSEFLSSTDASTRDSADRTIIAWDFRTSAKISNQIFHERFTCPSLALHPREPVFLAQTNGNYLALFSTVWPYRMSRRRRYEGHKVEGYSVGCECSPGGDLLVTGSADGRVLMYSFRTASRACTLQGHTQACVGTTYHPVLPSVLATCSWGGDMKIWH

SEQ ID NO: 9708 - protein, 287 aa, Homo sapiens
MPALCLVLCWFQGLLGEVWNAVDSGHCLQTYSLHTEAVRAARWAPCGRRILSGGFDFALHLTDLETGTQLFSGRSDFRITTLKFHPKDHNIFLCGGFSSEMKAWDIRTGKVMRSYKATIQQTLDILFLREGSEFLSSTDASTRDSADRTIIAWDFRTSAKISNQIFHERFTCPSLALHPREPVFLAQTNGNYLALFSTVWPYRMSRRRRYEGHKVEGYSVGCECSPGGDLLVTGSADGRVLMYSFRTASRACTLQGHTQACVGTTYHPVLPSVLATCSWGGDMKIWH

SEQ ID NO: 9709 - protein, 341 aa, Homo sapiens
MRLCLIPQNTGTPQRVLPPVVWSPPSRKKPMLSACNSMMFGHLSPVRIPHLRGKFNLQLPSLDEQVIPARLPKMEVRAEEPKEATEVKDQVETQGQEDNKRGPCSNGEAASTSSLLETQGNLTSSWYNPRPLEGNVHLKSLIEKNQTDKAQVHAVSFYSKDHEVASSHSPAGGILSFGKPDPLPTVLPAPVPGCSLWPEKAALKVLGKDHLPSSPGLLMVGEDMQPKDPAALGSSRSSPSRAASHSSHKRKLSEPPLQLQPTPPLQLKWDRDEGPPPAKFPCLSPEALLVSQASQREGRLQQGNMCKNMRVLSRTSKFRRLRELLRRRKKRRQGRCGSSHL

SEQ ID NO: 9710 - protein, 765 aa, Homo sapiens
MDPVATHSCHLLQQLHEQRIQGLLCDCMLVVKGVCFKAHKNVLAAFSQYFRSLFQNSSSQKNDVFHLDVKNVSGIGQILDFMYTSHLDLNQDNIQVMLDTAQCLQVQNVLSLCHTFLKSATVVQPPGMPCNSTLSLQSTLTPDATCVISENYPPHLLQECSADAQQNKTLDESHPHASPSVNRHHSAGEISKQAPDTSDGSCTELPFKQPNYYYKLRNFYSKQYHKHAAGPSQERVVEQPFAFSTSTDLTTVESQPCAVSHSECILESPEHLPSNFLAQPVNDSAPHPESDATCQQPVKQMRLKKAIHLKKLNFLKSQKYAEQVSEPKSDDGLTKRLESASKNTLEKASSQSAEEKESEEVVSCENFNCISETERPEDPAALEDQSQTLQSQRQYACELCGKPFKHPSNLELHKRSHTGEKPFECNICGKHFSQAGNLQTHLRRHSGEKPYICEICGKRFAASGDVQRHIIIHSGEKPHLCDICGRGFSNFSNLKEHKKTHTADKVFTCDECGKSFNMQRKLVKHRIRHTGERPYSCSACGKCFGGSGDLRRHVRTHTGEKPYTCEICNKCFTRSAVLRRHKKMHCKAGDESPDVLEELSQAIETSDLEKSQSSDSFSQDTSVTLMPVSVKLPVHPVENSVAEFDSHSGGSYCKLRSMIQPHGVSDQEKLSLDPGKLAKPQMQQTQPQAYAYSDVDTPAGGEPLQADGMAMIRSSLAALDNHGGDPLGSRASSTTYRNSEGQFFSSMTLWGLAMKTLQNENELDQ

SEQ ID NO: 9711 - protein, 643 aa, Homo sapiens
MDPVATHSCHLLQQLHEQRIQGLLCDCMLVVKGVCFKAHKNVLAAFSQYFRSLFQNSSSQKNDVFHLDVKNVSGIGQILDFMYTSHLDLNQDNIQVMLDTAQCLQVQNVLSLCHTFLKSATVVQPPGMPCNSTLSLQSTLTPDATCVISENYPPHLLQECSADAQQNKTLDESHPHASPSVNRHHSAGEISKQAPDTSDGSCTELPFKQPNYYYKLRNFYSKQYHKHAAGPSQERVVEQPFAFSTSTDLTTVESQPCAVSHSECILESPEHLPSNFLAQPVNDSAPHPESDATCQQPVKQMRLKKAIHLKKLNFLKSQKYAEQVSEPKSDDGLTKRLESASKNTLEKASSQSAEEKESEEVVSCENFNCISETERPEDPAALEDQSQTLQSQRQYACELCGKPFKHPSNLELHKRSHTGKCFGGSGDLRRHVRTHTGEKPYTCEICNKCFTRSAVLRRHKKMHCKAGDESPDVLEELSQAIETSDLEKSQSSDSFSQDTSVTLMPVSVKLPVHPVENSVAEFDSHSGGSYCKLRSMIQPHGVSDQEKLSLDPGKLAKPQMQQTQPQAYAYSDVDTPAGGEPLQADGMAMIRSSLAALDNHGGDPLGSRASSTTYRNSEGQFFSSMTLWGLAMKTLQNENELDQ

SEQ ID NO: 9712 - protein, 420 aa, Homo sapiens
MDPVATHSCHLLQQLHEQRIQGLLCDCMLVVKGVCFKAHKNVLAAFSQYFRSLFQNSSSQKNDVFHLDVKNVSGIGQILDFMYTSHLDLNQDNIQVMLDTAQCLQVQNVLSLCHTFLKSATVVQPPGMPCNSTLSLQSTLTPDATCVISENYPPHLLQECSADAQQNKTLDESHPHASPSVNRHHSAGEISKQAPDTSDGSCTELPFKQPNYYYKLRNFYSKQYHKHAAGPSQERVVEQPFAFSTSTDLTTVESQPCAVSHSECILESPEHLPSNFLAQPVNDSAPHPESDATCQQPVKQMRLKKAIHLKKLNFLKSQKYAEQVSEPKSDDGLTKRLESASKNTLEKASSQSAEEKESEEVVSCENFNCISETERPEDPAALEDQSQTLQSQRQYACELCGKPFKHPSNLELHKRSHTGN

SEQ ID NO: 9713 - protein, 420 aa, Homo sapiens
MDPVATHSCHLLQQLHEQRIQGLLCDCMLVVKGVCFKAHKNVLAAFSQYFRSLFQNSSSQKNDVFHLDVKNVSGIGQILDFMYTSHLDLNQDNIQVMLDTAQCLQVQNVLSLCHTFLKSATVVQPPGMPCNSTLSLQSTLTPDATCVISENYPPHLLQECSADAQQNKTLDESHPHASPSVNRHHSAGEISKQAPDTSDGSCTELPFKQPNYYYKLRNFYSKQYHKHAAGPSQERVVEQPFAFSTSTDLTTVESQPCAVSHSECILESPEHLPSNFLAQPVNDSAPHPESDATCQQPVKQMRLKKAIHLKKLNFLKSQKYAEQVSEPKSDDGLTKRLESASKNTLEKASSQSAEEKESEEVVSCENFNCISETERPEDPAALEDQSQTLQSQRQYACELCGKPFKHPSNLELHKRSHTGR

SEQ ID NO: 9714 - protein, 466 aa, Homo sapiens
MDPVATHSCHLLQQLHEQRIQGLLCDCMLVVKGVCFKAHKNVLAAFSQYFRSLFQNSSSQKNDVFHLDVKNVSGIGQILDFMYTSHLDLNQDNIQVMLDTAQCLQVQNVLSLCHTFLKSATVVQPPGMPCNSTLSLQSTLTPDATCVISENYPPHLLQECSADAQQNKTLDESHPHASPSVNRHHSAGEISKQAPDTSDGSCTELPFKQPNYYYKLRNFYSKQYHKHAAGPSQERVVEQPFAFSTSTDLTTVESQPCAVSHSECILESPEHLPSNFLAQPVNDSAPHPESDATCQQPVKQMRLKKAIHLKKLNFLKSQKYAEQVSEPKSDDGLTKRLESASKNTLEKASSQSAEEKESEEVVSCENFNCISETERPEDPAALEDQSQTLQSQRQYACELCGKPFKHPSNLELHKRSHTGEKPFECNICGKHFSQAGNLQTHLRRHSGEKPYICEICGKREMFWGIR

SEQ ID NO: 9715 - protein, 574 aa, Homo sapiens
MLREFSKWGVEASPGKAWERKRSLLRGAVGRYRGATGGDLFWAPFPSWGTMEFPEHSQQLLQSLREQRSQGFLCDCTVMVGSTQFLAHRAVLASCSPFFQLFYKERELDKRDLVCIHNEIVTAPAFGLLLDFMYAGQLTLRGDTPVEDVLAAASYLHMNDIVKVCKRRLQARALAEADSTKKEEETNSQLPSLEFLSSTSRGTQPSLASAETSGHWGKGEWKGSAAPSPTVRPPDEPPMSSGADTTQPGMEVDAPHLRAPHPPVADVSLASPSSSTETIPTNYFSSGISAVSLEPLPSLDVGPESLRVVEPKDPGGPLQGFYPPASAPTSAPAPVSAPVPSQAPAPAEAELVQVKVEAIVISDEETDVSDEQPQGPERAFPSGGAVYGAQPSQPEAFEDPGAAGLEEVGPSDHFLPTDPHLPYHLLPGAGQYHRGLVTSPLPAPASLHEPLYLSSEYEAAPGSFGVFTEDVPTCKTCGKTFSCSYTLRRHATVHTRERPYECRYCLRSYTQSGDLYRHIRKAHNEDLAKRSKPDPEVGPLLGVQPLPGSPTADRQSSSGGGPPKDFVLAPKTNI

SEQ ID NO: 9716 - protein, 743 aa, Homo sapiens
MGLLTFRDVAVEFSLEEWEHLEPAQKNLYQDVMLENYRNLVSLGLVVSKPDLITFLEQRKEPWNVKSEETVAIQPDVFSHYNKDLLTEHCTEASFQKVISRRHGSCDLENLHLRKRWKREECEGHNGCYDEKTFKYDQFDESSVESLFHQQILSSCAKSYNFDQYRKVFTHSSLLNQQEEIDIWGKHHIYDKTSVLFRQVSTLNSYRNVFIGEKNYHCNNSEKTLNQSSSPKNHQENYFLEKQYKCKEFEEVFLQSMHGQEKQEQSYKCNKCVEVCTQSLKHIQHQTIHIRENSYSYNKYDKDLSQSSNLRKQIIHNEEKPYKCEKCGDSLNHSLHLTQHQIIPTEEKPCKWKECGKVFNLNCSLYLTKQQQIDTGENLYKCKACSKSFTRSSNLIVHQRIHTGEKPYKCKECGKAFRCSSYLTKHKRIHTGEKPYKCKECGKAFNRSSCLTQHQTTHTGEKLYKCKVCSKSYARSSNLIMHQRVHTGEKPYKCKECGKVFSRSSCLTQHRKIHTGENLYKCKVCAKPFTCFSNLIVHERIHTGEKPYKCKECGKAFPYSSHLIRHHRIHTGEKPYKCKACSKSFSDSSGLTVHRRTHTGEKPYTCKECGKAFSYSSDVIQHRRIHTGQRPYKCEECGKAFNYRSYLTTHQRSHTGERPYKCEECGKAFNSRSYLTTHRRRHTGERPYKCDECGKAFSYRSYLTTHRRSHSGERPYKCEECGKAFNSRSYLIAHQRSHTREKL

SEQ ID NO: 9717 - protein, 818 aa, Homo sapiens
MALTQVRLTFRDVAIEFSQEEWKCLDPAQRILYRDVMLENYWNLVSLGLCHFDMNIISMLEEGKEPWTVKSCVKIARKPRTPECVKGVVTDIPPKCTIKDLLPKEKSSTEAVFHTVVLERHESPDIEDFSFKEPQKNVHDFECQWRDDTGNYKGVLMAQKEGKRDQRDRRDIENKLMNNQLGVSFHSHLPELQLFQGEGKMYECNQVEKSTNNGSSVSPLQQIPSSVQTHRSKKYHELNHFSLLTQRRKANSCGKPYKCNECGKAFTQNSNLTSHRRIHSGEKPYKCSECGKTFTVRSNLTIHQVIHTGEKPYKCHECGKVFRHNSYLATHRRIHTGEKPYKCNECGKAFRGHSNLTTHQLIHTGEKPFKCNECGKLFTQNSHLISHWRIHTGEKPYKCNECGKAFSVRSSLAIHQTIHTGEKPYKCNECGKVFRYNSYLGRHRRVHTGEKPYKCNECGKAFSMHSNLATHQVIHTGTKPFKCNECSKVFTQNSQLANHRRIHTGEKPYKCNECGKAFSVRSSLTTHQAIHSGEKPYKCIECGKSFTQKSHLRSHRGIHSGEKPYKCNECGKVFAQTSQLARHWRVHTGEKPYKCNDCGRAFSDRSSLTFHQAIHTGEKPYKCHECGKVFRHNSYLATHRRIHTGEKPYKCNECGKAFSMHSNLTTHKVIHTGEKPYKCNQCGKVFTQNSHLANHQRTHTGEKPYRCNECGKAFSVRSSLTTHQAIHTGKKPYKCNECGKVFTQNAHLANHRRIHTGEKPYRCTECGKAFRVRSSLTTHMAIHTGEKRYKCNECGKVFRQSSNLASHHRMHTGEKPYK

SEQ ID NO: 9718 - protein, 147 aa, Homo sapiens
MALTQVRLTFRDVAIEFSQEEWKCLDPAQRILYRDVMLENYWNLVSLGLCHFDMNIISMLEEGKEPWTVKSCVKIARKPRTPECVKGVVTDLLRRWKHWLLLLGICCPKPHGRVSSRLRLSRSLGHFFHSAFATFMGVCDKRVGSIF

SEQ ID NO: 9719 - protein, 630 aa, Homo sapiens
MSVSSGVQILTKPETVDRRRSAETTKEAGRPLEMAVSEPEASAAEWKQLDPAQSNLYNDVMLENYCNQASMGCQAPKPDMISKLEKGEAPWLGKGKRPSQGCPSKIARPKQKETDGKVQKDDDQLENIQKSQNKLLREVAVKKKTQAKKNGSDCGSLGKKNNLHKKHVPSKKRLLKFESCGKILKQNLDLPDHSRNCVKRKSDAAKEHKKSFNHSLSDTRKGKKQTGKKHEKLSSHSSSDKCNKTGKKHDKLCCHSSSHIKQDKIQTGEKHEKSPSLSSSTKHEKPQACVKPYECNQCGKVLSHKQGLIDHQRVHTGEKPYECNECGIAFSQKSHLVVHQRTHTGEKPYECIQCGKAHGHKHALTDHLRIHTGEKPYECAECGKTFRHSSNLIQHVRSHTGEKPYECKECGKSFRYNSSLTEHVRTHTGEIPYECNECGKAFKYSSSLTKHMRIHTGEKPFECNECGKAFSKKSHLIIHQRTHTKEKPYKCNECGKAFGHSSSLTYHMRTHTGESPFECNQCGKGFKQIEGLTQHQRVHTGEKPYECNECGKAFSQKSHLIVHQRTHTGEKPYECNECEKAFNAKSQLVIHQRSHTGEKPYECNECGKTFKQNASLTKHVKTHSEDKSHE

SEQ ID NO: 9720 - protein, 645 aa, Homo sapiens
MSVSSGVQILTKPETVDRRRSAETTKEAGRPLEMAVSEPEASAAVSVTFKHVTMAFTQKEWKQLDPAQSNLYNDVMLENYCNQASMGCQAPKPDMISKLEKGEAPWLGKGKRPSQGCPSKIARPKQKETDGKVQKDDDQLENIQKSQNKLLREVAVKKKTQAKKNGSDCGSLGKKNNLHKKHVPSKKRLLKFESCGKILKQNLDLPDHSRNCVKRKSDAAKEHKKSFNHSLSDTRKGKKQTGKKHEKLSSHSSSDKCNKTGKKHDKLCCHSSSHIKQDKIQTGEKHEKSPSLSSSTKHEKPQACVKPYECNQCGKVLSHKQGLIDHQRVHTGEKPYECNECGIAFSQKSHLVVHQRTHTGEKPYECIQCGKAHGHKHALTDHLRIHTGEKPYECAECGKTFRHSSNLIQHVRSHTGEKPYECKECGKSFRYNSSLTEHVRTHTGEIPYECNECGKAFKYSSSLTKHMRIHTGEKPFECNECGKAFSKKSHLIIHQRTHTKEKPYKCNECGKAFGHSSSLTYHMRTHTGESPFECNQCGKGFKQIEGLTQHQRVHTGEKPYECNECGKAFSQKSHLIVHQRTHTGEKPYECNECEKAFNAKSQLVIHQRSHTGEKPYECNECGKTFKQNASLTKHVKTHSEDKSHE

SEQ ID NO: 9721 - protein, 631 aa, Homo sapiens
MSVSSGVQILTKPETVDRRRSAETTKEAGRPLEMAVSEPEASAAKEWKQLDPAQSNLYNDVMLENYCNQASMGCQAPKPDMISKLEKGEAPWLGKGKRPSQGCPSKIARPKQKETDGKVQKDDDQLENIQKSQNKLLREVAVKKKTQAKKNGSDCGSLGKKNNLHKKHVPSKKRLLKFESCGKILKQNLDLPDHSRNCVKRKSDAAKEHKKSFNHSLSDTRKGKKQTGKKHEKLSSHSSSDKCNKTGKKHDKLCCHSSSHIKQDKIQTGEKHEKSPSLSSSTKHEKPQACVKPYECNQCGKVLSHKQGLIDHQRVHTGEKPYECNECGIAFSQKSHLVVHQRTHTGEKPYECIQCGKAHGHKHALTDHLRIHTGEKPYECAECGKTFRHSSNLIQHVRSHTGEKPYECKECGKSFRYNSSLTEHVRTHTGEIPYECNECGKAFKYSSSLTKHMRIHTGEKPFECNECGKAFSKKSHLIIHQRTHTKEKPYKCNECGKAFGHSSSLTYHMRTHTGESPFECNQCGKGFKQIEGLTQHQRVHTGEKPYECNECGKAFSQKSHLIVHQRTHTGEKPYECNECEKAFNAKSQLVIHQRSHTGEKPYECNECGKTFKQNASLTKHVKTHSEDKSHE

SEQ ID NO: 9722 - protein, 447 aa, Homo sapiens
MLLDAGPQYPAIGVTTFGASRHHSAGDVAERDVGLGINPFADGMGAFKLNPSSHELASAGQTAFTSQAPGYAAAAALGHHHHPGHVGSYSSAAFNSTRDFLFRNRGFGDAAAAASAQHSLFAASAGGFGGPHGHTDAAGHLLFPGLHEQAAGHASPNVVNGQMRLGFSGDMYPRPEQYGQVTSPRSEHYAAPQLHGYGPMNVNMAAHHGAGAFFRYMRQPIKQELICKWIEPEQLANPKKSCNKTFSTMHELVTHVTVEHVGGPEQSNHICFWEECPREGKPFKAKYKLVNHIRVHTGEKPFPCPFPGCGKVFARSENLKIHKRTHTGEKPFKCEFEGCDRRFANSSDRKKHMHVHTSDKPYLCKMCDKSYTHPSSLRKHMKVHESSSQGSQPSPAASSGYESSTPPTIVSPSTDNPTTSSLSPSSSAVHHTAGHSALSSNFNEWYV

SEQ ID NO: 9723 - protein, 443 aa, Homo sapiens
MPSQNAVFSQEGNMEEEEMNDGSQMVRSQESLTFQDVAVDFTREEWDQLYPAQKNLYRDVMLENYRNLVALGYQLCKPEVIAQLELEEEWVIERDSLLDTHPDGENRPEIKKSTTSQNISDENQTHEMIMERLAGDSFWYSILGGLWDFDYHPEFNQENHKRYLGQVTLTHKKITQERSLECNKFAENCNLNSNLMQQRIPSIKIPLNSDTQGNSIKHNSDLIYYQGNYVRETPYEYSECGKIFNQHILLTDHIHTAEKPSECGKAFSHTSSLSQPQMLLTGEKPYKCDECGKRFSQRIHLIQHQRIHTGEKPFICNGCGKAFRQHSSFTQHLRIHTGEKPYKCNQCGKAFSRITSLTEHHRLHTGEKPYECGFCGKAFSQRTHLNQHERTHTGEKPYKCNECGKAFSQSAHLNQHRKIHTREKLCEYKCEQTVRHSPSFSST

SEQ ID NO: 9724 - protein, 377 aa, Homo sapiens
MRGQRSLLLGPARLCLRLLLLLGYRRRCPPLLRGLVQRWRYGKVCLRSLLYNSFGGSDTAVDAAFEPVYWLVDNVIRWFGVVFVVLVIVLTGSIVAIAYLCVLPLILRTYSVPRLCWHFFYSHWNLILIVFHYYQAITTPPGYPPQGRNDIATVSICKKCIYPKPARTHHCSICNRCVLKMDHHCPWLNNCVGHYNHRYFFSFCFFMTLGCVYCSYGSWDLFREAYAAIEKMKQLDKNKLQAVANQTYHQTPPPTFSFRERMTHKSLVYLWFLCSSVALALGALTVWHAVLISRGETSIERHINKKERRRLQAKGRVFRNPYNYGCLDNWKVFLGVDTGRHWLTRVLLPSSHLPHGNGMSWEPPPWVTAHSASVMAV

SEQ ID NO: 9725 - protein, 361 aa, Homo sapiens
MRGQRSLLLGPARLCLRLLLLLGYRRRCPPLLRGLVQRWRYGKVCLRSLLYNSFGGSDTAVDAAFEPVYWLVDNVIRWFGVVFVVLVIVLTGSIVAIAYLCVLPLILRTYSVPRLCWHFFYSHWNLILIVFHYYQAITTPPGYPPQGRNDIATVSICKKCIYPKPARTHHCSICNRCVLKMDHHCPWLNNCVGHYNHRYFFSFCFFMTLGCVYCSYGSWDLFREAYAAIETYHQTPPPTFSFRERMTHKSLVYLWFLCSSVALALGALTVWHAVLISRGETSIERHINKKERRRLQAKGRVFRNPYNYGCLDNWKVFLGVDTGRHWLTRVLLPSSHLPHGNGMSWEPPPWVTAHSASVMAV

SEQ ID NO: 9726 - protein, 338 aa, Homo sapiens
MRGQRSLLLGPARLCLRLLLLLGYRRRCPPLLRGLVQRWRYGKVCLRSLLYNSFGGSDTAVDAAFEPVYWLVDNVIRWFGVVFVVLVIVLTGSIVAIAYLCVLPLILRTYSVPRLCWHFFYSHWNLILIVFHYYQAITTPPGYPPQGRNDIATVSICKKCIYPKPARTHHCSICNSYGSWDLFREAYAAIEKMKQLDKNKLQAVANQTYHQTPPPTFSFRERMTHKSLVYLWFLCSSVALALGALTVWHAVLISRGETSIERHINKKERRRLQAKGRVFRNPYNYGCLDNWKVFLGVDTGRHWLTRVLLPSSHLPHGNGMSWEPPPWVTAHSASVMAV

SEQ ID NO: 9727 - protein, 296 aa, Homo sapiens
MRGQRSLLLGPARLCLRLLLLLGYRRRCPPLLRGLVQRWRYGKVCLRSLLYNSFGGSDTAVDAAFEPVYWLVDNVIRWFGVGRNDIATVSICKKCIYPKPARTHHCSICNRCVLKMDHHCPWLNNCVGHYNHRYFFSFCFFMTLGCVYCSYGSWDLFREAYAAIETYHQTPPPTFSFRERMTHKSLVYLWFLCSSVALALGALTVWHAVLISRGETSIERHINKKERRRLQAKGRVFRNPYNYGCLDNWKVFLGVDTGRHWLTRVLLPSSHLPHGNGMSWEPPPWVTAHSASVMAV

SEQ ID NO: 9728 - protein, 296 aa, Homo sapiens
MYFSQEEWELLDPTQKALYNDVMQENYETVISLALFVLPKPKVISCLEQGEEPWVQVSPEFKDSAGKSPTGLKLKNDTENHQPVSLSDLEIQASAGVISKKAKVKVPQKTAGKENHFDMHRVGKWHQDFPVKKRKKLSTWKQELLKLMDRHKKDCAREKPFKCQECGKTFRVSSDLIKHQRIHTEEKPYKCQQCDKRFRWSSDLNKHLTTHQGIKPYKCSWCGKSFSQNTNLHTHQRTHTGEKPFTCHECGKKFSQNSHLIKHRRTHTGEQPYTCSICRRNFSRRSSLLRHQKLHL

SEQ ID NO: 9729 - protein, 500 aa, Homo sapiens
MAPPSAPLPAQGPGKARPSRKRGRRPRALKFVDVAVYFSPEEWGCLRPAQRALYRDVMRETYGHLGALGCAGPKPALISWLERNTDDWEPAALDPQEYPRGLTVQRKSRTRKKNGEKEVFPPKEAPRKGKRGRRPSKPRLIPRQTSGGPICPDCGCTFPDHQALESHKCAQNLKKPYPCPDCGRRFSYPSLLVSHRRAHSGECPYVCDQCGKRFSQRKNLSQHQVIHTGEKPYHCPDCGRCFRRSRSLANHRTTHTGEKPHQCPSCGRRFAYPSLLAIHQRTHTGEKPYTCLECNRRFRQRTALVIHQRIHTGEKPYPCPDCERRFSSSSRLVSHRRVHSGERPYACEHCEARFSQRSTLLQHQLLHTGEKPYPCPDCGRAFRRSGSLAIHRSTHTEEKLHACDDCGRRFAYPSLLASHRRVHSGERPYACDLCSKRFAQWSHLAQHQLLHTGEKPFPCLECGRCFRQRWSLAVHKCSPKAPNCSPRSAIGGSSQRGNAH

SEQ ID NO: 9730 - protein, 528 aa, Homo sapiens
MGPLQFRDVAIEFSLEEWHCLDTAQRNLYRNVMLENYSNLVFLGITVSKPDLITCLEQGRKPLTMKRNEMIAKPSVMCSHFAQDLWPEQSMKDSFQKVVLRRYEKCEHDNLQLKKGCISVDECKVHKEGYNELNQCLTTTPRKICQCDKYVKVLHQFPNSNGQKRGHTGKKPFKYIECGKAFKQFSTLTTHKKIHTGGKPYKCEECGKAFNHSCSLTRHKKIHTGEKPYKCEECGKAFKHSSTLTTHKRNHTGEKPYKCDKCGKAFMSSSTLSKHEIIHTEKKPYKCEECGKAFNRSSTLTTHKIIHTGEKPYKCEECDKAFKYSYTLTTHKRIHTEDKPYKCEECGKAFKYSSTLTTHKRIHTGEKPYKCEECGKAFKRSSDLTTHKIIHTGEKPYKCEECGKAFKYSSNLTTHKKIHTGERPYKCEECGKAFNQSSILTTHRRIHTGEKFYKCEECGKAFKCSSNLTTHKKIHTGERPYKCEECGKAFNQSSILTTHERIILERNSTNVKNVAKPSSGPHTLLHIR

SEQ ID NO: 9731 - protein, 452 aa, Homo sapiens
MCSHFAQDLWPEQSMKDSFQKVVLRRYEKCEHDNLQLKKGCISVDECKVHKEGYNELNQCLTTTPRKICQCDKYVKVLHQFPNSNGQKRGHTGKKPFKYIECGKAFKQFSTLTTHKKIHTGGKPYKCEECGKAFNHSCSLTRHKKIHTGEKPYKCEECGKAFKHSSTLTTHKRNHTGEKPYKCDKCGKAFMSSSTLSKHEIIHTEKKPYKCEECGKAFNRSSTLTTHKIIHTGEKPYKCEECDKAFKYSYTLTTHKRIHTEDKPYKCEECGKAFKYSSTLTTHKRIHTGEKPYKCEECGKAFKRSSDLTTHKIIHTGEKPYKCEECGKAFKYSSNLTTHKKIHTGERPYKCEECGKAFNQSSILTTHRRIHTGEKFYKCEECGKAFKCSSNLTTHKKIHTGERPYKCEECGKAFNQSSILTTHERIILERNSTNVKNVAKPSSGPHTLLHIR

SEQ ID NO: 9732 - protein, 92 aa, Homo sapiens
MGPLQFRDVAIEFSLEEWHCLDTAQRNLYRNVMLENYSNLVFLGITVSKPDLITCLEQGRKPLTMKRNEMIAKPSVSFLQVHSESQSPLHDI

SEQ ID NO: 9733 - protein, 610 aa, Homo sapiens
MPSARGKSKSKAPITFGDLAIYFSQEEWEWLSPIQKDLYEDVMLENYRNLVSLGLSFRRPNVITLLEKGKAPWMVEPVRRRRAPDSGSKCETKKLPPNQCNKSGQSICQKLVSAQQKAPTRKSGCNKNSVLVKPKKGHSGKKPLKCNDCGKTFSRSFSLKLHQNIHTGEKPFECSNCRKAFRQISSILLHQRIHSGKKSHECNKCGESFNQRTTLILHMRIHDGKEILDCGKALSQCQSFNIHQKIHVVGNVCQCRKCGKAFNQMSSLLLHKKIHNGKKTHKYNKCGRGFKKKSVFVVHKRIHAGEKIPENAKALSQSLQQRSHHLENPFKCRKCGKLFNRISPLMLHQRIHTSEKPYKCDKCDKFFRRLSTLILHLRIHNGEKLYRCNKCEKVCNRHSSLIQHQKVHTKKKKLFECKECGKMFSGTANLKIHQNIHSEEKPFKCNKCSKVFGRQSFLIEHQRIHTGEKPYQCEECGKAFSHRISLTRHKRIHTEDRPYECDQCGKAFSQSAHLAQHERIHTGEKPYTCKTCGKAFSQRTSLILHERSHTGEKPYECNECGKAFSSGSDLIRHQRSHSSEKPYECSKCGKAYSRSSSLIRHQNTHSEEKA

SEQ ID NO: 9734 - protein, 668 aa, Homo sapiens
MDPSADTWDLSSPLISLWINRFYIYLGFAVSISLWICVQIVIEMQGFATVLAEAVTSLDLPVAIINLKEYDPDDHLIEEVTSKNVCVFLVATYTDGLPTESAEWFCKWLEEASIDFRFGKTYLKGMRDAVFGLGNSAYASHFNKVGKNVDKWLWMLGVHRVMSRGEGDCDVVKSKHGSIEANFRAWKTKFISQLQALQKGERKKSCGGHCKKGKCESHQHGSEEREEGSQEQDELHHRDTKEEEPFESSSEEEFGGEDHQSLNSIVDVEDLGKIMDHVKKEKREKEQQEEKSGLFRNMGRNEDGERRAMITPALREALTKQVDAPRERSLLQTHILWNESHRCMETTPSLACANKCVFCWWHHNNPVGTEWLWKMDQPEMILKEAIENHQNMIKQFKGVPGVKAERFEEGMTVKHCALSLVGEPIMYPEINRFLKLLHQCKISSFLVTNAQFPAEIRNLEPVTQLYVSVDASTKDSLKKIDRPLFKDFWQQFLDSLKALAVKQQRTVYRLMLVKAWNVDELQAYAQLVSLGNPDFIEVKGVTYCRESSASSLTMAHVPWHEEVVQFVRELVDLIPEYEIACEHEHSNCLLIAHRKFKIGGEWWTWIDYNRFQELIQEYEDSGGSKTFSAKDYMARTPHWALFGANERSFDPKDTRHQRKNKSKAISGC

SEQ ID NO: 9735 - protein, 294 aa, Homo sapiens
MDQPEMILKEAIENHQNMIKQFKGVPGVKAERFEEGMTVKHCALSLVGEPIMYPEINRFLKLLHQCKISSFLVTNAQFPAEIRNLEPVTQLYVSVDASTKDSLKKIDRPLFKDFWQQFLDSLKALAVKQQRTVYRLMLVKAWNVDELQAYAQLVSLGNPDFIEVKGVTYCRESSASSLTMAHVPWHEEVVQFVRELVDLIPEYEIACEHEHSNCLLIAHRKFKIGGEWWTWIDYNRFQELIQEYEDSGGSKTFSAKDYMARTPHWALFGANERSFDPKDTRHQRKNKSKAISGC

SEQ ID NO: 9736 - protein, 1338 aa, Homo sapiens
MVSYWDTGVLLCALLSCLLLTGSSSGSKLKDPELSLKGTQHIMQAGQTLHLQCRGEAAHKWSLPEMVSKESERLSITKSACGRNGKQFCSTLTLNTAQANHTGFYSCKYLAVPTSKKKETESAIYIFISDTGRPFVEMYSEIPEIIHMTEGRELVIPCRVTSPNITVTLKKFPLDTLIPDGKRIIWDSRKGFIISNATYKEIGLLTCEATVNGHLYKTNYLTHRQTNTIIDVQISTPRPVKLLRGHTLVLNCTATTPLNTRVQMTWSYPDEKNKRASVRRRIDQSNSHANIFYSVLTIDKMQNKDKGLYTCRVRSGPSFKSVNTSVHIYDKAFITVKHRKQQVLETVAGKRSYRLSMKVKAFPSPEVVWLKDGLPATEKSARYLTRGYSLIIKDVTEEDAGNYTILLSIKQSNVFKNLTATLIVNVKPQIYEKAVSSFPDPALYPLGSRQILTCTAYGIPQPTIKWFWHPCNHNHSEARCDFCSNNEESFILDADSNMGNRIESITQRMAIIEGKNKMASTLVVADSRISGIYICIASNKVGTVGRNISFYITDVPNGFHVNLEKMPTEGEDLKLSCTVNKFLYRDVTWILLRTVNNRTMHYSISKQKMAITKEHSITLNLTIMNVSLQDSGTYACRARNVYTGEEILQKKEITIRDQEAPYLLRNLSDHTVAISSSTTLDCHANGVPEPQITWFKNNHKIQQEPGIILGPGSSTLFIERVTEEDEGVYHCKATNQKGSVESSAYLTVQGTSDKSNLELITLTCTCVAATLFWLLLTLFIRKMKRSSSEIKTDYLSIIMDPDEVPLDEQCERLPYDASKWEFARERLKLGKSLGRGAFGKVVQASAFGIKKSPTCRTVAVKMLKEGATASEYKALMTELKILTHIGHHLNVVNLLGACTKQGGPLMVIVEYCKYGNLSNYLKSKRDLFFLNKDAALHMEPKKEKMEPGLEQGKKPRLDSVTSSESFASSGFQEDKSLSDVEEEEDSDGFYKEPITMEDLISYSFQVARGMEFLSSRKCIHRDLAARNILLSENNVVKICDFGLARDIYKNPDYVRKGDTRLPLKWMAPESIFDKIYSTKSDVWSYGVLLWEIFSLGGSPYPGVQMDEDFCSRLREGMRMRAPEYSTPEIYQIMLDCWHRDPKERPRFAELVEKLGDLLQANVQQDGKDYIPINAILTGNSGFTYSTPAFSEDFFKESISAPKFNSGSSDDVRYVNAFKFMSLERIKTFEELLPNATSMFDDYQGDSSTLLASPMLKRFTWTDSKPKASLKIDLRVTSKSKESGLSDVSRPSFCHSSCGHVSEGKRRFTYDHAELERKIACCSPPPDYNSVVLYSTPPI

SEQ ID NO: 9737 - protein, 687 aa, Homo sapiens
MVSYWDTGVLLCALLSCLLLTGSSSGSKLKDPELSLKGTQHIMQAGQTLHLQCRGEAAHKWSLPEMVSKESERLSITKSACGRNGKQFCSTLTLNTAQANHTGFYSCKYLAVPTSKKKETESAIYIFISDTGRPFVEMYSEIPEIIHMTEGRELVIPCRVTSPNITVTLKKFPLDTLIPDGKRIIWDSRKGFIISNATYKEIGLLTCEATVNGHLYKTNYLTHRQTNTIIDVQISTPRPVKLLRGHTLVLNCTATTPLNTRVQMTWSYPDEKNKRASVRRRIDQSNSHANIFYSVLTIDKMQNKDKGLYTCRVRSGPSFKSVNTSVHIYDKAFITVKHRKQQVLETVAGKRSYRLSMKVKAFPSPEVVWLKDGLPATEKSARYLTRGYSLIIKDVTEEDAGNYTILLSIKQSNVFKNLTATLIVNVKPQIYEKAVSSFPDPALYPLGSRQILTCTAYGIPQPTIKWFWHPCNHNHSEARCDFCSNNEESFILDADSNMGNRIESITQRMAIIEGKNKMASTLVVADSRISGIYICIASNKVGTVGRNISFYITDVPNGFHVNLEKMPTEGEDLKLSCTVNKFLYRDVTWILLRTVNNRTMHYSISKQKMAITKEHSITLNLTIMNVSLQDSGTYACRARNVYTGEEILQKKEITIRGEHCNKKAVFSRISKFKSTRNDCTTQSNVKH

SEQ ID NO: 9738 - protein, 733 aa, Homo sapiens
MVSYWDTGVLLCALLSCLLLTGSSSGSKLKDPELSLKGTQHIMQAGQTLHLQCRGEAAHKWSLPEMVSKESERLSITKSACGRNGKQFCSTLTLNTAQANHTGFYSCKYLAVPTSKKKETESAIYIFISDTGRPFVEMYSEIPEIIHMTEGRELVIPCRVTSPNITVTLKKFPLDTLIPDGKRIIWDSRKGFIISNATYKEIGLLTCEATVNGHLYKTNYLTHRQTNTIIDVQISTPRPVKLLRGHTLVLNCTATTPLNTRVQMTWSYPDEKNKRASVRRRIDQSNSHANIFYSVLTIDKMQNKDKGLYTCRVRSGPSFKSVNTSVHIYDKAFITVKHRKQQVLETVAGKRSYRLSMKVKAFPSPEVVWLKDGLPATEKSARYLTRGYSLIIKDVTEEDAGNYTILLSIKQSNVFKNLTATLIVNVKPQIYEKAVSSFPDPALYPLGSRQILTCTAYGIPQPTIKWFWHPCNHNHSEARCDFCSNNEESFILDADSNMGNRIESITQRMAIIEGKNKMASTLVVADSRISGIYICIASNKVGTVGRNISFYITDVPNGFHVNLEKMPTEGEDLKLSCTVNKFLYRDVTWILLRTVNNRTMHYSISKQKMAITKEHSITLNLTIMNVSLQDSGTYACRARNVYTGEEILQKKEITIRDQEAPYLLRNLSDHTVAISSSTTLDCHANGVPEPQITWFKNNHKIQQEPELYTSTSPSSSSSSPLSSSSSSSSSSSS

SEQ ID NO: 9739 - protein, 541 aa, Homo sapiens
MVSYWDTGVLLCALLSCLLLTGSSSGSKLKDPELSLKGTQHIMQAGQTLHLQCRGEAAHKWSLPEMVSKESERLSITKSACGRNGKQFCSTLTLNTAQANHTGFYSCKYLAVPTSKKKETESAIYIFISDTGRPFVEMYSEIPEIIHMTEGRELVIPCRVTSPNITVTLKKFPLDTLIPDGKRIIWDSRKGFIISNATYKEIGLLTCEATVNGHLYKTNYLTHRQTNTIIDVQISTPRPVKLLRGHTLVLNCTATTPLNTRVQMTWSYPDEKNKRASVRRRIDQSNSHANIFYSVLTIDKMQNKDKGLYTCRVRSGPSFKSVNTSVHIYDKAFITVKHRKQQVLETVAGKRSYRLSMKVKAFPSPEVVWLKDGLPATEKSARYLTRGYSLIIKDVTEEDAGNYTILLSIKQSNVFKNLTATLIVNVKPQIYEKAVSSFPDPALYPLGSRQILTCTAYGIPQPTIKWFWHPCNHNHSEARCDFCSNNEESFILDADSNMGNRIESITQRMAIIEGKNKLPPANSSFMLPPTSFSSNYFHFLP

SEQ ID NO: 9740 - protein, 556 aa, Homo sapiens
MKRSSSEIKTDYLSIIMDPDEVPLDEQCERLPYDASKWEFARERLKLGKSLGRGAFGKVVQASAFGIKKSPTCRTVAVKMLKEGATASEYKALMTELKILTHIGHHLNVVNLLGACTKQGGPLMVIVEYCKYGNLSNYLKSKRDLFFLNKDAALHMEPKKEKMEPGLEQGKKPRLDSVTSSESFASSGFQEDKSLSDVEEEEDSDGFYKEPITMEDLISYSFQVARGMEFLSSRKCIHRDLAARNILLSENNVVKICDFGLARDIYKNPDYVRKGDTRLPLKWMAPESIFDKIYSTKSDVWSYGVLLWEIFSLGGSPYPGVQMDEDFCSRLREGMRMRAPEYSTPEIYQIMLDCWHRDPKERPRFAELVEKLGDLLQANVQQDGKDYIPINAILTGNSGFTYSTPAFSEDFFKESISAPKFNSGSSDDVRYVNAFKFMSLERIKTFEELLPNATSMFDDYQGDSSTLLASPMLKRFTWTDSKPKASLKIDLRVTSKSKESGLSDVSRPSFCHSSCGHVSEGKRRFTYDHAELERKIACCSPPPDYNSVVLYSTPPI

SEQ ID NO: 9741 - protein, 463 aa, Homo sapiens
MTELKILTHIGHHLNVVNLLGACTKQGGPLMVIVEYCKYGNLSNYLKSKRDLFFLNKDAALHMEPKKEKMEPGLEQGKKPRLDSVTSSESFASSGFQEDKSLSDVEEEEDSDGFYKEPITMEDLISYSFQVARGMEFLSSRKCIHRDLAARNILLSENNVVKICDFGLARDIYKNPDYVRKGDTRLPLKWMAPESIFDKIYSTKSDVWSYGVLLWEIFSLGGSPYPGVQMDEDFCSRLREGMRMRAPEYSTPEIYQIMLDCWHRDPKERPRFAELVEKLGDLLQANVQQDGKDYIPINAILTGNSGFTYSTPAFSEDFFKESISAPKFNSGSSDDVRYVNAFKFMSLERIKTFEELLPNATSMFDDYQGDSSTLLASPMLKRFTWTDSKPKASLKIDLRVTSKSKESGLSDVSRPSFCHSSCGHVSEGKRRFTYDHAELERKIACCSPPPDYNSVVLYSTPPI

SEQ ID NO: 9742 - protein, 343 aa, Homo sapiens
MEDLISYSFQVARGMEFLSSRKCIHRDLAARNILLSENNVVKICDFGLARDIYKNPDYVRKGDTRLPLKWMAPESIFDKIYSTKSDVWSYGVLLWEIFSLGGSPYPGVQMDEDFCSRLREGMRMRAPEYSTPEIYQIMLDCWHRDPKERPRFAELVEKLGDLLQANVQQDGKDYIPINAILTGNSGFTYSTPAFSEDFFKESISAPKFNSGSSDDVRYVNAFKFMSLERIKTFEELLPNATSMFDDYQGDSSTLLASPMLKRFTWTDSKPKASLKIDLRVTSKSKESGLSDVSRPSFCHSSCGHVSEGKRRFTYDHAELERKIACCSPPPDYNSVVLYSTPPI

SEQ ID NO: 9743 - protein, 361 aa, Homo sapiens
MNSDLLVDSDGFYKEPITMEDLISYSFQVARGMEFLSSRKCIHRDLAARNILLSENNVVKICDFGLARDIYKNPDYVRKGDTRLPLKWMAPESIFDKIYSTKSDVWSYGVLLWEIFSLGGSPYPGVQMDEDFCSRLREGMRMRAPEYSTPEIYQIMLDCWHRDPKERPRFAELVEKLGDLLQANVQQDGKDYIPINAILTGNSGFTYSTPAFSEDFFKESISAPKFNSGSSDDVRYVNAFKFMSLERIKTFEELLPNATSMFDDYQGDSSTLLASPMLKRFTWTDSKPKASLKIDLRVTSKSKESGLSDVSRPSFCHSSCGHVSEGKRRFTYDHAELERKIACCSPPPDYNSVVLYSTPPI

SEQ ID NO: 9744 - protein, 406 aa, Homo sapiens
MKKKQQHPGGGADPWPHGAPMGGAPPGLGSWKRRVPLLPFLRFSLRDYGFCMATLLVFCLGSLLYQLSGGPPRFLLDLRQYLGNSTYLDDHGPPPSKVLPFPSQVVYNRVGKCGSRTVVLLLRILSEKHGFNLVTSDIHNKTRLTKNEQMELIKNISTAEQPYLFTRHVHFLNFSRFGGDQPVYINIIRDPVNRFLSNYFFRRFGDWRGEQNHMIRTPSMRQEERYLDINECILENYPECSNPRLFYIIPYFCGQHPRCREPGEWALERAKLNVNENFLLVGILEELEDVLLLLERFLPHYFKGVLSIYKDPEHRKLGNMTVTVKKTVPSPEAVQILYQRMRYEYEFYHYVKEQFHLLKRKFGLKSHVSKPPLRPHFFIPTPLETEEPIDDEEQDDEKWLEDIYKR

SEQ ID NO: 9745 - protein, 556 aa, Homo sapiens
MPPERRRRMKLDRRTGAKPKRKPGMRPDWKAGAGPGGPPQKPAPSSQRKPPARPSAAAAAIAVAAAEEERRLRQRNRLRLEEDKPAVERCLEELVFGDVENDEDALLRRLRGPRVQEHEDSGDSEVENEAKGNFPPQKKPVWVDEEDEDEEMVDMMNNRFRKDMMKNASESKLSKDNLKKRLKEEFQHAMGGVPAWAETTKRKTSSDDESEEDEDDLLQRTGNFISTSTSLPRGILKMKNCQHANAERPTVARISSVQFHPGAQIVMVAGLDNAVSLFQVDGKTNPKIQSIYLERFPIFKACFSANGEEVLATSTHSKVLYVYDMLAGKLIPVHQVRGLKEKIVRSFEVSPDGSFLLINGIAGYLHLLAMKTKELIGSMKINGRVAASTFSSDSKKVYASSGDGEVYVWDVNSRKCLNRFVDEGSLYGLSIATSRNGQYVACGSNCGVVNIYNQDSCLQETNPKPIKAIMNLVTGVTSLTFNPTTEILAIASEKMKEAVRLVHLPSCTVFSNFPVIKNKNISHVHTMDFSPRSGYFALGNEKGKALMYRLHHYSDF

SEQ ID NO: 9746 - protein, 365 aa, Homo sapiens
MDRAALLGLARLCALWAALLVLFPYGAQGNWMWLGIASFGVPEKLGCANLPLNSRQKELCKRKPYLLPSIREGARLGIQECGSQFRHERWNCMITAAATTAPMGASPLFGYELSSGTKETAFIYAVMAAGLVHSVTRSCSAGNMTECSCDTTLQNGGSASEGWHWGGCSDDVQYGMWFSRKFLDFPIGNTTGKENKVLLAMNLHNNEAGRQAVAKLMSVDCRCHGVSGSCAVKTCWKTMSSFEKIGHLLKDKYENSIQISDKTKRKMRRREKDQRKIPIHKDDLLYVNKSPNYCVEDKKLGIPGTQGRECNRTSEGADGCNLLCCGRGYNTHVVRHVERCECKFIWCCYVRCRRCESMTDVHTCK

SEQ ID NO: 9747 - protein, 361 aa, Homo sapiens
MERHPPMQLTTCLRETLFTGASQKTSLWWLGIASFGVPEKLGCANLPLNSRQKELCKRKPYLLPSIREGARLGIQECGSQFRHERWNCMITAAATTAPMGASPLFGYELSSGTKETAFIYAVMAAGLVHSVTRSCSAGNMTECSCDTTLQNGGSASEGWHWGGCSDDVQYGMWFSRKFLDFPIGNTTGKENKVLLAMNLHNNEAGRQAVAKLMSVDCRCHGVSGSCAVKTCWKTMSSFEKIGHLLKDKYENSIQISDKTKRKMRRREKDQRKIPIHKDDLLYVNKSPNYCVEDKKLGIPGTQGRECNRTSEGADGCNLLCCGRGYNTHVVRHVERCECKFIWCCYVRCRRCESMTDVHTCK

SEQ ID NO: 9748 - protein, 417 aa, Homo sapiens
MGSAHPRPWLRLRPQPQPRPALWVLLFFLLLLAAAMPRSAPNDILDLRLPPEPVLNANTVCLTLPGLSRRQMEVCVRHPDVAASAIQGIQIAIHECQHQFRDQRWNCSSLETRNKIPYESPIFSRGFRESAFAYAIAAAGVVHAVSNACALGKLKACGCDASRRGDEEAFRRKLHRLQLDALQRGKGLSHGVPEHPALPTASPGLQDSWEWGGCSPDMGFGERFSKDFLDSREPHRDIHARMRLHNNRVGRQAVMENMRRKCKCHGTSGSCQLKTCWQVTPEFRTVGALLRSRFHRATLIRPHNRNGGQLEPGPAGAPSPAPGAPGPRRRASPADLVYFEKSPDFCEREPRLDSAGTVGRLCNKSSAGSDGCGSMCCGRGHNILRQTRSERCHCRFHWCCFVVCEECRITEWVSVCK

SEQ ID NO: 9749 - protein, 282 aa, Homo sapiens
MASLGQILFWSIISIIIILAGAIALIIGFGISGRHSITVTTVASAGNIGEDGILSCTFEPDIKLSDIVIQWLKEGVLGLVHEFKEGKDELSEQDEMFRGRTAVFADQVIVGNASLRLKNVQLTDAGTYKCYIITSKGKGNANLEYKTGAFSMPEVNVDYNASSETLRCEAPRWFPQPTVVWASQVDQGANFSEVSNTSFELNSENVTMKVVSVLYNVTINNTYSCMIENDIAKATGDIKVTESEIKRRSHLQLLNSKASLCVSSFFAISWALLPLSPYLMLK

SEQ ID NO: 9750 - protein, 166 aa, Homo sapiens
MASLGQILFWSIISIIIILAGAIALIIGFGISAFSMPEVNVDYNASSETLRCEAPRWFPQPTVVWASQVDQGANFSEVSNTSFELNSENVTMKVVSVLYNVTINNTYSCMIENDIAKATGDIKVTESEIKRRSHLQLLNSKASLCVSSFFAISWALLPLSPYLMLK

SEQ ID NO: 9751 - protein, 87 aa, Homo sapiens
MASLGQILFWSIISIIIILAGAIALIIGFGISEVSVWLSAMKGWCRSSKASLSIDLCFLNFRETLHHSHYCRLSWEHWGGWNPELHF

SEQ ID NO: 9752 - protein, 187 aa, Homo sapiens
MFRGRTAVFADQVIVGNASLRLKNVQLTDAGTYKCYIITSKGKGNANLEYKTGAFSMPEVNVDYNASSETLRCEAPRWFPQPTVVWASQVDQGANFSEVSNTSFELNSENVTMKVVSVLYNVTINNTYSCMIENDIAKATGDIKVTESEIKRRSHLQLLNSKASLCVSSFFAISWALLPLSPYLMLK

SEQ ID NO: 9753 - protein, 633 aa, Homo sapiens
MPEIRLRHVVSCSSQDSTHCAENLLKADTYRKWRAAKAGEKTISVVLQLEKEEQIHSVDIGNDGSAFVEVLVGSSAGGAGEQDYEVLLVTSSFMSPSESRSGSNPNRVRMFGPDKLVRAAAEKRWDRVKIVCSQPYSKDSPFGLSFVRFHSPPDKDEAEAPSQKVTVTKLGQFRVKEEDESANSLRPGALFFSRINKTSPVTASDPAGPSYAAATLQASSAASSASPVSRAIGSTSKPQESPKGKRKLDLNQEEKKTPSKPPAQLSPSVPKRPKLPAPTRTPATAPVPARAQGAVTGKPRGEGTEPRRPRAGPEELGKILQGVVVVLSGFQNPFRSELRDKALELGAKYRPDWTRDSTHLICAFANTPKYSQVLGLGGRIVRKEWVLDCHRMRRRLPSRRYLMAGPGSSSEEDEASHSGGSGDEAPKLPQKQPQTKTKPTQAAGPSSPQKPPTPEETKAASPVLQEDIDIEGVQSEGQDNGAEDSGDTEDELRRVAEQKEHRLPPGQEENGEDPYAGSTDENTDSEEHQEPPDLPVPELPDFFQGKHFFLYGEFPGDERRKLIRYVTAFNGELEDNMSDRVQFVITAQEWDPSFEEALMDNPSLAFVRPRWIYSCNEKQKLLPHQLYGVVPQA

SEQ ID NO: 9754 - protein, 156 aa, Homo sapiens
WASQVSENRPVCKAIIQGKQFEGLVDTGADVSIIALNQWPKNWPKQKAVTGLVGIGTASEVYQSTEILHCLGPDNQESTVQPMITSIPLNLWGRDLLQQWGAEITMPAPSYSPTSQKIMTKMGYIPGKGLGKNEDGIKIPVEAKINQEREGIGNPC

SEQ ID NO: 9755 - protein, 325 aa, Homo sapiens
MPSSTAMAVGALSSSLLVTCCLMVALCSPSIPLEKLAQAPEQPGQEKREHASRDGPGRVNELGRPARDEGGSGRDWKSKSGRGLAGREPWSKLKQAWVSQGGGAKAGDLQVRPRGDTPQAEALAAAAQDAIGPELAPTPEPPEEYVYPDYRGKGCVDESGFVYAIGEKFAPGPSACPCLCTEEGPLCAQPECPRLHPRCIHVDTSQCCPQCKERKNYCEFRGKTYQTLEEFVVSPCERCRCEANGEVLCTVSACPQTECVDPVYEPDQCCPICKNGPNCFAETAVIPAGREVKTDECTICHCTYEEGTWRIERQAMCTRHECRQM

SEQ ID NO: 9756 - protein, 373 aa, Homo sapiens
MKYTKQNFMMSVLGIIIYVTDLIVDIWVSVRFFHEGQYVFSALALSFMLFGTLVAQCFSYSWFKADLKKAGQESQHCFLLLHCLQGGVFTRYWFALKRGYHAAFKYDSNTSNFVEEQIDLHKEVIDRVTDLSMLRLFETYLEGCPQLILQLYILLEHGQANFSQYAAIMVSCCAISWSTVDYQVALRKSLPDKKLLNGLCPKITYLFYKLFTLLSWMLSVVLLLFLNVKIALFLLLFLWLLGIIWAFKNNTQFCTCISMEFLYRIVVGFILIFTFFNIKGQNTKCPMSCYYIVRVLGTLGILTVFWVCPLTIFNPDYFIPISITIVLTLLLGILFLIVYYGSFHPNRSAETKCDEIDGKPVLRECRMRYFLME

SEQ ID NO: 9757 - protein, 182 aa, Homo sapiens [sequence omitted]

SEQ ID NO: 9758 - protein, 186 aa, Homo sapiens
MAGHRLVLVLGDLHIPHRCNSLPAKFKKLLVPGKIQHILCTGNLCTKESYDYLKTLAGDVHIVRGDFDENLNYPEQKVVTVGQFKIGLIHGHQVIPWGDMASLALLQRQFDVDILISGHTHKFEAFEHENKFYINPGSATGAYNALETNIIPSFVLMDIQASTVVTYVYQLIGDDVKVERIEYKKP

SEQ ID NO: 9759 - protein, 404 aa, Homo sapiens
MEAGEEPLLLAELKPGRPHQFDWKSSCETWSVAFSPDGSWFAWSQGHCIVKLIPWPLEEQFIPKGFEAKSRSSKNETKGRGSPKEKTLDCGQIVWGLAFSPWPSPPSRKLWARHHPQVPDVSCLVLATGLNDGQIKIWEVQTGLLLLNLSGHQDVVRDLSFTPSGSLILVSASRDKTLRIWDLNKHGKQIQVLSGHLQWVYCCSISPDCSMLCSAAGEKSVFLWSMRSYTLIRKLEGHQSSVVSCDFSPDSALLVTASYDTNVIMWDPYTGERLRSLHHTQVDPAMDDSDVHISSLRSVCFSPEGLYLATVADDRLLRIWALELKTPIAFAPMTNGLCCTFFPHGGVIATGTRDGHVQFWTAPRVLSSLKHLCRKALRSFLTTYQVLALPIPKKMKEFLTYRTF

SEQ ID NO: 9760 - protein, 421 aa, Homo sapiens
MRVDRESRFLRGTGTGEAVAVEEPLLLAELKPGRPHQFDWKSSCETWSVAFSPDGSWFAWSQGHCIVKLIPWPLEEQFIPKGFEAKSRSSKNETKGRGSPKEKTLDCGQIVWGLAFSPWPSPPSRKLWARHHPQVPDVSCLVLATGLNDGQIKIWEVQTGLLLLNLSGHQDVVRDLSFTPSGSLILVSASRDKTLRIWDLNKHGKQIQVLSGHLQWVYCCSISPDCSMLCSAAGEKSVFLWSMRSYTLIRKLEGHQSSVVSCDFSPDSALLVTASYDTNVIMWDPYTGERLRSLHHTQVDPAMDDSDVHISSLRSVCFSPEGLYLATVADDRLLRIWALELKTPIAFAPMTNGLCCTFFPHGGVIATGTRDGHVQFWTAPRVLSSLKHLCRKALRSFLTTYQVLALPIPKKMKEFLTYRTF

SEQ ID NO: 9761 - protein, 194 aa, Homo sapiens
MLCSAAGEKSVFLWSMRSYTLIRKLEGHQSSVVSCDFSPDSALLVTASYDTNVIMWDPYTGERLRSLHHTQVDPAMDDSDVHISSLRSVCFSPEGLYLATVADDRLLRIWALELKTPIAFAPMTNGLCCTFFPHGGVIATGTRDGHVQFWTAPRVLSSLKHLCRKALRSFLTTYQVLALPIPKKMKEFLTYRTF

SEQ ID NO: 9762 - protein, 389 aa, Homo sapiens
MLEEPRPRPPPSGLAGLLFLALCSRALSNEILGLKLPGEPPLTANTVCLTLSGLSKRQLGLCLRNPDVTASALQGLHIAVHECQHQLRDQRWNCSALEGGGRLPHHSAILKRGFRESAFSFSMLAAGVMHAVATACSLGKLVSCGCGWKGSGEQDRLRAKLLQLQALSRGKSFPHSLPSPGPGSSPSPGPQDTWEWGGCNHDMDFGEKFSRDFLDSREAPRDIQARMRIHNNRVGRQVVTENLKRKCKCHGTSGSCQFKTCWRAAPEFRAVGAALRERLGRAIFIDTHNRNSGAFQPRLRPRRLSGELVYFEKSPDFCERDPTMGSPGTRGRACNKTSRLLDGCGSLCCGRGHNVLRQTRVERCHCRFHWCCYVLCDECKVTEWVNVCK

SEQ ID NO: 9763 - protein, 191 aa, Homo sapiens
MLEEPRPRPPPSGLAGLLFLALCSRALSNEILGLKLPGEPPLTANTVCLTLSGLSKRQLGLCLRNPDVTASALQGLHIAVHECQHQLRDQRWNCSALEGGGRLPHHSAILKRGFRESAFSFSMLAAGVMHAVATACSLGKLVSCGCGWKGSGEQDRLRAKLLQLQALSRGKLPGTSRHECESTTTGWGARW

SEQ ID NO: 9764 - protein, 832 aa, Homo sapiens
MMEEEELEFVEELEAVLQLTPEVQLAIEQVFPSQDPLDRADFNAVEYINTLFPTEQSLANIDEVVNKIRLKIRRLDDNIRTVVRGQTNVGQDGRQALEEAQKAIQQLFGKIKDIKDKAEKSEQMVKEITRDIKQLDHAKRHLTTSITTLNHLHMLAGGVDSLEAMTRRRQYGEVANLLQGVMNVLEHFHKYMGIPQIRQLSERVKAAQTELGQQILADFEEAFPSQGTKRPGGPSNVLRDACLVANILDPRIKQEIIKKFIKQHLSEYLVLFQENQDVAWLDKIDRRYAWIKRQLVDYEEKYGRMFPREWCMAERIAVEFCHVTRAELAKIMRTRAKEIEVKLLLFAIQRTTNFEGFLAKRFSGCTLTDGTLKKLESPPPSTNPFLEDEPTPEMEELATEKGDLDQPKKPKAPDNPFHGIVSKCFEPHLYVYIESQDKNLGELIDRFVADFKAQGPPKPNTDEGGAVLPSCADLFVYYKKCMVQCSQLSTGEPMIALTTIFQKYLREYAWKILSGNLPKTTTSSGGLTISSLLKEKEGSEVAKFTLEELCLICNILSTAEYCLATTQQLEEKLKEKVDVSLIERINLTGEMDTFSTVISSSIQLLVQDLDAACDPALTAMSKMQWQNVEHVGDQSPYVTSVILHIKQNVPIIRDNLASTRKYFTQFCVKFANSFIPKFITHLFKCKPISMVGAEQLLLDTHSLKMVLLDLPSISSQVVRKAPASYTKIVVKGMTRAEMILKVVMAPHEPLVVFVDNYIKLLTDCNTETFQKILDMKGLKRSEQSSMLELLRQRLPAPPSGAESSGSLSLTAPTPEQESSRIRKLEKLIKKRL

SEQ ID NO: 9765 - protein, 699 aa, Homo sapiens
MMEEEELEFVEELEAVLQLTPEVQLAIEQVFPSQDPLDRADFNAVEYINTLFPTEQSLANIDEVVNKIRLKIRRLDDNIRTVVRGQTNVGQDGRQALEEAQKAIQQLFGKIKDIKDKAEKSEQMVKEITRDIKQLDHAKRHLTTSITTLNHLHMLAGGVDSLEAMTRRRQYGEVANLLQGVMNVLEHFHKYMGIPQIRQLSERVKAAQTELGQQILADFEEAFPSQGTKRPGGPSNVLRDACLVANILDPRIKQEIIKKFIKQHLSEYLVLFQENQDVAWLDKIDRRYAWIKRQLVDYEEKYGRMFPREWCMAERIAVEFCHVTRAELAKIMRTRAKEIEVKLLLFAIQRTTNFEGFLAKRFSGCTLTDGTLKKLESPPPSTNPFLEDEPTPEMEELATEKGDLDQPKKPKAPDNPFHGIVSKCFEPHLYVYIESQDKNLGELIDRFVADFKAQGPPKPNTDEGGAVLPSCADLFVYYKKCMVQCSQLSTGEPMIALTTIFQKYLREYAWKILSGNLPKTTTSSGGLTISSLLKEKEGSEVAKFTLEELCLICNILSTAEYCLATTQQLEEKLKEKVDVSLIERINLTGEMDTFSTVISSSIQLLVQDLDAACDPALTAMSKMQWQNVEHVGDQSPYVTSVILHIKQNVPIIRDNLASTRKYFTQFCVKFANSFIPKFITHLFKCKPISMVGAEQVRWT

SEQ ID NO: 9766 - protein, 670 aa, Homo sapiens
MMEEEELEFVEELEAVLQLTPEVQLAIEQVFPSQDPLDRADFNAVEYINTLFPTEQSLANIDEVVNKIRLKIRRLDDNIRTVVRGQTNVGQDGRQVKEITRDIKQLDHAKRHLTTSITTLNHLHMLAGGVDSLEAMTRRRQYGEVANLLQGVMNVLEHFHKYMGIPQIRQLSERVKAAQTELGQQILADFEEAFPSQGTKRPGGPSNVLRDACLVANILDPRIKQEIIKKFIKQHLSEYLVLFQENQDVAWLDKIDRRYAWIKRQLVDYEEKYGRMFPREWCMAERIAVEFCHVTRAELAKIMRTRAKEIEVKLLLFAIQRTTNFEGFLAKRFSGCTLTDGTLKKLESPPPSTNPFLEDEPTPEMEELATEKGDLDQPKKPKAPDNPFHGIVSKCFEPHLYVYIESQDKNLGELIDRFVADFKAQGPPKPNTDEGGAVLPSCADLFVYYKKCMVQCSQLSTGEPMIALTTIFQKYLREYAWKILSGNLPKTTTSSGGLTISSLLKEKEGSEVAKFTLEELCLICNILSTAEYCLATTQQLEEKLKEKVDVSLIERINLTGEMDTFSTVISSSIQLLVQDLDAACDPALTAMSKMQWQNVEHVGDQSPYVTSVILHIKQNVPIIRDNLASTRKYFTQFCVKFANSFIPKFITHLFKCKPISMVGAEQVRWT

SEQ ID NO: 9767 - protein, 672 aa, Homo sapiens
MMEEEELEFVEELEAVLQLTPEVQLAIEQVFPSQDPLDRADFNAVEYINTLFPTEQSLANIDEVVNKIRLKIRRLDDNIRTVVRGQTNVGQDGRQALEEAQKAIQQLFGKIKDIKDKAEKSEQMVKEITRDIKQLDHAKRHLTTSITTLNHLHMLAGGVDSLEAMTRRRQYGEVANLLQGVMNVLEHFHKYMGIPQIRQLSERVKAAQTELGQQILADFEEAFPSQGTKRPGGPSNVLRDACLVANILDPRIKQEIIKKFIKQHLSEYLVLFQENQDVAWLDKIDRRYAWIKRQLVDYEEKYGRMFPREWCMAERIAVEFCHVTRAELAKIMRTRAKEIEVKLLLFAIQRTTNFEGFLAKRFSGCTLTDGTLKKLESPPPSTNPFLEDEPTPEMEELATEKGDLDQPKKPKAPDNPFHGIVSKCFEPHLYVYIESQDKNLGELIDRFVADFKAQGPPKPNTDEGGAVLPSCADLFVYYKKCMVQCSQLSTGEPMIALTTIFQKYLREYAWKILSGNLPKTTTSSGGLTISSLLKEKEGSEVAKFTLEELCLICNILSTAEYCLATTQQLEEKLKEKVDVSLIERINLTGEMDTFSTVISSSIQLLVQDLDAACDPALTAMSKMQWQNVEHVGDQSPYVTSVILHIKQNVPIIRDNLASTRKYFTQFCVKFAK

SEQ ID NO: 9768 - protein, 1268 aa, Homo sapiens [sequence omitted]

SEQ ID NO: 9769 - protein, 1235 aa, Homo sapiens
MHLAERDRWLFVATVMMHFVSIKSGFPGLCVGVRSTMSSVAVLTQESFAEHRSGLVPQQIKVATLNSEEESDPPTYKDAFPPLPEKAACLESAQEPSGAWGNKIRPIKASVITQVFHVPLEERKYKDMNQFGEGEQAKICLEIMQRTGAHLELSLAKDQGLSIMVSGKLDAVMKARKDIVARLQTQASATVAIPKEHHRFVIGKNGEKLQDLELKTATKIQIPRPDDPSNQIKITGTKEGIEKARHEVLLISAEQDKRAVERLEVEKAFHPFIAGPYNRLVGEIMQETGTRINIPPPSVNRTEIVFTGEKEQLAQAVARIKKIYEEKANSFTVSSVAAPSWLHRFIIGKKGQNLAKITQQMPKVHIEFTEGEDKITLEGPTEDVNVAQEQIEGMVKDLINRMDYVEINIDHKFHRHLIGKSGANINRIKDQYKVSVRIPPDSEKSNLIRIEGDPQGVQQAKRELLELASRMENERTKDLIIEQRFHRTIIGQKGERIREIRDKFPEVIINFPDPAQKSDIVQLRGPKNEVEKCTKYMQKMVADLVENSYSISVPIFKQFHKNIIGKGGANIKKIREESNTKIDLPAENSNSETIIITGKRANCEAARSRILSIQKDLANIAEVEVSIPAKLHNSLIGTKGRLIRSIMEECGGVHIHFPVEGSGSDTVVIRGPSSDVEKAKKQLLHLAEEKQTKSFTVDIRAKPEYHKFLIGKGGGKIRKVRDSTGARVIFPAAEDKDQDLITIIGKEDAVREAQKELEALIQNLDNVVEDSMLVDPKHHRHFVIRRGQVLREIAEEYGGVMVSFPRSGTQSDKVTLKGAKDCVEAAKKRIQEIIEDLEAQVTLECAIPQKFHRSVMGPKGSRIQQITRDFSVQIKFPDREENAVHSTEPVVQENGDEAGEGREAKDCDPGSPRRCDIIIISGRKEKCEAAKEALEALVPVTIEVEVPFDLHRYVIGQKGSGIRKMMDEFEVNIHVPAPELQSDIIAITGLAANLDRAKAGLLERVKELQAEQEDRALRSFKLSVTVDPKYHPKIIGRKGAVITQIRLEHDVNIQFPDKDDGNQPQDQITITGYEKNTEAARDAILRIVGELEQMVSEDVPLDHRVHARIIGARGKAIRKIMDEFKVDIRFPQSGAPDPNCVTVTGLPENVEEAIDHILNLEEEYLADVVDSEALQVYMKPPAHEEAKAPSRGFVVRDAPWTASSSEKAPDMSSSEEFPSFGAQVAPKTLPWGPKR

SEQ ID NO: 9770 - protein, 2873 aa, Homo sapiens
MSSPRLIPLWKDLKLLLNDTINKSKQPSEDPKNCLIVLSDRSQAVAWMKSKTEDMVEKRTFSMTERLPPIQSMVHAGSFHILVVYCGDLILRLFGDHFRAFKPLGKVPCRFNISCLCYDPEMKMLLSGILGAVVTWVIELGGTGLQIAHMVSMPGDELVQDIVLNGPSGSLLALCETVVRVLMHQGKGQLGEVKRFTSTSSGSSITCCFTCFDQGFLYAGNQAGEIQVWSLQQGHPLHSFQAHQSGVICIRSRPEAHTLLTAGSDSLIKEWNLTSGSLLRRLELGEELYRLQFIDSITFFCQTAHSFSLHRLPCFYSLFNVCGSAPQQLRRVCCGNNWFRILCTTEDGLLRFVSPVTGDLLVITWPFSILDQAVDWAYDPGKEELFVATGSSEVLVFDTTRCPCPAKYLLGTSPNSQDFVQCLAYGHFNLGRGLEGLIFSGHQSGVIRVLSQHSCARLEKFMHFGAVLALSTLSGGIFGGQGNSLLCSYGMDDYVHLSEAVLDGVKVQLRPLASILSSCHLTHLILLPKSVGAITETNCLRLWKFHDFLSSGSQNGLKFIETLPLHLCAITSFDVCLSLSLFVTGSADGSVRIWDFHGRLIGILDSSLHFGPVCFANDRGDLLVTFNQSLYLVSCLKLLPPALLTRLSFMSISDEVLEVPKPFIPSFFFSFETMFVPKYIYPGQAQQKLVGLEKLVNNRAIAFDHSVPHVIEEDEEGSPVLLRSSMHYSLQDMEDWMQVSKRYQCHYVLPPQLQLTSWDGLNPYQILRYYFGHGREWLFAPDCYIPNSVIRARLWPEGTPIYLQCNLHAPQRELEWDRSQEFFFWHSRVRAISNTEYPKNKEEDEHFLEMRLSKDVTYSVLTDGANRSWLGRKMSEITINSMIETMLNIMVHASLLKYQCCVGALGQIFASYQVSPALRSETARRLLNDTTNSNPLIRELAWEGLKRLGMITHLFAMPLAQGLMDKDERVRIKTLSLMAEIGIHSRTSLLQLTQKQETFREMQQQMIGEEPLDHLLGMRATDLQILSTQVEQRLNENLTLSHRDEKPAFSLDVSMPSELKSSLKPPTVSEESEVAIKPSKGQRRGQAGVKKHSQKWLRGLKKTKERDSKQMSTEPGLLEDESGTEAAPIEMEEASVYSQWSSSTSVIKLSKDVDSQEKDISKDHIALTLKRLQKIRDKRDKKATAQKLKKKHKKKGKEAKVINEETTPPVMEQPVTKKVKIQGRGASGISGRRSTAGDGSSWRDDLCRLMALRISGSQTKMSENLNAELVTFAQEMLVDRHPSWELFQEICPLLKKESKVLLEDLDWDVVPPEKKPIFIQEGAIREDMIQGVTQEVIRHKEVMPREEEQAQKKARDMLGLEETQVILKKGKKVIFLEPGNVTMGKEISKKEEKKTFQKSPKQGRKAVQKERKVGKIKREMTKEERDMSEEVEEMATLEEKVVKQEGKLVMIERTPSWQDWKKAWDEWKQVHGETRKSWKAWKEEWEKRLLQEEEKLHQAGEKLSPEEEMLQEDKKLKWEEWKQVWENMLSSKSKEQQYKDEEEVTLEEEVSREGEEKEQQVTEEQRHIQEEHKWARIHRKRARAEKKRAQEERKLAQEEEKLAQEERQLAQEERKLAQAYVKITQDDREMAQAEGKFAQKEETLAQRGEKLSQEAEKLAQKRKKLAKKWEKVAREEEKLAKKGGKLAEVKNILAQKVEELPQREQNLDWQEKELAQELEELEWDMEELSWKEEELNQEEGKLVEEKKKLAEEEEALAWQREKLSEEETKLAQEEELLIQEKEKLAQHKEKMPEEEERLGRKREQLIEKKMKLAQKRERWINSMEELTKNKMILYQKKNLAQEKKNLAQEKEKLAQRKENLLYNKERLTHSKKQLVQVKNKLGMFNKILAQVEEKLTQEKETVIKKKEKLAETEKKLVQVEDSLAKKQEKLAQEKMKLALEKAMVQGKKRLRGELDIAKEEKALNLEMKRLAEEKMRLVEGKETLSKGETPETSRQRKMTQVEQELFERKLSLEEKILLHEDRILAMEESEIAKGKLEFTRGQRIFVQGQRKLAKASRKLIKKRESLSKEPAKLNKILKALQKLTRDERKLTQEEIKMTKMKRALFVKERRLSIEQSKLDIKEWDFSEKRSELTKDEKKLARKQRKLANKMRRMINKEEKMTEEESKLARKHSEVILDDEEEGGIEEEEVIPFLKRRWRKRKEAKRGDKPKEKFSSQVDEVESEEHFSEEMESLLDELEKQESLSSEEEEEREEEEEREEEEVREEEEERKEEEEGEEKQVEKEEEEKKKKKKEKKKEEVQEKEEVFEEKEEIMSEEETESLSDEEEEEESCSLEEEVDREKEILKKEKQFKLQEQRRKSLRGRERVLSILRGVPHGKGRAIRLGVLKSPLKKLMSTALEMKEKTPVPVPEKQISWEDKKATVVEIPRKFLGTMDKEREVMGKYEPIPPHVLGTVLESQAQDLKTPFMSHILRRTVEAEELQHKPLGAWWKWFLQHPPLMGQTEVQLPLSQIPAKEQHADVSLSDVEWIRHVLERMEAGEQLSRDGFHRLCQLLKDLASKGNLEWLHLAKHEAIVYRHRQALESQDTRISSRQSMSPKYLKVIPPIKAKEKESWPKPLAVPTQKSPLATKRIPDPRAKNWHLLGEPYRSERAQQISIAHKEMEMQYFYPATRDIFPSAHASVEKQTLALMFQKDFWDFKDKRRFPKLPKLEKKTQPISKKKEELPLWETFVALYHVLRMLQQRYPKDSTAWMEQFYQLMDLYQLKSPRIQKLLQELLMREEPQPQEIIYEEALKATELVPGERLFCCLFCGSSHTPRSPQEFQGAVPLPWQNCVRTILPVGIARYGILELAWKSLPEADLHLTKALTHTVAPTL

SEQ ID NO: 9771 - protein, 2912 aa, Homo sapiens
MSSPRLIPLWKDLKLLLNDTINKSKQPSEDPKNCLIVLSDRSQALFKESRYPQNMPCVCYYFSDAHFFASLSWVTSNTKEIQAVAWMKSKTEDMVEKRTFSMTERLPPIQSMVHAGSFHILVVYCGDLILRLFGDHFRAFKPLGKVPCRFNISCLCYDPEMKMLLSGILGAVVTWVIELGGTGLQIAHMVSMPGDELVQDIVLNGPSGSLLALCETVVRVLMHQGKGQLGEVKRFTSTSSGSSITCCFTCFDQGFLYAGNQAGEIQVWSLQQGHPLHSFQAHQSGVICIRSRPEAHTLLTAGSDSLIKEWNLTSGSLLRRLELGEELYRLQFIDSITFFCQTAHSFSLHRLPCFYSLFNVCGSAPQQLRRVCCGNNWFRILCTTEDGLLRFVSPVTGDLLVITWPFSILDQAVDWAYDPGKEELFVATGSSEVLVFDTTRCPCPAKYLLGTSPNSQDFVQCLAYGHFNLGRGLEGLIFSGHQSGVIRVLSQHSCARLEKFMHFGAVLALSTLSGGIFGGQGNSLLCSYGMDDYVHLSEAVLDGVKVQLRPLASILSSCHLTHLILLPKSVGAITETNCLRLWKFHDFLSSGSQNGLKFIETLPLHLCAITSFDVCLSLSLFVTGSADGSVRIWDFHGRLIGILDSSLHFGPVCFANDRGDLLVTFNQSLYLVSCLKLLPPALLTRLSFMSISDEVLEVPKPFIPSFFFSFETMFVPKYIYPGQAQQKLVGLEKLVNNRAIAFDHSVPHVIEEDEEGSPVLLRSSMHYSLQDMEDWMQVSKRYQCHYVLPPQLQLTSWDGLNPYQILRYYFGHGREWLFAPDCYIPNSVIRARLWPEGTPIYLQCNLHAPQRELEWDRSQEFFFWHSRVRAISNTEYPKNKEEDEHFLEMRLSKDVTYSVLTDGANRSWLGRKMSEITINSMIETMLNIMVHASLLKYQCCVGALGQIFASYQVSPALRSETARRLLNDTTNSNPLIRELAWEGLKRLGMITHLFAMPLAQGLMDKDERVRIKTLSLMAEIGIHSRTSLLQLTQKQETFREMQQQMIGEEPLDHLLGMRATDLQILSTQVEQRLNENLTLSHRDEKPAFSLDVSMPSELKSSLKPPTVSEESEVAIKPSKGQRRGQAGVKKHSQKWLRGLKKTKERDSKQMSTEPGLLEDESGTEAAPIEMEEASVYSQWSSSTSVIKLSKDVDSQEKDISKDHIALTLKRLQKIRDKRDKKATAQKLKKKHKKKGKEAKVINEETTPPVMEQPVTKKVKIQGRGASGISGRRSTAGDGSSWRDDLCRLMALRISGSQTKMSENLNAELVTFAQEMLVDRHPSWELFQEICPLLKKESKVLLEDLDWDVVPPEKKPIFIQEGAIREDMIQGVTQEVIRHKEVMPREEEQAQKKARDMLGLEETQVILKKGKKVIFLEPGNVTMGKEISKKEEKKTFQKSPKQGRKAVQKERKVGKIKREMTKEERDMSEEVEEMATLEEKVVKQEGKLVMIERTPSWQDWKKAWDEWKQVHGETRKSWKAWKEEWEKRLLQEEEKLHQAGEKLSPEEEMLQEDKKLKWEEWKQVWENMLSSKSKEQQYKDEEEVTLEEEVSREGEEKEQQVTEEQRHIQEEHKWARIHRKRARAEKKRAQEERKLAQEEEKLAQEERQLAQEERKLAQAYVKITQDDREMAQAEGKFAQKEETLAQRGEKLSQEAEKLAQKRKKLAKKWEKVAREEEKLAKKGGKLAEVKNILAQKVEELPQREQNLDWQEKELAQELEELEWDMEELSWKEEELNQEEGKLVEEKKKLAEEEEALAWQREKLSEEETKLAQEEELLIQEKEKLAQHKEKMPEEEERLGRKREQLIEKKMKLAQKRERWINSMEELTKNKMILYQKKNLAQEKKNLAQEKEKLAQRKENLLYNKERLTHSKKQLVQVKNKLGMFNKILAQVEEKLTQEKETVIKKKEKLAETEKKLVQVEDSLAKKQEKLAQEKMKLALEKAMVQGKKRLRGELDIAKEEKALNLEMKRLAEEKMRLVEGKETLSKGETPETSRQRKMTQVEQELFERKLSLEEKILLHEDRILAMEESEIAKGKLEFTRGQRIFVQGQRKLAKASRKLIKKRESLSKEPAKLNKILKALQKLTRDERKLTQEEIKMTKMKRALFVKERRLSIEQSKLDIKEWDFSEKRSELTKDEKKLARKQRKLANKMRRMINKEEKMTEEESKLARKHSEVILDDEEEGGIEEEEVIPFLKRRWRKRKEAKRGDKPKEKFSSQVDEVESEEHFSEEMESLLDELEKQESLSSEEEEEREEEEEREEEEVREEEEERKEEEEGEEKQVEKEEEEKKKKKKEKKKEEVQEKEEVFEEKEEIMSEEETESLSDEEEEEESCSLEEEVDREKEILKKEKQFKLQEQRRKSLRGRERVLSILRGVPHGKGRAIRLGVLKSPLKKLMSTALEMKEKTPVPVPEKQISWEDKKATVVEIPRKFLGTMDKEREVMGKYEPIPPHVLGTVLESQAQDLKTPFMSHILRRTVEAEELQHKPLGAWWKWFLQHPPLMGQTEVQLPLSQIPAKEQHADVSLSDVEWIRHVLERMEAGEQLSRDGFHRLCQLLKDLASKGNLEWLHLAKHEAIVYRHRQALESQDTRISSRQSMSPKYLKVIPPIKAKEKESWPKPLAVPTQKSPLATKRIPDPRAKNWHLLGEPYRSERAQQISIAHKEMEMQYFYPATRDIFPSAHASVEKQTLALMFQKDFWDFKDKRRFPKLPKLEKKTQPISKKKEELPLWETFVALYHVLRMLQQRYPKDSTAWMEQFYQLMDLYQLKSPRIQKLLQELLMREEPQPQEIIYEEALKATELVPGERLFCCLFCGSSHTPRSPQEFQGAVPLPWQNCVRTILPVGIARYGILELAWKSLPEADLHLTKALTHTVAPTL

SEQ ID NO: 9772 - protein, 126 aa, Homo sapiens
MNKHNLRLVQLASELILIEIIPKLFLSQVTTISHIKREKIPPNHRKGILCMFPWQCVVYVFSNFVWLVIHRFSNGFIQFLGEPYRLMTASGTHGRIKFMVDIPIIKNTQVLRIPVLKDPKMLSKKH

SEQ ID NO: 9773 - protein, 323 aa, Homo sapiens
MAAARPEAQSRSSPTPESRSQEPLDLVLVPDDCRPGTPPSDLIEIQVVKVTDTTLVPEPPEPGSFHCALCPAAFRLVSELLFHEHGHLAGAEGGGQGGDPSRCHVCGHSCPGPASLRAHYSLHTGERPYRCALCPRAFKALAPLLRHQHRHGVEPGTSRRPPDTAAVAEQRPGVAPERAEVVMAAAAAGAAVGKPFACRFCAKPFRRSSDMRDHERVHTGERPYHCGICGKGFTQSSVLSGHARIHTGERPFRCTLCDRTFNNSSNFRKHQRTHFHGPGPGLGDSGGQLGSSAAEGSGSGCGVGDPAEEGRGETAKVKVEADQ

SEQ ID NO: 9774 - protein, 1061 aa, Homo sapiens
MGDPGSEIIESVPPAGPEASESTTDENEDDIQFVSEGPLRPVLEYIDLVSSDDEEPSTSYTDENIKRKDHIDYQKDKVALTLARLARHVEVEKQQKEEKNRAFREKIDFQHAHGLQELEFIRGHSDTEAARLCVDQWLKMPGLKTGTINCGTKSSFRRGGHTWVSGKPILCPIMHCNKEFDNGHLLLGHLKRFDHSPCDPTITLHGPFFSSFACVVCYKKFVTQQQYRDHLFDKEATDDGHNNNLLPQIIQCFACPNCFLLFSRKEECSKHMSGKNHFHQSFKLGDNKGIAHPISFPSFAKKLLISLCKDVPFQVKCVACHKTLRSHMELTAHFRVHCRNAGPVAVAEKSITQVAEKFILRGYCPDCNQVFVDETSTQNHKQNSGHKVRVINSVEESVLLYCHSSEGNKDPSSDLHLLLDQSKFSSLKRTMSIKESSSLECIAIPKKKMNLKDKSHEGVACVQKEKSVVKTWFCECNQRFPSEDAVEKHVFSANTMGYKCVVCGKVCDDSGVIRLHMSRIHGGAHLNNFLFWCRTCKKELTRKDTIMAHVTEFHNGHRYFYEMDEVEGETLPSSSTTLDNLTANKPSSAITVIDHSPANSSPRGKWQCRICEDMFDSQEYVKQHCMSLASHKFHRYSCAHCRKPFHKIETLYRHCQDEHDNEIKIKYFCGLCDLIFNVEEAFLSHYEEHHSIDYVFVSEKTETSIKTEDDFPVIETSNQLTCGCRESYICKVNRKEDYSRCLQIMLDKGKLWFRCSLCSATAQNLTDMNTHIHQVHKEKSDEEEQQYVIKCGTCTKAFHDPESAQQHFHRKHCFLQKPSVAHFGSEKSNLYKFTASASHTERKLKQAINYSKSLDMEKGVENDLSYQNIEEEIVELPDLDYLRTMTHIVFVDFDNWSNFFGHLPGHLNQGTFIWGFQGGNTNWKPPLNCKIYNYLNRIGCFFLHPRCSKRKDAADFAICMHAGRLDEQLPKQIPFTILSGDQGFLELENQFKKTQRPAHILNPHHLEGDMMCALLNSISDTTKECDSDDNMGAKNTSIGEEFISTEDVELEEAIRRSLEEM

SEQ ID NO: 9775 - protein, 1013 aa, Homo sapiens
MGDPGSEIIESVPPAGPEASESTTDENEDDIQFVSEGPLRPVLEYIDLVSSDDEEPSTSYTDENIKRKDHIDYQKDKVALTLARLARHVEVEKQQKEEKNRAFREKIDFQHAHGLQELEFIRGHSDTEAARLCVDQWLKMPGLKTGTINCGTKSSFRRGGHTWVSGKPILCPIMHCNKEFDNGHLLLGHLKRFDHSPCDPTITLHGPFFSSFACVVCYKKFVTQQQYRDHLFDKEATDDGHNNNLLPQIIQCFACPNCFLLFSRKEECSKHMSGKNHFHQSFKLGDNKGIAHPISFPSFAKKLLISLCKDVPFQVKCVACHKTLRSHMELTAHFRVHCRNAGPVAVAEKSITQVAEKFILRGYCPDCNQVFVDETSTQNHKQNSGHKVRVINSVEESVLLYCHSSEGNKDPSSDLHLLLDQSKFSSLKRTMSIKESSSLECIAIPKKKMNLKDKSHEGVACVQKEKSVVKTWFCECNQRFPSEDAVEKHVFSANTMGYKCVVCGKVCDDSGVIRLHMSRIHGGAHLNNFLFWCRTCKKELTRKDTIMAHVTEFHNGHRYFYEMDEVEGETLPSSSTTLDNLTANKPSSAITVIDHSPANSSPRGKWQCRICEDMFDSQEYVKQHCMSLASHKFHRYSCAHCRKPFHKIETLYRHCQDEHDNEIKIKYFCGLCDLIFNVEEAFLSHYEEHHSIDYVFVSEKTETSIKTEDDFPVIETSNQLTCGCRESYICKVNRKEDYSRCLQIMLDKGKLWFRCSLCSATAQNLTDMNTHIHQVHKEKSDEEEQQYVIKCGTCTKAFHDPESAQQHFHRKHCFLQKPSVAHFGSEKSNLYKFTASASHTERKLKQAINYSKSLDMEKGVENDLSYQNIGGNTNWKPPLNCKIYNYLNRIGCFFLHPRCSKRKDAADFAICMHAGRLDEQLPKQIPFTILSGDQGFLELENQFKKTQRPAHILNPHHLEGDMMCALLNSISDTTKECDSDDNMGAKNTSIGEEFISTEDVELEEAIRRSLEEM

SEQ ID NO: 9776 - protein, 559 aa, Homo sapiens
MGDPGSEIIESVPPAGPEASESTTDENEDDIQFVSEGPLRPVLEYIDLVSSDDEEPSTSYTDRMPESKVPSSENHRPEMCSSCNVPLPIGDSSSFSGSCSSSPERIVSQTSSVENPLENQKNDQNNSDTKISETETLKSSQNFQTLPSSPLLVPQESLASSEVKENLRIDSSSASQHGRDAILYLQTQVAEMSRVIRDLQSRSCFRFHHSRPSENSSVPWDISTSKEENLSTVEEETDYKSPSADDKGQPSDPSQSSFTGLLKRMEQRGVIKRVTLQSEAESCEGKPDCVTSKKRLVPPLHPLLRIATTEVFKDPADCHPSSFMGHRVYPVAKDTSPFQPNPPAEGPIVEALEHSKRGNTTSPLDSTSKEMEVMGCRFYHAASIAARAASYMAYMTQYQRKLWEDMEDLVHDPEFDRGKARCIISDGMDAGLWQLCTTRDIMDSVVRVMAMAIDYRRQAWLRLTSLTKKTQEKISHLPFDGTSLFGQDVKAVVAEDNNIKENDYKDHKYYNQHRYFYSHDQKAHYHNRGYSKGDWYKPRNHPYRYRKKGDSPERHGYKN

SEQ ID NO: 9777 - protein, 403 aa, Homo sapiens
MASITACVGNSRQQNAPLPPWAHSMLRSLGRSLCPLVVKMAERNMKLFSGRVVPAQGKETFENWLIQVNEVLPDWSMSEEEKLKRLMKTLRGPAREVMRLLQAANPNLSVADFLRAMKLVFGESESSVTAHGKFFNTLQAQGEKASLYVIRLEVQLQNAIQAGILAEKDANQTRLQQLLLGAELNRDLRFRLKHLLRMYANKQERLPNFLELIKMIREEEDWDDAFIKRKRPKRSEPIMERAASPVAFQGAQPIAISSADCNCNVIEIDDTLDDSDEDVILVVSLYPSLTPTGAPPFRGRARPLDQVLVIDSPNNSGAQSLSTSGGSGYKNDGPGNIRRARKRKYTTRCSYCGEEGHSKETCDNESNKAQVFENLIITLQELTHTEERSKEVPGEHSDASEPQ

SEQ ID NO: 9778 - protein, 1169 aa, Homo sapiens
MEPRESGKAPVTFDDITVYLLQEEWVLLSQQQKELCGSNKLVAPLGPTVANPELFRKFGRGPEPWLGSVQGQRSLLEHHPGKKQMGYMGEMEVQGPTRESGQSLPPQKKAYLSHLSTGSGHIEGDWAGRNRKLLKPRSIQKSWFVQFPWLIMNEEQTALFCSACREYPSIRDKRSRLIEGYTGPFKVETLKYHAKSKAHMFCVNALAARDPIWAARFRSIRDPPGDVLASPEPLFTADCPIFYPPGPLGGFDSMAELLPSSRAELEDPGGDGAIPAMYLDCISDLRQKEITDGIHSSSDINILYNDAVESCIQDPSAEGLSEEVPVVFEELPVVFEDVAVYFTREEWGMLDKRQKELYRDVMRMNYELLASLGPAAAKPDLISKLERRAAPWIKDPNGPKWGKGRPPGNKKMVAVREADTQASAADSALLPGSPVEARASCCSSSICEEGDGPRRIKRTYRPRSIQRSWFGQFPWLVIDPKETKLFCSACIERPNLHDKSSRLVRGYTGPFKVETLKYHEVSKAHRLCVNTVEIKEDTPHTALVPEISSDLMANMEHFFNAAYSIAYHSRPLNDFEKILQLLQSTGTVILGKYRNRTACTQFIKYISETLKREILEDVRNSPCVSVLLDSSTDASEQACVGIYIRYFKQMEVKESYITLAPLYSETADGYFETIVSALDELDIPFRKPGWVVGLGTDGSAMLSCRGGLVEKFQEVIPQLLPVHCVAHRLHLAVVDACGSIDLVKKCDRHIRTVFKFYQSSNKRLNELQEGAAPLEQEIIRLKDLNAVRWVASRRRTLHALLVSWPALARHLQRVAEAGGQIGHRAKGMLKLMRGFHFVKFCHFLLDFLSIYRPLSEVCQKEIVLITEVNATLGRAYVALESLRHQAGPKEEEFNASFKDGRLHGICLDKLEVAEQRFQADRERTVLTGIEYLQQRFDADRPPQLKNMEVFDTMAWPSGIELASFGNDDILNLARYFECSLPTGYSEEALLEEWLGLKTIAQHLPFSMLCKNALAQHCRFPLLSKLMAVVVCVPISTSCCERGFKAMNRIRTDERTKLSNEVLNMLMMTAVNGVAVTEYDPQPAIQHWYLTSSGRRFSHVYTCAQVPARSPASARLRKEEMGALYVEEPRTQKPPILPSREAAEVLKDCIMEPPERLLYPHTSQEAPGMS

SEQ ID NO: 9779 - protein, 254 aa, Homo sapiens
MGRRWCEWTVLTGIEYLQQRFDADRPPQLKNMEVFDTMAWPSGIELASFGNDDILNLARYFECSLPTGYSEEALLEEWLGLKTIAQHLPFSMLCKNALAQHCRFPLLSKLMAVVVCVPISTSCCERGFKAMNRIRTDERTKLSNEVLNMLMMTAVNGVAVTEYDPQPAIQHWYLTSSGRRFSHVYTCAQVPARSPASARLRKEEMGALYVEEPRTQKPPILPSREAAEVLKDCIMEPPERLLYPHTSQEAPGMS

SEQ ID NO: 9780 - protein, 529 aa, Homo sapiens
MRRNSSLSFQMERPLEEQVQSKWSSSQGRTGTGGSDVLQMQNSEHHGQSIKTQTDSISLEDVAVNFTLEEWALLDPGQRNIYRDVMRATFKNLACIGEKWKDQDIEDEHKNQGRNLRSPMVEALCENKEDCPCGKSTSQIPDLNTNLETPTGLKPCDCSVCGEVFMHQVSLNRHMRSHTEQKPNECHEYGEKPHKCKECGKTFTRSSSIRTHERIHTGEKPYECKECGKAFAFLFSFRNHIRIHTGETPYECKECGKAFRYLTALRRHEKNHTGEKPYKCKQCGKAFIYYQPFLTHERTHTGEKPYECKQCGKAFSCPTYLRSHEKTHTGEKPFVCRECGRAFFSHSSLRKHVKTHTGVQPYTCKKCGEAFKSSSSCEVHERTHFGEKPYECKQCGKAFNSSSYLQLHERVHTGEKTYECKECGKAFLYSTHFRIHERTHTREKPYECKQCGRVFIYFSHLRRHERSHTGVKPCECKQCGKAFTCLNSLKVHKRIHTGERPFQCRQCGKAFSYSKSLHVHERTHSRQKP

SEQ ID NO: 9781 - protein, 137 aa, Homo sapiens
MKDKMWCEDTAQPHRRLPAPPSSSSPTVVFQSHRRLLAPPSSSWTLWVAPRCGCCSPLCPKRVCASLCRVLAVTWSLTKLPFPLSPILLSRPGWLPQPSSPGPACAEPSSQEGGDTDLRSYGCFVCGWAWPTLSPRP

SEQ ID NO: 9782 - protein, 663 aa, Homo sapiens
MALCYGTFWGYPKMLEAANLMEGLVDIGPWVTLPRGQPEVLEWGLPKDQDSVAFEDVAVNFTHEEWALLGPSQKNLYRDVMRETIRNLNCIGMKWENQNIDDQHQNLRRNPRCDVVERFGKSKDGSQCGETLSQIRNSIVNKNTPARVDACGSSVNGEVIMGHSSLNCYIRVDTGHKHRECHEYAEKSYTHKQCGKGLSYRHSFQTCERPHTGKKPYDCKECGKTFSSPGNLRRHMVVKGGDGPYKCELCGKAFFWPSLLRMHERTHTGEKPYECKQCSKAFPVYSSYLRHEKIHTGEKPYECKQCSKAFPDYSSYLRHERTHTGEKPYKCKQCGKAFSVSGSLRVHERIHTGEKPYTCKQCGKAFCHLGSFQRHMIMHSGDGPHKCKICGKGFDFPGSARIHEGTHTLEKPYECKQCGKLLSHRSSFRRHMMAHTGDGPHKCTVCGKAFDSPSVFQRHERTHTGEKPYECKQCGKAFRTSSSLRKHETTHTGEQPYKCKCGKAFSDLFSFQSHETTHSEEEPYECKECGKAFSSFKYFCRHERTHSEEKSYECQICGKAFSRFSYLKTHERTHTAEKPYECKQCRKAFFWPSFLLRHERTHTGERPYECKHCGKAFSRSSFCREHERTHTGEKPYECKECGKAFSSLSSFNRHKRTHWKDIL

SEQ ID NO: 9783 - protein, 589 aa, Homo sapiens
MDSVAFEDVAVNFTHEEWALLGPSQKNLYRDVMRETIRNLNCIGMKWENQNIDDQHQNLRRNPRCDVVERFGKSKDGSQCGETLSQIRNSIVNKNTPARVDACGSSVNGEVIMGHSSLNCYIRVDTGHKHRECHEYAEKSYTHKQCGKGLSYRHSFQTCERPHTGKKPYDCKECGKTFSSPGNLRRHMVVKGGDGPYKCELCGKAFFWPSLLRMHERTHTGEKPYECKQCSKAFPVYSSYLRHEKIHTGEKPYECKQCSKAFPDYSSYLRHERTHTGEKPYKCKQCGKAFSVSGSLRVHERIHTGEKPYTCKQCGKAFCHLGSFQRHMIMHSGDGPHKCKICGKGFDFPGSARIHEGTHTLEKPYECKQCGKLLSHRSSFRRHMMAHTGDGPHKCTVCGKAFDSPSVFQRHERTHTGEKPYECKQCGKAFRTSSSLRKHETTHTGEQPYKCKCGKAFSDLFSFQSHETTHSEEEPYECKECGKAFSSFKYFCRHERTHSEEKSYECQICGKAFSRFSYLKTHERTHTAEKPYECKQCRKAFFWPSFLLRHERTHTGERPYECKHCGKAFSRSSFCREHERTHTGEKPYE

SEQ ID NO: 9784 - protein, 637 aa, Homo sapiens
MALCYGTFWGYPKMLEAANLMEGLVDIGPWVTLPRGQPEVLEWGLPKDQDSVAFEDVAVNFTHEEWALLGPSQKNLYRDVMRETIRNLNCIGMKWENQNIDDQHQNLRRNPRCDVVERFGKSKDGSQCGETLSQIRNSIVNKNTPARVDACGSSVNGEVIMGHSSLNCYIRVDTGHKHRECHEYAEKSYTHKQCGKGLSYRHSFQTCERPHTGKKPYDCKECGKTFSSPGNLRRHMVVKGGDGPYKCELCGKAFFWPSLLRMHERTHTGEKPYECKQCSKAFPVYSSYLRHEKIHTGEKPYECKQCSKAFPDYSSYLRHERTHTGEKPYKCKQCGKAFSVSGSLRVHERIHTGEKPYTCKQCGKAFCHLGSFQRHMIMHSGDGPHKCKICGKGFDFPGSARIHEGTHTLEKPYECKQCGKLLSHRSSFRRHMMAHTGDGPHKCTVCGKAFDSPSVFQRHERTHTGEKPYECKQCGKAFRTSSSLRKHETTHTGEQPYKCKCGKAFSDLFSFQSHETTHSEEEPYECKECGKAFSSFKYFCRHERTHSEEKSYECQICGKAFSRFSYLKTHERTHTAEKPYECKQCRKAFFWPSFLLRHERTHTGERPYECKHCGKAFSRSSFCREHERTHTGEKPYE

SEQ ID NO: 9785 - protein, 130 aa, Homo sapiens
MEEEEIRTWSFPEEVWQVATQPDSQQQHEDQHLSHTFLDKKDWTGNELHECNELGKKLHQNPNLLPSKQQVRTRDLCRKSLMCNLDFTPNAYLARRRFQCDGHGNFFSVRNLKLHLQERIHAEVTSVEVL

SEQ ID NO: 9786 - protein, 456 aa, Homo sapiens
MDTVVFEDVVVDFTLEEWALLNPAQRKLYRDVMLETFKHLASVDNEAQLKASGSISQQDTSGEKLSLKQKIEKFTRKNIWASLLGKNWEEHSVKDKHNTKERHLSRNPRVERPCKSSKGNKRGRTFRKTRNCNRHLRKNCCTSVRRYECSQCGKLFTHSSSLIRHKRAHSGQKLYKCKECGKAFSRPSYLQTHEKTHSGEKPYACQSCGKTFLRSHSLTEHVRTHTGEKPYECGQCGKGFSCPKSFRAHVMMHAGGRPYECKHCGKAFRCQKSFRVHMIMHAGGRPYECKQCGKAYCWATSFQRHVRIHNGEKPYKCGKCGKAFGWPSSLHKHARTHAKKKPVSGGSVGKSSARPRPSTDVKSQTREKVYKCETCGKTYGWSSSLHKHERKHTGEKPVNAASVGKPSGGLCSSKNVRTQIGQKPSKCEKCGKAFSCPKAFQGHVRSHTGKKSCTSK

SEQ ID NO: 9787 - protein, 754 aa, Homo sapiens
MTTAGRGNLGLIPRSTAFQKQEGRLTVKQEPANQTWGQGSSLQKNYPPVCEIFRLHFRQLCYHEMSGPQEALSRLRELCRWWLMPEVHTKEQILELLVLEQFLSILPGELRTWVQLHHPESGEEAVAVVEDFQRHLSGSEEVSAPAQKQEMHFEETTALGTTKESPPTSPLSGGSAPGAHLEPPYDPGTHHLPSGDFAQCTSPVPTLPQVGNSGDQAGATVLRMVRPQDTVAYEDLSVDYTQKKWKSLTLSQRALQWNMMPENHHSMASLAGENMMKGSELTPKQEFFKGSESSNRTSGGLFGVVPGAAETGDVCEDTFKELEGQTSDEEGSRLENDFLEITDEDKKKSTKDRYDKYKEVGEHPPLSSSPVEHEGVLKGQKSYRCDECGKAFNRSSHLIGHQRIHTGEKPYECNECGKTFRQTSQLIVHLRTHTGEKPYECSECGKAYRHSSHLIQHQRLHNGEKPYKCNECAKAFTQSSRLTDHQRTHTGEKPYECNECGEAFIRSKSLARHQVLHTGKKPYKCNECGRAFCSNRNLIDHQRIHTGEKPYECSECGKAFSRSKCLIRHQSLHTGEKPYKCSECGKAFNQNSQLIEHERIHTGEKPFECSECGKAFGLSKCLIRHQRLHTGEKPYKCNECGKSFNQNSHLIIHQRIHTGEKPYECNECGKVFSYSSSLMVHQRTHTGEKPYKCNDCGKAFSDSSQLIVHQRVHTGEKPYECSECGKAFSQRSTFNHHQRTHTGEKSSGLAWSVS

SEQ ID NO: 9788 - protein, 276 aa, Homo sapiens
MTTAGRGNLGLIPRSTAFQKQEGRLTVKQEPANQTWGQGSSLQKNYPPVCEIFRLHFRQLCYHEMSGPQEALSRLRELCRWWLMPEVHTKEQILELLVLEQFLSILPGELRTWVQLHHPESGEEAVAVVEDFQRHLSGSEEVSAPAQKQEMHFEETTALGTTKESPPTSPLSGGSAPGAHLEPPYDPGTHHLPSGDFAQCTSPVPTLPQVGNSGDQAGATVLRMVRPQDTVAYEDLSVDYTQKKWKSLTLSQRALQWNMMPENHHSMASLGWSTMA

SEQ ID NO: 9789 - protein, 1377 aa, Homo sapiens
MDTSSVGGLELTDQTPVLLGSTAMATSLTNVGNSFSGPANPLVSRSNKFQNSSVEDDDDVVFIEPVQPPPPSVPVVADQRTITFTSSKNEELQGNDSKITPSSKELASQKGSVSETIVIDDEEDMETNQGQEKNSSNFIERRPPETKNRTNDVDFSTSSFSRSKVNAGMGNSGITTEPDSEIQIANVTTLETGVSSVNDGQLENTDGRDMNLMITHVTSLQNTNLGDVSNGLQSSNFGVNIQTYTPSLTSQTKTGVGPFNPGRMNVAGDVFQNGESATHHNPDSWISQSASFPRNQKQPGVDSLSPVASLPKQIFQPSVQQQPTKPVKVTCANCKKPLQKGQTAYQRKGSAHLFCSTTCLSSFSHKPAPKKLCVMCKKDITTMKGTIVAQVDSSESFQEFCSTSCLSLYEDKQNPTKGALNKSRCTICGKLTEIRHEVSFKNMTHKLCSDHCFNRYRMANGLIMNCCEQCGEYLPSKGAGNNVLVIDGQQKRFCCQSCVSEYKQVGSHPSFLKEVRDHMQDSFLMQPEKYGKLTTCTGCRTQCRFFDMTQCIGPNGYMEPYCSTACMNSHKTKYAKSQSLGIICHFCKRNSLPQYQATMPDGKLYNFCNSSCVAKFQALSMQSSPNGQFVAPSDIQLKCNYCKNSFCSKPEILEWENKVHQFCSKTCSDDYKKLHCIVTYCEYCQEEKTLHETVNFSGVKRPFCSEGCKLLYKQDFARRLGLRCVTCNYCSQLCKKGATKELDGVVRDFCSEDCCKKFQDWYYKAARCDCCKSQGTLKERVQWRGEMKHFCDQHCLLRFYCQQNEPNMTTQKGPENLHYDQGCQTSRTKMTGSAPPPSPTPNKEMKNKAVLCKPLTMTKATYCKPHMQTKSCQTDDTWRTEYVPVPIPVPVYIPVPMHMYSQNIPVPTTVPVPVPVPVFLPAPLDSSEKIPAAIEELKSKVSSDALDTELLTMTDMMSEDEGKTETTNINSVIIETDIIGSDLLKNSDPETQSSMPDVPYEPDLDIEIDFPRAAEELDMENEFLLPPVFGEEYEEQPRPRSKKKGAKRKAVSGYQSHDDSSDNSECSFPFKYTYGVNAWKHWVKTRQLDEDLLVLDELKSSKSVKLKEDLLSHTTAELNYGLAHFVNEIRRPNGENYAPDSIYYLCLGIQEYLCGSNRKDNIFIDPGYQTFEQELNKILRSWQPSILPDGSIFSRVEEDYLWRIKQLGSHSPVALLNTLFYFNTKYFGLKTVEQHLRLSFGTVFRHWKKNPLTMENKACLRYQVSSLCGTDNEDKITTGKRKHEDDEPVFEQIENTANPSRCPVKMFECYLSKSPQNLNQRMDVFYLQPECSSSTDSPVWYTSTSLDRNTLENMLVRVLLVKDIYDKDNYELDEDTD

SEQ ID NO: 9790 - protein, 462 aa, Homo sapiens
MDTSSVGGLELTDQTPVLLGSTAMATSLTNVGNSFSGPANPLVSRSNKFQNSSVEDDDDVVFIEPVQPPPPSVPVVADQRTITFTSSKNEELQGNDSKITPSSKELASQKGSVSETIVIDDEEDMETNQGQEKNSSNFIERRPPETKNRTNDVDFSTSSFSRSKTKTGVGPFNPGRMNVAGDVFQNGESATHHNPDSWISQSASFPRNQKQPGVDSLSPVASLPKQIFQPSVQQQPTKPVKVTCANCKKPLQKGQTAYQRKGSAHLFCSTTCLSSFSHKPAPKKLCVMCKKDITTMKGTIVAQVDSSESFQEFCSTSCLSLYEDKQNPTKGALNKSRCTICGKLTEIRHEVSFKNMTHKLCSDHCFNRYRMANGLIMNCCEQCGEYLPSKGAGNNVLVIDGQQKRFCCQSCVSEYKQVGSHPSFLKEVRDHMQDSFLMQPEVSRNVNGVQGLNIFEHCYYCH

SEQ ID NO: 9791 - protein, 686 aa, Homo sapiens
MEVVTFGDVAVHFSREEWQCLDPGQRALYREVMLENHSSVAGLAGFLVFKPELISRLEQGEEPWVLDLQGAEGTEAPRTSKTDSTIRTENEQACEDMDILKSESYGTVVRISPQDFPQNPGFGDVSDSEVWLDSHLGSPGLKVTGFTFQNNCLNEETVVPKTFTKDAPQGCKELGSSGLDCQPLESQGESAEGMSQRCEECGKGIRATSDIALHWEINTQKISRCQECQKKLSDCLQGKHTNNCHGEKPYECAECGKVFRLCSQLNQHQRIHTGEKPFKCTECGKAFRLSSKLIQHQRIHTGEKPYRCEECGKAFGQSSSLIHHQRIHTGERPYGCRECGKAFSQQSQLVRHQRTHTGERPYPCKECGKAFSQSSTLAQHQRMHTGEKAQILKASDSPSLVAHQRIHAVEKPFKCDECGKAFRWISRLSQHQLIHTGEKPYKCNKCTKAFGCSSRLIRHQRTHTGEKPFKCDECGKGFVQGSHLIQHQRIHTGEKPYVCNDCGKAFSQSSSLIYHQRIHKGEKPYECLQCGKAFSMSTQLTIHQRVHTGERPYKCNECGKAFSQNSTLFQHQIIHAGVKPYECSECGKAFSRSSYLIEHQRIHTRAQWFYEYGNALEGSTFVSRKKVNTIKKLHQCEDCEKIFRWRSHLIIHQRIHTGEKPYKCNDCGKAFNRSSRLTQHQKIHMG

SEQ ID NO: 9792 - protein, 697 aa, Homo sapiens
MGFLGCWCVSFQEVVTFGDVAVHFSREEWQCLDPGQRALYREVMLENHSSVAGLAGFLVFKPELISRLEQGEEPWVLDLQGAEGTEAPRTSKTDSTIRTENEQACEDMDILKSESYGTVVRISPQDFPQNPGFGDVSDSEVWLDSHLGSPGLKVTGFTFQNNCLNEETVVPKTFTKDAPQGCKELGSSGLDCQPLESQGESAEGMSQRCEECGKGIRATSDIALHWEINTQKISRCQECQKKLSDCLQGKHTNNCHGEKPYECAECGKVFRLCSQLNQHQRIHTGEKPFKCTECGKAFRLSSKLIQHQRIHTGEKPYRCEECGKAFGQSSSLIHHQRIHTGERPYGCRECGKAFSQQSQLVRHQRTHTGERPYPCKECGKAFSQSSTLAQHQRMHTGEKAQILKASDSPSLVAHQRIHAVEKPFKCDECGKAFRWISRLSQHQLIHTGEKPYKCNKCTKAFGCSSRLIRHQRTHTGEKPFKCDECGKGFVQGSHLIQHQRIHTGEKPYVCNDCGKAFSQSSSLIYHQRIHKGEKPYECLQCGKAFSMSTQLTIHQRVHTGERPYKCNECGKAFSQNSTLFQHQIIHAGVKPYECSECGKAFSRSSYLIEHQRIHTRAQWFYEYGNALEGSTFVSRKKVNTIKKLHQCEDCEKIFRWRSHLIIHQRIHTGEKPYKCNDCGKAFNRSSRLTQHQKIHMG

SEQ ID NO: 9793 - protein, 148 aa, Homo sapiens
MEVVTFGDVAVHFSREEWQCLDPGQRALYREVMLENHSSVAGLAGFLVFKPELISRLEQGEEPWVLDLQGAEGTEAPRTSKTGFLGRPTMGQEPRHPHAPPATPVPGLPKHCSQRLTLPPPGLSSSPLGHFLVHDQDRRRGTSAIWMV

SEQ ID NO: 9794 - protein, 351 aa, Homo sapiens
MEAFALGPARRGRRRTRAAGSLLSRAAILLFISAFLVRVPSSVGHLVRLPRAFRLTKDSVKIVGSTSFPVKAYVMLHQKSPHVLCVTQQLRNAELIDPSFQWYGPKGKVVSVENRTAQITSTGSLVFQNFEESMSGIYTCFLEYKPTVEEIVKRLQLKYAIYAYREPHYYYQFTARYHAAPCNSIYNISFEKKLLQILSKLLLDLSCEISLLKSECHRVKMQRAGLQNELFFAFSVSSLDTEKGPKRCTDHNCEPYKRLFKAKNLIERFFNQQVEILGRRAEQLPQIYYIEGTLQMVWINRCFPGYGMNVQQHPKCPECCVICSPGSYNPRDGIHCLQCNSSLVYGAKTCL

SEQ ID NO: 9795 - protein, 350 aa, Homo sapiens
MEAFALGPARRGRRRTRAAGSLLSRAAILLFISAFLVRVPSSVGHLVRLPRAFRLTKDSVKIVGSTSFPVKAYVMLHQKSPHVLCVTQQLRNAELIDPSFQWYGPKGKVVSENRTAQITSTGSLVFQNFEESMSGIYTCFLEYKPTVEEIVKRLQLKYAIYAYREPHYYYQFTARYHAAPCNSIYNISFEKKLLQILSKLLLDLSCEISLLKSECHRVKMQRAGLQNELFFAFSVSSLDTEKGPKRCTDHNCEPYKRLFKAKNLIERFFNQQVEILGRRAEQLPQIYYIEGTLQMVWINRCFPGYGMNVQQHPKCPECCVICSPGSYNPRDGIHCLQCNSSLVYGAKTCL

SEQ ID NO: 9796 - protein, 620 aa, Homo sapiens
MGPLQFRDVAIEFSLEEWHCLDTAQRNLYRNVMLENYSNLVFLGIVVSKPDLIAHLEQGKKPLTMKRHEMVANPSVICSHFAQDLWPEQNIKDSFQKVILRRYEKRGHGNLQLIKRCESVDECKVHTGGYNGLNQCSTTTQSKVFQCDKYGKVFHKFSNSNRHNIRHTEKKPFKCIECGKAFNQFSTLITHKKIHTGEKPYICEECGKAFKYSSALNTHKRIHTGEKPYKCDKCDKAFIASSTLSKHEIIHTGKKPYKCEECGKAFNQSSTLTKHKKIHTGEKPYKCEECGKAFNQSSTLTKHKKIHTGEKPYVCEECGKAFKYSRILTTHKRIHTGEKPYKCNKCGKAFIASSTLSRHEFIHMGKKHYKCEECGKAFIWSSVLTRHKRVHTGEKPYKCEECGKAFKYSSTLSSHKRSHTGEKPYKCEECGKAFVASSTLSKHEIIHTGKKPYKCEECGKAFNQSSSLTKHKKIHTGEKPYKCEECGKAFNQSSSLTKHKKIHTGEKPYKCEECGKAFNQSSTLIKHKKIHTREKPYKCEECGKAFHLSTHLTTHKILHTGEKPYRCRECGKAFNHSATLSSHKKIHSGEKPYECDKCGKAFISPSSLSRHEIIHTGEKP

SEQ ID NO: 9797 - protein, 592 aa, Homo sapiens
MGPLQFRDVAIEFSLEEWHCLDTAQRNLYRNVMLENYSNLVFLGIVVSKPDLIAHLEQGKKPLTMKRHEMVANPSVICSHFAQDLWPEQNIKDSFQKVILRRYEKRGHGNLQLIKRCESVDECKVHTGGYNGLNQCSTTTQSKVFQCDKYGKVFHKFSNSNRHNIRHTEKKPFKCIECGKAFNQFSTLITHKKIHTGEKPYICEECGKAFKYSSALNTHKRIHTGEKPYKCDKCDKAFIASSTLSKHEIIHTGKKPYKCEECGKAFNQSSTLTKHKKIHTGEKPYKCEECGKAFNQSSTLTKHKKIHTGEKPYVCEECGKAFKYSRILTTHKRIHTGEKPYKCNKCGKAFIASSTLSRHEFIHMGKKHYKCEECGKAFIWSSVLTRHKRVHTGEKPYKCEECGKAFVASSTLSKHEIIHTGKKPYKCEECGKAFNQSSSLTKHKKIHTGEKPYKCEECGKAFNQSSSLTKHKKIHTGEKPYKCEECGKAFNQSSTLIKHKKIHTREKPYKCEECGKAFHLSTHLTTHKILHTGEKPYRCRECGKAFNHSATLSSHKKIHSGEKPYECDKCGKAFISPSSLSRHEIIHTGEKP

SEQ ID NO: 9798 - protein, 536 aa, Homo sapiens
MGPLQFRDVAIEFSLEEWHCLDTAQRNLYRNVMLENYSNLVFLGIVVSKPDLIAHLEQGKKPLTMKRHEMVANPSVICSHFAQDLWPEQNIKDSFQKVILRRYEKRGHGNLQLIKRCESVDECKVHTGGYNGLNQCSTTTQSKVFQCDKYGKVFHKFSNSNRHNIRHTEKKPFKCIECGKAFNQFSTLITHKKIHTGEKPYICEECGKAFKYSSALNTHKRIHTGEKPYKCDKCDKAFIASSTLSKHEIIHTGKKPYKCEECGKAFNQSSTLTKHKKIHTGEKPYKCEECGKAFNQSSTLTKHKKIHTGEKPYVCEECGKAFKYSRILTTHKRIHTGEKPYKCNKCGKAFIASSTLSRHEFIHMGKKHYKCEECGKAFIWSSVLTRHKRVHTGEKPYKCEECGKAFKYSSTLSSHKRSHTGEKPYKCEECGKAFVASSTLSKHEIIHTGKKPYKCEECGKAFNQSSSLTKHKKIHTGEKPYKCEECGKAFNQSSSLTKHKKIHSGEKPYECDKCGKAFISPSSLSRHEIIHTGEKP

SEQ ID NO: 9799 - protein, 249 aa, Homo sapiens
MGTPRIQHLLILLVLGASLLTSGLELYCQKGLSMTVEADPANMFNWTTEEVETCDKGALCQETILIIKAGTETAILATKGCIPEGEEAITIVQHSSPPGLIVTSYSNYCEDSFCNDKDSLSQFWEFSETTASTVSTTLHCPTCVALGTCFSAPSLPCPNGTTRCYQGKLEITGGGIESSVEVKGCTAMIGCRLMSGILAVGPMFVREACPHQLLTQPRKTENGATCLPIPVWGLQLLLPLLLPSFIHFS

SEQ ID NO: 9800 - protein, 267 aa, Homo sapiens
MGARQIQTSSSQTSPEEAMGTPRIQHLLILLVLGASLLTSGLELYCQKGLSMTVEADPANMFNWTTEEVETCDKGALCQETILIIKAGTETAILATKGCIPEGEEAITIVQHSSPPGLIVTSYSNYCEDSFCNDKDSLSQFWEFSETTASTVSTTLHCPTCVALGTCFSAPSLPCPNGTTRCYQGKLEITGGGIESSVEVKGCTAMIGCRLMSGILAVGPMFVREACPHQLLTQPRKTENGATCLPIPVWGLQLLLPLLLPSFIHFS

SEQ ID NO: 9801 - protein, 354 aa, Homo sapiens
MRARPQVCEALLFALALQTGVCYGIKWLALSKTPSALALNQTQHCKQLEGLVSAQVQLCRSNLELMHTVVHAAREVMKACRRAFADMRWNCSSIELAPNYLLDLERGTRESAFVYALSAAAISHAIARACTSGDLPGCSCGPVPGEPPGPGNRWGGCADNLSYGLLMGAKFSDAPMKVKKTGSQANKLMRLHNSEVGRQALRASLEMKCKCHGVSGSCSIRTCWKGLQELQDVAADLKTRYLSATKVVHRPMGTRKHLVPKDLDIRPVKDSELVYLQSSPDFCMKNEKVGSHGTQDRQCNKTSNGSDSCDLMCCGRGYNPYTDRVVERCHCKYHWCCYVTCRRCERTVERYVCK

SEQ ID NO: 9802 - protein, 108 aa, Homo sapiens
MSWRGRRYRPRRCLRLAQLVGPMLEPSVPEPQQEEPPTESQDHTPGQKREDDQGAAEIQVPNLEADLQELSQSKTGDECGDSPDVQGKILPKSEQFKMPEGGEGKPQL

SEQ ID NO: 9803 - protein, 89 aa, Homo sapiens
MKPWILLLVMFISGVVMLLPVLGSFWNKDPFLDMIRETEQCWVQPPYKYCEKRCTKIMTCVRPNHTCCWTYCGNICLDNEEPLKSMLNP

SEQ ID NO: 9804 - protein, 156 aa, Homo sapiens
WASQVSENRPVCKAIIQGKQFEGLVDTGADVSIIALNQWPKNWPKQKAVTGLVGIGTASEVYQSTEILHCLGPDNQESTVQPMITSIPLNLWGRDLLQQWGAEITMPAPLYSPTSQKIMTKMGYIPGKGLGKNEDGIKVPVEAKINQEREGIGYPF

SEQ ID NO: 9805 - protein, 409 aa, Homo sapiens
MKLKQRVVLLAILLVIFIFTKVFLIDNLDTSAANREDQRAFHRMMTGLRVELAPKLDHTLQSPWEIAAQWVVPREVYPEETPELGAVMHAMATKKIIKADVGYKGTQLKALLILEGGQKVVFKPKRYSRDHVVEGEPYAGYDRHNAEVAAFHLDRILGFHRAPLVVGRFVNLRTEIKPVATEQLLSTFLTVGNNTCFYGKCYYCRETEPACADGDIMEGSVTLWLPDVWPLQKHRHPWGRTYREGKLARWEYDESYCDAVKKTSPYDSGPRLLDIIDTAVFDYLIGNADRHHYESFQDDEGASMLILLDNAKSFGNPSLDERSILAPLYQCCIIRVSTWNRLNYLKNGVLKSALKSAMAHDPISPVLSDPHLDAVDQRLLSVLATVKQCTDQFGMDTVLVEDRMPLSHL

SEQ ID NO: 9806 - protein, 156 aa, Homo sapiens
WASQVSENRPVCKAIIQGKQFEGLVDTEADVSIIALNQWPKNWPKQKAVTGLVGIGTASEVYQSTEILHCLGPDNQESTVQPMITSIPLNLWGQDLLQQWGAEITMPAPLYSPTSQKIMTKMGYIPGKGLGKNEDGIKVPVEAKINQKREGIGYPF

SEQ ID NO: 9807 - protein, 117 aa, Homo sapiens
MFIFNSIADDIFPLISCVGAIHCNILAIRTGNDFAAIKLQVIKLIYLMIWHSLVIISPVVTLAFFPASLKQGSLHFLLIIYFVLLLTPWLEFSKSGTHLPSNTKNNSSMVGKYGCLS

SEQ ID NO: 9808 - protein, 590 aa, Homo sapiens
MIKFQERVTFKDVAVVFTKEELALLDKAQINLYQDVMLENFRNLMLVRDGIKNNILNLQAKGLSYLSQEVLHCWQIWKQRIRDLTVSQDYIVNLQEECSPHLEDVSLSEEWAGISLQISENENYVVNAIIKNQDITAWQSLTQVLTPESWRKANIMTEPQNSQGRYKGIYMEEKLYRRAQHDDSLSWTSCDHHESQECKGEDPGRHPNCGKNLGMKSTVEKRNAAHVLPQPFPCNNCGVAFADDTDPHVHHSTHLGEKSYKCDQYGKNFSQSQDLIVHCKTHSGKTPYEFHEWPMGCKQSSDLPRYQKVSSGDKPYKCKECGKGFRRSSSLHNHHRVHTGEMPYKCDECGKGFGFRSLLCIHQGVHTGKKPYKCEECGKGFDQSSNLLVHQRVHTGEKPYKCSECGKCFSSSSVLQVHWRFHTGEKPYRCGECGKGFSQCTHLHIHQRVHTGEKPYKCNVCGKDFAYSSVLHTHQRVHTGEKPYKCEVCGKCFSYSSYFHLHQRDHIREKPYKCDECGKGFSRNSDLNVHLRVHTRERPYKCKACGKGFSRNSYLLAHQRVHIDETQYTHCERGKDLLTHQRLHEQRETL

SEQ ID NO: 9809 - protein, 435 aa, Homo sapiens
MTEPQNSQGRYKGIYMEEKLYRRAQHDDSLSWTSCDHHESQECKGEDPGRHPNCGKNLGMKSTVEKRNAAHVLPQPFPCNNCGVAFADDTDPHVHHSTHLGEKSYKCDQYGKNFSQSQDLIVHCKTHSGKTPYEFHEWPMGCKQSSDLPRYQKVSSGDKPYKCKECGKGFRRSSSLHNHHRVHTGEMPYKCDECGKGFGFRSLLCIHQGVHTGKKPYKCEECGKGFDQSSNLLVHQRVHTGEKPYKCSECGKCFSSSSVLQVHWRFHTGEKPYRCGECGKGFSQCTHLHIHQRVHTGEKPYKCNVCGKDFAYSSVLHTHQRVHTGEKPYKCEVCGKCFSYSSYFHLHQRDHIREKPYKCDECGKGFSRNSDLNVHLRVHTRERPYKCKACGKGFSRNSYLLAHQRVHIDETQYTHCERGKDLLTHQRLHEQRETL

SEQ ID NO: 9810 - protein, 677 aa, Homo sapiens
MAAHHRQNTAGRRKVQVSYVIRDEVEKYNRNGVNALQLDPALNRLFTAGRDSIIRIWSVNQHKQDPYIASMEHHTDWVNDIVLCCNGKTLISASSDTTVKVWNAHKGFCMSTLRTHKDYVKALAYAKDKELVASAGLDRQIFLWDVNTLTALTASNNTVTTSSLSGNKDSIYSLAMNQLGTIIVSGSTEKVLRVWDPRTCAKLMKLKGHTDNVKALLLNRDGTQCLSGSSDGTIRLWSLGQQRCIATYRVHDEGVWALQVNDAFTHVYSGGRDRKIYCTDLRNPDIRVLICEEKAPVLKMELDRSADPPPAIWVATTKSTVNKWTLKGIHNFRASGDYDNDCTNPITPLCTQPDQVIKGGASIIQCHILNDKRHILTKDTNNNVAYWDVLKACKVEDLGKVDFEDEIKKRFKMVYVPNWFSVDLKTGMLTITLDESDCFAAWVSAKDAGFSSPDGSDPKLNLGGLLLQALLEYWPRTHVNPMDEEENEVNHVNGEQENRVQKGNGYFQVPPHTPVIFGEAGGRTLFRLLCRDSGGETESMLLNETVPQWVIDITVDKNMPKFNKIPFYLQPHASSGAKTLKKDRLSASDMLQVRKVMEHVYEKIINLDNESQTTSSSNNEKPGEQEKEEDIAVLAEEKIELLCQDQVLDPNMDLRTVKHFIWKSGGDLTLHYRQKST

SEQ ID NO: 9811 - protein, 121 aa, Homo sapiens
MPKFNKIPFYLQPHASSGAKTLKKDRLSASDMLQVRKVMEHVYEKIINLDNESQTTSSSNNEKPGEQEKEEDIAVLAEEKIELLCQDQVQVLDPNMDLRTVKHFIWKSGGDLTLHYRQKST

SEQ ID NO: 9812 - protein, 668 aa, Homo sapiens
MAAHHRQNTAGRRKVQVSYVIRDEVEKYNRNGVNALQLDPALNRLFTAGRDSIIRIWSVNQHKQDPYIASMEHHTDWVNDIVLCCNGKTLKVWNAHKGFCMSTLRTHKDYVKALAYAKDKELVASAGLDRQIFLWDVNTLTALTASNNTVTTSSLSGNKDSIYSLAMNQLGTIIVSGSTEKVLRVWDPRTCAKLMKLKGHTDNVKALLLNRDGTQCLSGSSDGTIRLWSLGQQRCIATYRVHDEGVWALQVNDAFTHVYSGGRDRKIYCTDLRNPDIRVLICEEKAPVLKMELDRSADPPPAIWVATTKSTVNKWTLKGIHNFRASGDYDNDCTNPITPLCTQPDQVIKGGASIIQCHILNDKRHILTKDTNNNVAYWDVLKACKVEDLGKVDFEDEIKKRFKMVYVPNWFSVDLKTGMLTITLDESDCFAAWVSAKDAGFSSPDGSDPKLNLGGLLLQALLEYWPRTHVNPMDEEENEVNHVNGEQENRVQKGNGYFQVPPHTPVIFGEAGGRTLFRLLCRDSGGETESMLLNETVPQWVIDITVDKNMPKFNKIPFYLQPHASSGAKTLKKDRLSASDMLQVRKVMEHVYEKIINLDNESQTTSSSNNEKPGEQEKEEDIAVLAEEKIELLCQDQVLDPNMDLRTVKHFIWKSGGDLTLHYRQKST

SEQ ID NO: 9813 - protein, 595 aa, Homo sapiens
MECQSAQVISASSDTTVKVWNAHKGFCMSTLRTHKDYVKALAYAKDKELVASAGLDRQIFLWDVNTLTALTASNNTVTTSSLSGNKDSIYSLAMNQLGTIIVSGSTEKVLRVWDPRTCAKLMKLKGHTDNVKALLLNRDGTQCLSGSSDGTIRLWSLGQQRCIATYRVHDEGVWALQVNDAFTHVYSGGRDRKIYCTDLRNPDIRVLICEEKAPVLKMELDRSADPPPAIWVATTKSTVNKWTLKGIHNFRASGDYDNDCTNPITPLCTQPDQVIKGGASIIQCHILNDKRHILTKDTNNNVAYWDVLKACKVEDLGKVDFEDEIKKRFKMVYVPNWFSVDLKTGMLTITLDESDCFAAWVSAKDAGFSSPDGSDPKLNLGGLLLQALLEYWPRTHVNPMDEEENEVNHVNGEQENRVQKGNGYFQVPPHTPVIFGEAGGRTLFRLLCRDSGGETESMLLNETVPQWVIDITVDKNMPKFNKIPFYLQPHASSGAKTLKKDRLSASDMLQVRKVMEHVYEKIINLDNESQTTSSSNNEKPGEQEKEEDIAVLAEEKIELLCQDQVLDPNMDLRTVKHFIWKSGGDLTLHYRQKST

SEQ ID NO: 9814 - protein, 402 aa, Homo sapiens
MAAHHRQNTAGRRKVQCLSGSSDGTIRLWSLGQQRCIATYRVHDEGVWALQVNDAFTHVYSGGRDRKIYCTDLRNPDIRVLICEEKAPVLKMELDRSADPPPAIWVATTKSTVNKWACKVEDLGKVDFEDEIKKRFKMVYVPNWFSVDLKTGMLTITLDESDCFAAWVSAKDAGFSSPDGSDPKLNLGGLLLQALLEYWPRTHVNPMDEEENEVNHVNGEQENRVQKGNGYFQVPPHTPVIFGEAGGRTLFRLLCRDSGGETESMLLNETVPQWVIDITVDKNMPKFNKIPFYLQPHASSGAKTLKKDRLSASDMLQVRKVMEHVYEKIINLDNESQTTSSSNNEKPGEQEKEEDIAVLAEEKIELLCQDQVLDPNMDLRTVKHFIWKSGGDLTLHYRQKST

SEQ ID NO: 9815 - protein, 444 aa, Homo sapiens
MSSTSPNLQKAIDLASKAAQEDKAGNYEEALQLYQHAVQYFLHVVKYEAQGDKAKQSIRAKCTEYLDRAEKLKEYLKNKEKKAQKPVKEGQPSPADEKGNDSDGEGESDDPEKKKLQNQLQGAIVIERPNVKWSDVAGLEGAKEALKEAVILPIKFPHLFTGKRTPWRGILLFGPPGTGKSYLAKAVATEANNSTFFSISSSDLVSKWLGESEKLVKNLFQLARENKPSIIFIDEIDSLCGSRSENESEAARRIKTEFLVQMQGVGVDNDGILVLGATNIPWVLDSAIRRRFEKRIYIPLPEPHARAAMFKLHLGTTQNSLTEADFRELGRKTDGYSGADISIIVRDALMQPVRKVQSATHFKKVRGPSRADPNHLVDDLLTPCSPGDPGAIEMTWMDVPGDKLLEPVVSMSDMLRSLSNTKPTVNEHDLLKLKKFTEDFGQEG

SEQ ID NO: 9816 - protein, 2718 aa, Homo sapiens
MPRTKQIHPRNLRDKIEEAQKELNGAEVSKKEILQAGVKGTSESLKGVKRKKIVAENHLKKIPKSPLRNPLQAKHKQNTEESSFAVLHSASESHKKQNYIPVKNGKQFTKQNGETPGIIAEASKSEESVSPKKPLFLQQPSELRRWRSEGADPAKFSDLDEQCDSSSLSSKTRTDNSECISSHCGTTSPSYTNTAFDVLLKAMEPELSTLSQKGSPCAIKTEKLRPNKTARSPPKLKNSSMDAPNQTSQELVAESQSSCTSYTVHMSAAQKNEQGAMQSASHLYHQHEHFVPKSNQHNQQLPGCSGFTGSLTNLQNQENAKLEQVYNIAVTSSVGLTSPSSRSQVTPQNQQMDSASPLSISPANSTQSPPMPIYNSTHVASVVNQSVEQMCNLLLKDQKPKKQGKYICEYCNRACAKPSVLLKHIRSHTGERPYPCVTCGFSFKTKSNLYKHKKSHAHTIKLGLVLQPDAGGLFLSHESPKALSIHSDVEDSGESEEEGATDERQHDLGAMELQPVHIIKRMSNAETLLKSSFTPSSPENVIGDFLLQDRSAESQAVTELPKVVVHHVTVSPLRTDSPKAMDPKPELSSAQKQKDLQVTNVQPLSANMSQGGVSRLETNENSHQKGDMNPLEGKQDSHVGTVHAQLQRQQATDYSQEQQGKLLSPRSLGSTDSGYFSRSESADQTVSPPTPFARRLPSTEQDSGRSNGPSAALVTTSTPSALPTGEKALLLPGQMRPPLATKTLEERISKLISDNEALVDDKQLDSVKPRRTSLSRRGSIDSPKSYIFKDSFQFDLKPVGRRTSSSSDIPKSPFTPTEKSKQVFLLSVPSLDCLPITRSNSMPTTGYSAVPANIIPPPHPLRGSQSFDDKIGTFYDDVFVSGPNAPVPQSGHPRTLVRQAAIEDSSANESHVLGTGQSLDESHQGCHAAGEAMSVRSKALAQGPHIEKKKSHQGRGTMFECETCRNRYRKLENFENHKKFYCSELHGPKTKVAMREPEHSPVPGGLQPQILHYRVAGSSGIWEQTPQIRKRRKMKSVGDDEELQQNESGTSPKSSEGLQFQNALGCNPSLPKHNVTIRSDQQHKNIQLQNSHIHLVARGPEQTMDPKLSTIMEQQISSAAQDKIELQRHGTGISVIQHTNSLSRPNSFDKPEPFERASPVSFQELNRTGKSGSLKVIGISQEESHPSRDGSHPHQLALSDALRGELQESSRKSPSERHVLGQPSRLVRQHNIQVPEILVTEEPDRDLEAQCHDQEKSEKFSWPQRSETLSKLPTEKLPPKKKRLRLAEIEHSSTESSFDSTLSRSLSRESSLSHTSSFSASLDIEDVSKTEASPKIDFLNKAEFLMIPAGLNTLNVPGCHREMRRTASEQINCTQTSMEVSDLRSKSFDCGSITPPQTTPLTELQPPSSPSRVGVTGHVPLLERRRGPLVRQISLNIAPDSHLSPVHPTSFQNTALPSVNAVPYQGPQLTSTSLAEFSANTLHSQTQVKDLQAETSNSSSTNVFPVQQLCDINLLNQIHAPPSHQSTQLSLQVSTQGSKPDKNSVLSGSSKSEDCFAPKYQLHCQVFTSGPSCSSNPVHSLPNQVISDPVGTDHCVTSATLPTKLIDSMSNSHPLLPPELRPLGSQVQKVPSSFMLPIRLQSSVPAYCFATLTSLPQILVTQDLPNQPICQTNHSVVPISEEQNSVPTLQKGHQNALPNPEKEFLCENVFSEMSQNSSLSESLPITQKISVGRLSPQQESSASSKRMLSPANSLDIAMEKHQKRAKDENGAVCATDVRPLEALSSRVNEASKQKKPILVRQVCTTEPLDGVMLEKDVFSQPEISNEAVNLTNVLPADNSSTGCSKFVVIEPISELQEFENIKSSTSLTLTVRSSPAPSENTHISPLKCTDNNQERKSPGVKNQGDKVNIQEQSQQPVTSLSLFNIKDTQQLAFPSLKTTTNFTWCYLLRQKSLHLPQKDQKTSAYTDWTVSASNPNPLGLPTKVALALLNSKQNTGKSLYCQAITTHSKSDLLVYSSKWKSSLSKRALGNQKSTVVEFSNKDASEINSEQDKENSLIKSEPRRIKIFDGGYKSNEEYVYVRGRGRGKYICEECGIRCKKPSMLKKHIRTHTDVRPYHCTYCNFSFKTKGNLTKHMKSKAHSKKCVDLGVSVGLIDEQDTEESDEKQRFSYERSGYDLEESDGPDEDDNENEDDDEDSQAESVLSATPSVTASPQHLPSRSSLQDPVSTDEDVRITDCFSGVHTDPMDVLPRALLTRMTVLSTAQSDYNRKTLSPGKARQRAARDENDTIPSVDTSRSPCHQMSVDYPESEEILRSSMAGKAVAITQSPSSVRLPPAAAEHSPQTAAGMPSVASPHPDPQEQKQQITLQPTPGLPSPHTHLFSHLPLHSQQQSRTPYNMVPVGGIHVVPAGLTYSTFVPLQAGPVQLTIPAVSVVHRTLGTHRNTVTEVSGTTNPAGVAELSSVVPCIPIGQIRVPGLQNLSTPGLQSLPSLSMETVNIVGLANTNMAPQVHPPGLALNAVGLQVLTANPSSQSSPAPQAHIPGLQILNIALPTLIPSVSQVAVDAQGAPEMPASQSKACETQPKQTSVASANQVSRTESPQGLPTVQRENAKKVLNPPAPAGDHARLDGLSKMDTEKAASANHVKPKPELTSIQGQPASTSQPLLKAHSEVFTKPSGQQTLSPDRQVPRPTALPRRQPTVHFSDVSSDDDEDRLVIAT

SEQ ID NO: 9817 - protein, 701 aa, Homo sapiens
MGQKFQKKRALGNQKSTVVEFSNKDASEINSEQDKENSLIKSEPRRIKIFDGGYKSNEEYVYVRGRGRGKYICEECGIRCKKPSMLKKHIRTHTDVRPYHCTYCNFSFKTKGNLTKHMKSKAHSKKCVDLGVSVGLIDEQDTEESDEKQRFSYERSGYDLEESDGPDEDDNENEDDDEDSQAESVLSATPSVTASPQHLPSRSSLQDPVSTDEDVRITDCFSGVHTDPMDVLPRALLTRMTVLSTAQSDYNRKTLSPGKARQRAARDENDTIPSVDTSRSPCHQMSVDYPESEEILRSSMAGKAVAITQSPSSVRLPPAAAEHSPQTAAGMPSVASPHPDPQEQKQQITLQPTPGLPSPHTHLFSHLPLHSQQQSRTPYNMVPVGGIHVVPAGLTYSTFVPLQAGPVQLTIPAVSVVHRTLGTHRNTVTEVSGTTNPAGVAELSSVVPCIPIGQIRVPGLQNLSTPGLQSLPSLSMETVNIVGLANTNMAPQVHPPGLALNAVGLQVLTANPSSQSSPAPQAHIPGLQILNIALPTLIPSVSQVAVDAQGAPEMPASQSKACETQPKQTSVASANQVSRTESPQGLPTVQRENAKKVLNPPAPAGDHARLDGLSKMDTEKAASANHVKPKPELTSIQGQPASTSQPLLKAHSEVFTKPSGQQTLSPDRQVPRPTALPRRQPTVHFSDVSSDDDEDRLVIAT

SEQ ID NO: 9818 - protein, 716 aa, Homo sapiens
MGQKFQKKSYRLVLKELRNPLLKRALGNQKSTVVEFSNKDASEINSEQDKENSLIKSEPRRIKIFDGGYKSNEEYVYVRGRGRGKYICEECGIRCKKPSMLKKHIRTHTDVRPYHCTYCNFSFKTKGNLTKHMKSKAHSKKCVDLGVSVGLIDEQDTEESDEKQRFSYERSGYDLEESDGPDEDDNENEDDDEDSQAESVLSATPSVTASPQHLPSRSSLQDPVSTDEDVRITDCFSGVHTDPMDVLPRALLTRMTVLSTAQSDYNRKTLSPGKARQRAARDENDTIPSVDTSRSPCHQMSVDYPESEEILRSSMAGKAVAITQSPSSVRLPPAAAEHSPQTAAGMPSVASPHPDPQEQKQQITLQPTPGLPSPHTHLFSHLPLHSQQQSRTPYNMVPVGGIHVVPAGLTYSTFVPLQAGPVQLTIPAVSVVHRTLGTHRNTVTEVSGTTNPAGVAELSSVVPCIPIGQIRVPGLQNLSTPGLQSLPSLSMETVNIVGLANTNMAPQVHPPGLALNAVGLQVLTANPSSQSSPAPQAHIPGLQILNIALPTLIPSVSQVAVDAQGAPEMPASQSKACETQPKQTSVASANQVSRTESPQGLPTVQRENAKKVLNPPAPAGDHARLDGLSKMDTEKAASANHVKPKPELTSIQGQPASTSQPLLKAHSEVFTKPSGQQTLSPDRQVPRPTALPRRQPTVHFSDVSSDDDEDRLVIAT

SEQ ID NO: 9819 - protein, 475 aa, Homo sapiens
MSRRKAGSAPRRVEPAPAANPDDEMEMQDLVIELKPEPDAQPQQAPRLGPFSPKEVSSAGRFGGEPHHSPGPMPAGAALLALGPRNPWTLWTPLTPNYPDRQPWTDKHPDLLTCGRCLQTFPLEAITAFMDHKKLGCQLFRGPSRGQGSEREELKALSCLRCGKQFTVAWKLLRHAQWDHGLSIYQTESEAPEAPLLGLAEVAAAVSAVVGPAAEAKSPRASGSGLTRRSPTCPVCKKTLSSFSNLKVHMRSHTGERPYACDQCPYACAQSSKLNRHKKTHRQVPPQSPLMADTSQEQASAAPPEPAVHAAAPTSTLPCSGGEGAGAAATAGVQEPGAPGSGAQAGPGGDTWGAITTEQRTDPANSQKASPKKMPKSGGKSRGPGGSCEFCGKHFTNSSNLTVHRRSHTGERPYTCEFCNYACAQSSKLNRHRRMHGMTPGSTRFECPHCHVPFGLRATLDKHLRQKHPEAAGEA

SEQ ID NO: 9820 - protein, 434 aa, Homo sapiens
MPDRDSYANGTGSSGGGPGGGGSEEASGAGVGSGGASSDAICRDFLRNVCKRGKRCRYRHPDMSEVSNLGVSKNEFIFCHDFQNKECSRPNCRFIHGSKEDEDGYKKTGELPPRLRQKVAAGLGLSPADLPNGKEEVPICRDFLKGDCQRGAKCKFRHLQRDFEFDARGGGGTGGGSTGSVLPGRRHDLYDIYDLPDRGFEDHEPGPKRRRGGCCPPDGPHFESYEYSLAPPRGVECRLLEEENAMLRKRVEELKKQVSNLLATNEVLLEQNAQFRNQAKVITLSSTAPATEQTLAPTVGTVATFNHGIAQTHTTLSSQALQPRPVSQQELVAPAGAPAAPPTNAAPPAAPPPPPPHLTPEITPLSAALAQTIAQGMAPPPVSMAPVAVSVAPVAPVAVSMAQPLAGITMSHTTTPMVTYPIASQSMRITAMPH

SEQ ID NO: 9821 - protein, 2446 aa, Homo sapiens
MDTGDTALGQKATSRSGETDKASGRWRQEQSAVIKMSTFGSHEGQRQPQIEPEQIGNTASAQLFGSGKLASPSEVVQQVAEKQYPPHRPSPYSCQHSLSFPQHSLPQGVMHSTKPHQSLEGPPWLFPGPLPSVASEDLFPFPIHGHSGGYPRKKISSLNPAYSQYSQKSIEQAEEAHKKEHKPKKPGKYICPYCSRACAKPSVLKKHIRSHTGERPYPCIPCGFSFKTKSNLYKHRKSHAHAIKAGLVPFTESAVSKLDLEAGFIDVEAEIHSDGEQSTDTDEESSLFAEASDKMSPGPPIPLDIASRGGYHGSLEESLGGPMKVPILIIPKSGIPLPNESSQYIGPDMLPNPSLNTKADDSHTVKQKLALRLSEKKGQDSEPSLNLLSPHSKGSTDSGYFSRSESAEQQISPPNTNAKSYEEIIFGKYCRLSPRNALSVTTTSQERAAMGRKGIMEPLPHVNTRLDVKMFEDPVSQLIPSKGDVDPSQTSMLKSTKFNSESRQPQIIPSSIRNEGKLYPANFQGSNPVLLEAPVDSSPLIRSNSVPTSSATNLTIPPSLRGSHSFDERMTGSDDVFYPGTVGIPPQRMLRRQAAFELPSVQEGHVEVEHHGRMLKGISSSSLKEKKLSPGDRVGYDYDVCRKPYKKWEDSETPKQNYRDISCLSSLKHGGEYFMDPVVPLQGVPSMFGTTCENRKRRKEKSVGDEEDTPMICSSIVSTPVGIMASDYDPKLQMQEGVRSGFAMAGHENLSHGHTERFDPCRPQLQPGSPSLVSEESPSAIDSDKMSDLGGRKPPGNVISVIQHTNSLSRPNSFERSESAELVACTQDKAPSPSETCDSEISEAPVSPEWAPPGDGAESGGKPSPSQQVQQQSYHTQPRLVRQHNIQVPEIRVTEEPDKPEKEKEAQSKEPEKPVEEFQWPQRSETLSQLPAEKLPPKKKRLRLADMEHSSGESSFESTGTGLSRSPSQESNLSHSSSFSMSFEREETSKLSALPKQDEFGKHSEFLTVPAGSYSLSVPGHHHQKEMRRCSSEQMPCPHPAEVPEVRSKSFDYGNLSHAPVSGAAASTVSPSRERKKCFLVRQASFSGSPEISQGEVGMDQSVKQEQLEHLHAGLRSGWHHGPPAVLPPLQQEDPGKQVAGPCPPLSSGPLHLAQPQIMHMDSQESLRNPLIQPTSYMTSKHLPEQPHLFPHQETIPFSPIQNALFQFQYPTVCMVHLPAQQPPWWQAHFPHPFAQHPQKSYGKPSFQTEIHSSYPLEHVAEHTGKKPAEYAHTKEQTYPCYSGASGLHPKNLLPKFPSDQSSKSTETPSEQVLQEDFASANAGSLQSLPGTVVPVRIQTHVPSYGSVMYTSISQILGQNSPAIVICKVDENMTQRTLVTNAAMQGIGFNIAQVLGQHAGLEKYPIWKAPQTLPLGLESSIPLCLPSTSDSVATLGGSKRMLSPASSLELFMETKQQKRVKEEKMYGQIVEELSAVELTNSDIKKDLSRPQKPQLVRQGCASEPKDGLQSGSSSFSSLSPSSSQDYPSVSPSSREPFLPSKEMLSGSRAPLPGQKSSGPSESKESSDELDIDETASDMSMSPQSSSLPAGDGQLEEEGKGHKRPVGMLVRMASAPSGNVADSTLLLTDMADFQQILQFPSLRTTTTVSWCFLNYTKPNYVQQATFKSSVYASWCISSCNPNPSGLNTKTTLALLRSKQKITAEIYTLAAMHRPGTGKLTSSSAWKQFTQMKPDASFLFGSKLERKLVGNILKERGKGDIHGDKDIGSKQTEPIRIKIFEGGYKSNEDYVYVRGRGRGKYICEECGIRCKKPSMLKKHIRTHTDVRPYVCKLCNFAFKTKGNLTKHMKSKAHMKKCLELGVSMTSVDDTETEEAENLEDLHKAAEKHSMSSISTDHQFSDAEESDGEDGDDNDDDDEDEDDFDDQGDLTPKTRSRSTSPQPPRFSSLPVNVGAVPHGVPSDSSLGHSSLISYLVTLPSIRVTQLMTPSDSCEDTQMTEYQRLFQSKSTDSEPDKDRLDIPSCMDEECMLPSEPSSSPRDFSPSSHHSSPGYDSSPCRDNSPKRYLIPKGDLSPRRHLSPRRDLSPMRHLSPRKEAALRREMSQRDVSPRRHLSPRRPVSPGKDITARRDLSPRRERRYMTTIRAPSPRRALYHNPPLSMGQYLQAEPIVLGPPNLRRGLPQVPYFSLYGDQEGAYEHPGSSLFPEGPNDYVFSHLPLHSQQQVRAPIPMVPVGGIQMVHSMPPALSSLHPSPTLPLPMEGFEEKKGASGESFSKDPYVLSKQHEKRGPHALQSSGPPSTPSSPRLLMKQSTSEDSLNATEREQEENIQTCTKAIASLRIATEEAALLGPDQPARVQEPHQNPLGSAHVSIRHFSRPEPGQPCTSATHPDLHDGEKDNFGTSQTPLAHSTFYSKSCVDDKQLDFHSSKELSSSTEESKDPSSEKSQLH

SEQ ID NO: 9822 - protein, 604 aa, Homo sapiens
MMKSQGLVSFKDVAVDFTQEEWQQLDPSQRTLYRDVMLENYSHLVSMGYPVSKPDVISKLEQGEEPWIIKGDISNWIYPDEYQADGRQDRKSNLHNSQSCILGTVSFHHKILKGVTRDGSLCSILKVCQGDGQLQRFLENQDKLFRQVTFVNSKTVTEASGHKYNPLGKIFQECIETDISIQRFHKYDAFKKNLKPNIDLPSCYKSNSRKKPDQSFGGGKSSSQSEPNSNLEKIHNGVIPFDDNQCGNVFRNTQSLIQYQNVETKEKSCVCVTCGKAFAKKSQLIVHQRIHTGKKPYDCGACGKAFSEKFHLVVHQRTHTGEKPYDCSECGKAFSQKSSLIIHQRVHTGEKPYECSECGKAFSQKSPLIIHQRIHTGEKPYECRECGKAFSQKSQLIIHHRAHTGEKPYECTECGKAFCEKSHLIIHKRIHTGEKPYKCAQCEEAFSRKTELITHQLVHTGEKPYECTECGKTFSRKSQLIIHQRTHTGEKPYKCSECGKAFCQKSHLIGHQRIHTGEKPYICTECGKAFSQKSHLPGHQRIHTGEKPYICAECGKAFSQKSDLVLHQRIHTGERPYQCAICGKAFIQKSQLTVHQRIHTVVKS

SEQ ID NO: 9823 - protein, 619 aa, Homo sapiens
MVPAETSSSGLLEEQKMKSQGLVSFKDVAVDFTQEEWQQLDPSQRTLYRDVMLENYSHLVSMGYPVSKPDVISKLEQGEEPWIIKGDISNWIYPDEYQADGRQDRKSNLHNSQSCILGTVSFHHKILKGVTRDGSLCSILKVCQGDGQLQRFLENQDKLFRQVTFVNSKTVTEASGHKYNPLGKIFQECIETDISIQRFHKYDAFKKNLKPNIDLPSCYKSNSRKKPDQSFGGGKSSSQSEPNSNLEKIHNGVIPFDDNQCGNVFRNTQSLIQYQNVETKEKSCVCVTCGKAFAKKSQLIVHQRIHTGKKPYDCGACGKAFSEKFHLVVHQRTHTGEKPYDCSECGKAFSQKSSLIIHQRVHTGEKPYECSECGKAFSQKSPLIIHQRIHTGEKPYECRECGKAFSQKSQLIIHHRAHTGEKPYECTECGKAFCEKSHLIIHKRIHTGEKPYKCAQCEEAFSRKTELITHQLVHTGEKPYECTECGKTFSRKSQLIIHQRTHTGEKPYKCSECGKAFCQKSHLIGHQRIHTGEKPYICTECGKAFSQKSHLPGHQRIHTGEKPYICAECGKAFSQKSDLVLHQRIHTGERPYQCAICGKAFIQKSQLTVHQRIHTVVKS

SEQ ID NO: 9824 - protein, 620 aa, Homo sapiens
MVPAETSSSGLLEEQKMMKSQGLVSFKDVAVDFTQEEWQQLDPSQRTLYRDVMLENYSHLVSMGYPVSKPDVISKLEQGEEPWIIKGDISNWIYPDEYQADGRQDRKSNLHNSQSCILGTVSFHHKILKGVTRDGSLCSILKVCQGDGQLQRFLENQDKLFRQVTFVNSKTVTEASGHKYNPLGKIFQECIETDISIQRFHKYDAFKKNLKPNIDLPSCYKSNSRKKPDQSFGGGKSSSQSEPNSNLEKIHNGVIPFDDNQCGNVFRNTQSLIQYQNVETKEKSCVCVTCGKAFAKKSQLIVHQRIHTGKKPYDCGACGKAFSEKFHLVVHQRTHTGEKPYDCSECGKAFSQKSSLIIHQRVHTGEKPYECSECGKAFSQKSPLIIHQRIHTGEKPYECRECGKAFSQKSQLIIHHRAHTGEKPYECTECGKAFCEKSHLIIHKRIHTGEKPYKCAQCEEAFSRKTELITHQLVHTGEKPYECTECGKTFSRKSQLIIHQRTHTGEKPYKCSECGKAFCQKSHLIGHQRIHTGEKPYICTECGKAFSQKSHLPGHQRIHTGEKPYICAECGKAFSQKSDLVLHQRIHTGERPYQCAICGKAFIQKSQLTVHQRIHTVVKS

SEQ ID NO: 9825 - protein, 568 aa, Homo sapiens
MLENYSHLVSMGYPVSKPDVISKLEQGEEPWIIKGDISNWIYPDEYQADGRQDRKSNLHNSQSCILGTVSFHHKILKGVTRDGSLCSILKVCQGDGQLQRFLENQDKLFRQVTFVNSKTVTEASGHKYNPLGKIFQECIETDISIQRFHKYDAFKKNLKPNIDLPSCYKSNSRKKPDQSFGGGKSSSQSEPNSNLEKIHNGVIPFDDNQCGNVFRNTQSLIQYQNVETKEKSCVCVTCGKAFAKKSQLIVHQRIHTGKKPYDCGACGKAFSEKFHLVVHQRTHTGEKPYDCSECGKAFSQKSSLIIHQRVHTGEKPYECSECGKAFSQKSPLIIHQRIHTGEKPYECRECGKAFSQKSQLIIHHRAHTGEKPYECTECGKAFCEKSHLIIHKRIHTGEKPYKCAQCEEAFSRKTELITHQLVHTGEKPYECTECGKTFSRKSQLIIHQRTHTGEKPYKCSECGKAFCQKSHLIGHQRIHTGEKPYICTECGKAFSQKSHLPGHQRIHTGEKPYICAECGKAFSQKSDLVLHQRIHTGERPYQCAICGKAFIQKSQLTVHQRIHTVVKS

SEQ ID NO: 9826 - protein, 1004 aa, Homo sapiens
MAALHTTPDSPAAQLERAEDGSECDPDQEEEEEEEEKGEEVQEVEEEEEEIVVEEEEEGVAEVVQDAQVEAVAEVEVEADVEEEDVKEVLAEEECPALGTQERLSRGGDAKSPVLQEKGLQASRAPATPRDEDLEEEEEEEEDEDEDDLLTAGCQELVTFEDVAVYFSLEEWERLEADQRGLYQEVMQENYGILVSLGYPIPKPDLIFRLEQGEEPWVPDSPRPEEGDIVTGVYTGAWFWTDDIEDHEEEDDEDFLAEVAEEENEPPGLWSAAYGVGDVPGTWGPDDSDSAQTPEGWGPDPGGLGVLADGSEAKPFLPGREPGANLLSPWAFPAAVAPPAGRPETTCDVCGKVFPHRSRLAKHQRYHAAVKPFGCEECGKGFVYRSHLAIHQRTHTGEKPFPCPDCGKRFVYKSHLVTHRRIHTGERPYRCAFCGAGFGRRSYLVTHQRTHTGERPYPCSHCGRSFSQSSALARHQAVHTADRPHCCPDCGQAFRLRADFQRHRRGGGCAEAGGDGPRREPGETAAAAGPEDTDPGPEGSEVGEADGEAEAAAEEREEAAVAAPTPSGKVDPAPERRFLELGNGLGEGEGPSSHPLGFHFPVHPKSWLHPDSFPILGLPDFRERLPVDGRPLPAPLGGPLSLVEGTGLACDPFGGGGAAGGGGGLRAFGPAIGGLLAEPAPAALAEEESPWICSDCGKTFGRRAALAKHQRYHAGERPHRCADCGKSFVYGSHLARHRRTHTGERPFPCPECGARFARGSHLAAHVRGHTGEKPFVCGVCGAGFSRRAHLTAHGRAHTGERPYACGECGRRFGQSAALTRHQWAHAEEKPHRCPDCGKGFGHSSDFKRHRRTHTGEKPFRCADCGRGFAQRSNLAKHRRGHTGERPFPCPECGKRFSQRSVLVTHQRTHTGERPYACANCGRRFSQSSHLLTHMKTHRGATAAPGSGSAPAPAPKPEAAAKGPSSAGPGERGSALLEFAGGTSFGSEHQAAFAGPSGAYREGVL

SEQ ID NO: 9827 - protein, 234 aa, Homo sapiens
MTSVASLPEQSPGYRCRSLTGAGARTSAAGPLARLLPRRRLPPPHLPARPPGGWSRNQSHQRRGPGRCWGWGRGMTRICPLCPGAPEYINSAVSSQTLSQSCTPPQSPQPDPRPLSLRVGLALPGGRLGCGEAGSANRHWFSFLFPFIHFCWSPRAAAPGVAMNGWMPARWDHQVRRDVAGARGAPPAWGQAPSPRRSVGGPQKTLKRPKACSPRSPQHTPGVFSAPEKLGRKT

SEQ ID NO: 9828 - protein, 340 aa, Homo sapiens
MRLCLIPWNTTPHRVLPPVVWSAPSRKKPVLSARNSMMFGHLSPVRNPRLRGKFNLQLPSLDEQVIPTRLPKMEVRAEEPKEATEVKDQVETQGQEDNKTGPCSNGKAASTSRPLETQGNLTSSWYNPRPLEGNVHLKSLTEKNQTDKAQVHAVSFYSKGHGVTSSHSPAGGILPFGKPDPLPAVLPAPVPDCSLWPEKAALKVLGKDHLPSSPGLLMVGEDMQPKDPAALRSSRSSPPRAAGHRPRKRKLSGPPLQLQQTPPLQLRWDRDEGPPPAKLPCLSPEALLVGKASQREGRLQQGNMRKNVRVLSRTSKFRRLRQLLRRRKKRWQGRRGGSRL

SEQ ID NO: 9829 - protein, 636 aa, Homo sapiens
MAHLMMFRDVAVDFSQEEWECLDLEQRDLYRDVMLENYSNMVSLGFCIYQPEAFSLLEKGKEPWKILRDETRGPCPDMQSRCQTKKLLPKNGIFEREIAQLEIMRICKNHSLDCLCFRGDWEGNTQFQTLQDNQEECFKQVIRTCEKRPTFNQHTVFNLHQRLNTGDKLNEFKELGKAFISGSDHTQHQLIHTSEKFCGDKECGNTFLPDSEVIQYQTVHTVKKTYECKECGKSFSLRSSLTGHKRIHTGEKPFKCKDCGKAFRFHSQLSVHKRIHTGEKSYECKECGKAFSCGSDLTRHQRIHTGEKPYECNECRKAFSQRSHLIKHQRIHTGEKPYECKECGKAFTRGSHLTQHQRIHTGEKSHECKECGKAFIRGSNLAQHQNVHVGRKPYKCEKCGKAYIWSSHLARHQRIHTGRKPYECKQCGKTFTWASYLAQHEKIHNERKSYECKECGKTFLHGSEFNRHQKIHTGERNYECKECGKTFFRGSELNRHQKIHTGKRPYECEECGKAFLWGSQLTRHQRMHTGEEPYVCKECGKSFIWGSQLTRHKKIHTDAEPYGCKKSSHIFSHHSYFTEQKIHNSANLCEWTDYGNTFSHESNFAQHQNIYTFEKSYEFKDFEKAFSSSSHFISLL

SEQ ID NO: 9830 - protein, 538 aa, Homo sapiens
MARELSESTALDAQSTEDQMELLVIKVEEEEAGFPSSPDLGSEGSRERFRGFRYPEAAGPREALSRLRELCRQWLQPEMHSKEQILELLVLEQFLTILPGNLQSWVREQHPESGEEVVVLLEYLERQLDEPAPQVSGVDQGQELLCCKMALLTPAPGSQSSQFQLMKALLKHESVGSQPLQDRVLQVPVLAHGGCCREDKVVASRLTPESQGLLKVEDVALTLTPEWTQQDSSQGNLCRDEKQENHGSLVSLGDEKQTKSRDLPPAEELPEKEHGKISCHLREDIAQIPTCAEAGEQEGRLQRKQKNATGGRRHICHECGKSFAQSSGLSKHRRIHTGEKPYECEECGKAFIGSSALVIHQRVHTGEKPYECEECGKAFSHSSDLIKHQRTHTGEKPYECDDCGKTFSQSCSLLEHHRIHTGEKPYQCSMCGKAFRRSSHLLRHQRIHTGDKNVQEPEQGEAWKSRMESQLENVETPMSYKCNECERSFTQNTGLIEHQKIHTGEKPYQCNACGKGFTRISYLVQHQRSHVGKNILSQ

SEQ ID NO: 9831 - protein, 390 aa, Homo sapiens
MALLTPAPGSQSSQFQLMKALLKHESVGSQPLQDRVLQVPVLAHGGCCREDKVVASRLTPESQGLLKVEDVALTLTPEWTQQDSSQGNLCRDEKQENHGSLVSLGDEKQTKSRDLPPAEELPEKEHGKISCHLREDIAQIPTCAEAGEQEGRLQRKQKNATGGRRHICHECGKSFAQSSGLSKHRRIHTGEKPYECEECGKAFIGSSALVIHQRVHTGEKPYECEECGKAFSHSSDLIKHQRTHTGEKPYECDDCGKTFSQSCSLLEHHRIHTGEKPYQCSMCGKAFRRSSHLLRHQRIHTGDKNVQEPEQGEAWKSRMESQLENVETPMSYKCNECERSFTQNTGLIEHQKIHTGEKPYQCNACGKGFTRISYLVQHQRSHVGKNILSQ

SEQ ID NO: 9832 - protein, 659 aa, Homo sapiens
MRVNHTVSTMLPTCMVHRQTMSCSGAGGITAFVAFRDVAVYFTQEEWRLLSPAQRTLHREVMLETYNHLVSLEIPSSKPKLIAQLERGEAPWREERKCPLDLCPESKPEIQLSPSCPLIFSSQQALSQHVWLSHLSQLFSSLWAGNPLHLGKHYPEDQKQQQDPFCFSGKAEWIQEGEDSRLLFGRVSKNGTSKALSSPPEEQQPAQSKEDNTVVDIGSSPERRADLEETDKVLHGLEVSGFGEIKYEEFGPGFIKESNLLSLQKTQTGETPYMYTEWGDSFGSMSVLIKNPRTHSGGKPYVCRECGRGFTWKSNLITHQRTHSGEKPYVCKDCGRGFTWKSNLFTHQRTHSGLKPYVCKECGQSFSLKSNLITHQRAHTGEKPYVCRECGRGFRQHSHLVRHKRTHSGEKPYICRECEQGFSQKSHLIRHLRTHTGEKPYVCTECGRHFSWKSNLKTHQRTHSGVKPYVCLECGQCFSLKSNLNKHQRSHTGEKPFVCTECGRGFTRKSTLSTHQRTHSGEKPFVCAECGRGFNDKSTLISHQRTHSGEKPFMCRECGRRFRQKPNLFRHKRAHSGAFVCRECGQGFCAKLTLIKHQRAHAGGKPHVCRECGQGFSRQSHLIRHQRTHSGEKPYICRKCGRGFSRKSNLIRHQRTHSG

SEQ ID NO: 9833 - protein, 640 aa, Homo sapiens
MATGLLRAKKEAFVAFRDVAVYFTQEEWRLLSPAQRTLHREVMLETYNHLVSLEIPSSKPKLIAQLERGEAPWREERKCPLDLCPESKPEIQLSPSCPLIFSSQQALSQHVWLSHLSQLFSSLWAGNPLHLGKHYPEDQKQQQDPFCFSGKAEWIQEGEDSRLLFGRVSKNGTSKALSSPPEEQQPAQSKEDNTVVDIGSSPERRADLEETDKVLHGLEVSGFGEIKYEEFGPGFIKESNLLSLQKTQTGETPYMYTEWGDSFGSMSVLIKNPRTHSGGKPYVCRECGRGFTWKSNLITHQRTHSGEKPYVCKDCGRGFTWKSNLFTHQRTHSGLKPYVCKECGQSFSLKSNLITHQRAHTGEKPYVCRECGRGFRQHSHLVRHKRTHSGEKPYICRECEQGFSQKSHLIRHLRTHTGEKPYVCTECGRHFSWKSNLKTHQRTHSGVKPYVCLECGQCFSLKSNLNKHQRSHTGEKPFVCTECGRGFTRKSTLSTHQRTHSGEKPFVCAECGRGFNDKSTLISHQRTHSGEKPFMCRECGRRFRQKPNLFRHKRAHSGAFVCRECGQGFCAKLTLIKHQRAHAGGKPHVCRECGQGFSRQSHLIRHQRTHSGEKPYICRKCGRGFSRKSNLIRHQRTHSG

SEQ ID NO: 9834 - protein, 408 aa, Homo sapiens
MAPPLAPLPPRDPNGAGPEWREPGAVSFADVAVYFCREEWGCLRPAQRALYRDVMRETYGHLSALGIGGNKPALISWVEEEAELWGPAAQDPEVAKCQTQTDPADSRNKKKERQREGTGALEKPDPVAAGSPGLKSPQAPSAGPPYGWEQLSKAPHRGRPSLCAHPPVPRADQRHGCYVCGKSFAWRSTLVEHVYSHTGEKPFHCTDCGKGFGHASSLSKHRAIHRGERPHRCLECGRAFTQRSALTSHLRVHTGEKPYGCADCGRRFSQSSALYQHRRVHSGETPFPCPDCGRAFAYPSDLRRHVRTHTGEKPYPCPDCGRCFRQSSEMAAHRRTHSGEKPYPCPQCGRRFGQKSAVAKHQWVHRPGAGGHRGRVAGRLSVTLTPGHGDLDPPVGFQLYPEIFQECG

SEQ ID NO: 9835 - protein, 407 aa, Homo sapiens
MAPPLAPLPPRDPNGAGPEWREPGAVSFADVAVYFCREEWGCLRPAQRALYRDVMRETYGHLSALGIGGNKPALISWVEEEAELWGPAAQDPEVAKCQTQTDPDSRNKKKERQREGTGALEKPDPVAAGSPGLKSPQAPSAGPPYGWEQLSKAPHRGRPSLCAHPPVPRADQRHGCYVCGKSFAWRSTLVEHVYSHTGEKPFHCTDCGKGFGHASSLSKHRAIHRGERPHRCLECGRAFTQRSALTSHLRVHTGEKPYGCADCGRRFSQSSALYQHRRVHSGETPFPCPDCGRAFAYPSDLRRHVRTHTGEKPYPCPDCGRCFRQSSEMAAHRRTHSGEKPYPCPQCGRRFGQKSAVAKHQWVHRPGAGGHRGRVAGRLSVTLTPGHGDLDPPVGFQLYPEIFQECG

SEQ ID NO: 9836 - protein, 564 aa, Homo sapiens
MRRPSTASLTRTPSRASPTRMPSRASLKMTPFRASLTKMESTALLRTLPRASLMRTPTRASLMRTPPRASPTRKPPRASPRTPSRASPTRRLPRASPMGSPHRASPMRTPPRASPTGTPSTASPTGTPSSASPTGTPPRASPTGTPPRAWATRSPSTASLTRTPSRASLTRWPPRASPTRTPPRESPRMSHRASPTRTPPRASPTRRPPRASPTRTPPRESLRTSHRASPTRMPPRASPTRRPPRASPTGSPPRASPMTPPRASPRTPPRASPTTTPSRASLTRTPSWASPTTTPSRASLMKMESTVSITRTPPRASPTGTPSRASPTGTPSRASLTGSPSRASLTGTPSRASLIGTPSRASLIGTPSRASLTGTPPRASLTGTSSTASLTRTPSRASLTRTQSSSSLTRTPSMASLTRTPPRASLTRTPPRASLTRTPPRASLTRTPPRASLTRTPSMVSLKRSPSRASLTRTPSRASLTMTPSRASLTRTPSTASLTGTPPTASLTRTPPTASLTRSPPTASLTRTPSTASLTRMPSTASLTRKSNVNQQCPASTPSSEVIS

SEQ ID NO: 9837 - protein, 1483 aa, Homo sapiens
MPSEQKQLFCDEKQTTLKKDYDVKNEIVDRSAPKPKISGSIHYALKNVKIDLPKINIPNEVLLKHEVDKYRKLFQSKQQTARKSISIKTVSCVEECTLLHKSERAEEEGVKMSAKILNFSCLKCRDNTRYSPNDLQKHFQMWHHGELPSYPCEMCNFSANDFQVFKQHRRTHRSTLVKCDICNNESVYTLLNLTKHFTSTHCVNGNFQCEKCKFSTQDVGTFVQHIHRHNEIHYKCGKCHHVCFTKGELQKHLHIHSGTFPFTCQYCSYGATRREHLVRHVITLHKEHLYAKEKLEKDKYEKRMAKTSAGLKLILKRYKIGASRKTFWKRKKINSGSDRSIEKNTQVLKKMNKTQTKSEDQSHVVQEHLSEEKDERLHCENNDKAPESESEKPTPLSTGQGNRAEEGPNASSGFMKTAVLGPTLKNVMMKNNKLAVSPNYNATFMGFKMMDGKQHIVLKLVPIKQNVCSPGSQSGAAKDGTANLQPQTLDTNGFLTGVTTELNDTVYMKAATPFSCSSSILSGKASSEKEMTLISQRNNMLQTMDYEKSVSSLSATSELVTASVNLTTKFETRDNVDFWGNHLTQSHPEVLGTTIKSPDKVNCVAKPNAYNSGDMHNYCINYGNCELPVESSNQGSLPFHNYSKVNNSNKRRRFSGTAVYENPQRESSSSKTVVQQPISESFLSLVRQESSKPDSLLASISLLNDKDGTLKAKSEIEEQYVLEKGQNIDGQNLYSNENQNLECATEKSKWEDFSNVDSPMMPRITSVFSLQSQQASEFLPPEVNQLLQDVLKIKPDVKQDSSNTPNKGLPLHCDQSFQKHEREGKIVESSKDFKVQGIFPVPPGSVGINVPTNDLNLKFGKEKQVSSIPQDVRDSEKMPRISGFGTLLKTQSDAIITQQLVKDKLRATTQNLGSFYMQSPLLNSEQKKTIIVQTSKGFLIPLNITNKPGLPVIPGNALPLVNSQGIPASLFVNKKPGMVLTLNNGKLEGVSAVKTEGAPARGTVTKEPCKTPILKVEPNNNCLTPGLCSSIGSCLSMKSSSENTLPLKGPYILKPTSSVKAVLIPNMLSEQQSTKLNISDSVKQQNEIFPKPPLYTFLPDGKQAVFLKCVMPNKTELLKPKLVQNSTYQNIQPKKPEGTPQRILLKIFNPVLNVTAANNLSVSNSASSLQKDNVPSNQIIGGEQKEPESRDALPFLLDDLMPANEIVITSTATCPESSEEPICVSDCSESRVLRCKTNCRIERNFNRKKTSKKIFSKTKTHGSKDSETAFVSRNRNCKRKCRDSYQEPPRRKATLHRKCKEKAKPEDVRETFGFSRPRLSKDSIRTLRLFPFSSKQLVKCPRRNQPVVVLNHPDADAPEVVSVMKTIAKFNGHVLKVSLSKRTINALLKPVCYNPPKTTYDDFSKRHKTFKPVSSVKERFVLKLTLKKTSKNNYQIVKTTSENILKAKFNCWFCGRVFDNQDTWAGHGQRHLMEATRDWNMLE

SEQ ID NO: 9838 - protein, 953 aa, Homo sapiens
MTLISQRNNMLQTMDYEKSVSSLSATSELVTASVNLTTKFETRDNVDFWGNHLTQSHPEVLGTTIKSPDKVNCVAKPNAYNSGDMHNYCINYGNCELPVESSNQGSLPFHNYSKVNNSNKRRRFSGTAVYENPQRESSSSKTVVQQPISESFLSLVRQESSKPDSLLASISLLNDKDGTLKAKSEIEEQYVLEKGQNIDGQNLYSNENQNLECATEKSKWEDFSNVDSPMMPRITSVFSLQSQQASEFLPPEVNQLLQDVLKIKPDVKQDSSNTPNKGLPLHCDQSFQKHEREGKIVESSKDFKVQGIFPVPPGSVGINVPTNDLNLKFGKEKQVSSIPQDVRDSEKMPRISGFGTLLKTQSDAIITQQLVKDKLRATTQNLGSFYMQSPLLNSEQKKTIIVQTSKGFLIPLNITNKPGLPVIPGNALPLVNSQGIPASLFVNKKPGMVLTLNNGKLEGVSAVKTEGAPARGTVTKEPCKTPILKVEPNNNCLTPGLCSSIGSCLSMKSSSENTLPLKGPYILKPTSSVKAVLIPNMLSEQQSTKLNISDSVKQQNEIFPKPPLYTFLPDGKQAVFLKCVMPNKTELLKPKLVQNSTYQNIQPKKPEGTPQRILLKIFNPVLNVTAANNLSVSNSASSLQKDNVPSNQIIGGEQKEPESRDALPFLLDDLMPANEIVITSTATCPESSEEPICVSDCSESRVLRCKTNCRIERNFNRKKTSKKIFSKTKTHGSKDSETAFVSRNRNCKRKCRDSYQEPPRRKATLHRKCKEKAKPEDVRETFGFSRPRLSKDSIRTLRLFPFSSKQLVKCPRRNQPVVVLNHPDADAPEVVSVMKTIAKFNGHVLKVSLSKRTINALLKPVCYNPPKTTYDDFSKRHKTFKPVSSVKERFVLKLTLKKTSKNNYQIVKTTSENILKAKFNCWFCGRVFDNQDTWAGHGQRHLMEATRDWNMLE

SEQ ID NO: 9839 - protein, 223 aa, Homo sapiens
MSDEEARQSGGSSQAGVVTVSDVQELMRRKEEIEAQIKANYDVLESQKGIGMNEPLVDCEGYPRSDVDLYQVRTARHNIICLQNDHKAVMKQVEEALHQLHARDKEKQARDMAEAHKEAMSRKLGQSESQGPPRAFAKVNSISPGSPASIAGLQVDDEIVEFGSVNTQNFQSLHNIGSVVQHSEGKPLNVTVIRRGEKHQLRLVPTRWAGKGLLGCNIIPLQR

SEQ ID NO: 9840 - protein, 209 aa, Homo sapiens
MSDEEARQSGGSSQAGVVTVSDVQELMRRKEEIEAQIKANYDVLESQKGIGMNEPLVDCEGYPRSDVDLYQVRTARHNIICLQNDHKAVMKQVEEALHQLHARDKEKQARDMAEAHKEAMSRKLGQSESQGPPRAFAKVNSISPGSPASIAGLQVDDEIVEFGSVNTQNFQSLHNIGSVVQHSEGALAPTILLSVSMNLTTPGTSSRSP

SEQ ID NO: 9841 - protein, 118 aa, Homo sapiens
MSDEEARQSGGSSQAGVVTVSDVQELMRRKEEIEAQIKANYDVLESGLQVDDEIVEFGSVNTQNFQSLHNIGSVVQHSEGKPLNVTVIRRGEKHQLRLVPTRWAGKGLLGCNIIPLQR

SEQ ID NO: 9842 - protein, 395 aa, Homo sapiens
MAWRHLKKRAQDAVIILGGGGLLFASYLMATGDERFYAEHLMPTLQGLLDPESAHRLAVRFTSLGLLPRARFQDSDMLEVRVLGHKFRNPVGIAAGFDKHGEAVDGLYKMGFGFVEIGSVTPKPQEGNPRPRVFRLPEDQAVINRYGFNSHGLSVVEHRLRARQQKQAKLTEDGLPLGVNLGKNKTSVDAAEDYAEGVRVLGPLADYLVVNVSSPNTAGLRSLQGKAELRRLLTKVLQERDGLRRVHRPAVLVKIAPDLTSQDKEDIASVVKELGIDGLIVTNTTVSRPAGLQGALRSETGGLSGKPLRDLSTQTIREMYALTQGRVPIIGVGGVSSGQDALEKIRAGASLVQLYTALTFWGPPVVGKVKRELEALLKEQGFGGVTDAIGADHRR

SEQ ID NO: 9843 - protein, 932 aa, Homo sapiens
MAVVIRLQGLPIVAGTMDIRHFFSGLTIPDGGVHIVGGELGEAFIVFATDEDARLGMMRTGGTIKGSKVTLLLSSKTEMQNMIELSRRRFETANLDIPPANASRSGPPPSSGMSSRVNLPTTVSNFNNPSPSVVTATTSVHESNKNIQTFSTASVGTAPPNMGASFGSPTFSSTVPSTASPMNTVPPPPIPPIPAMPSLPPMPSIPPIPVPPPVPTLPPVPPVPPIPPVPSVPPMTPLPPMSGMPPLNPPPVAPLPAGMNGSGAPMNLNNNLNPMFLGPLNPVNPIQMNSQSSVKPLPINPDDLYVSVHGMPFSAMENDVRDFFHGLRVDAVHLLKDHVGRNNGNGLVKFLSPQDTFEALKRNRMLMIQRYVEVSPATERQWVAAGGHITFKQNMGPSGQTHPPPQTLPRSKSPSGQKRSRSRSPHEAGFCVYLKGLPFEAENKHVIDFFKKLDIVEDSIYIAYGPNGKATGEGFVEFRNEADYKAALCRHKQYMGNRFIQVHPITKKGMLEKIDMIRKRLQNFSYDQREMILNPEGDVNSAKVCAHITNIPFSITKMDVLQFLEGIPVDENAVHVLVDNNGQGLGQALVQFKNEDDARKSERLHRKKLNGREAFVHVVTLEDMREIEKNPPAQGKKGLKMPVPGNPAVPGMPNAGLPGVGLPSAGLPGAGLPSTGLPGSAITSAGLPGAGMPSAGIPSAGGEEHAFLTVGSKEANNGPPFNFPGNFGGSNAFGPPIPPPGLGGGAFGDARPGMPSVGNSGLPGLGLDVPGFGGGPNNLSGPSGFGGGPQNFGNGPGSLGGPPGFGSGPPGLGSAPGHLGGPPAFGPGPGPGPGPGPIHIGGPPGFASSSGKPGPTVIKVQNMPFTVSIDEILDFFYGYQVIPGSVCLKYNEKGMPTGEAMVAFESRDEATAAVIDLNDRPIGSRKVKLVLG

SEQ ID NO: 9844 - protein, 326 aa, Homo sapiens
MDYSHQTSLVPCGQDKYISKNELLLHLKTYNLYYEGQNLQLRHREEEDEFIVEGLLNISWGLRRPIRLQMQDDNERIRPPPSSSSWHSGCNLGAQGTTLKPLTVPKVQISEVDAPPEGDQMPSSTDSRGLKPLQEDTPQLMRTRSDVGVRRRGNVRTPSDQRRIRRHRFSINGHFYNHKTSVFTPAYGSVTNVRINSTMTTPQVLKLLLNKFKIENSAEEFALYVVHTSGEKQKLKATDYPLIARILQGPCEQISKVFLMEKDQVEEVTYDVAQYIKFEMPVLKSFIQKLQEEEDREVKKLMRKYTVLRLMIRQRLEEIAETPATI

SEQ ID NO: 9845 - protein, 157 aa, Homo sapiens
MSLNWNLTLQNEWPLLEFSKTTLKPLTVPKVQISEVDAPPEGDQMPSSTDSRGLKPLQEDTPQLMRTRSDVGVRRRGNVRTPSDQRRIRRHRFSINGHFYNHKTSVFTPAYGSVTNVRINSTMTTPQVLKLLLNKFKIENSAEEFALYVVHTSGGPM

SEQ ID NO: 9846 - protein, 843 aa, Homo sapiens
MSFPPHLNRPPMGIPALPPGIPPPQFPGFPPPVPPGTPMIPVPMSIMAPAPTVLVPTVSMVGKHLGARKDHPGLKAKENDENCGPTTTVFVGNISEKASDMLIRQLLAKCGLVLSWKRVQGASGKLQAFGFCEYKEPESTLRALRLLHDLQIGEKKLLVKVDAKTKAQLDEWKAKKKASNGNARPETVTNDDEEALDEETKRRDQMIKGAIEVLIREYSSELNAPSQESDSHPRKKKKEKKEDIFRRFPVAPLIPYPLITKEDINAIEMEEDKRDLISREISKFRDTHKKLEEEKGKKEKERQEIEKERRERERERERERERREREREREREREREKEKERERERERDRDRDRTKERDRDRDRERDRDRDRERSSDRNKDRSRSREKSRDREREREREREREREREREREREREREREREREREREKDKKRDREEDEEDAYERRKLERKLREKEAAYQERLKNWEIRERKKTREYEKEAEREEERRREMAKEAKRLKEFLEDYDDDRDDPKYYRGSALQKRLRDREKEMEADERDRKREKEELEEIRQRLLAEGHPDPDAELQRMEQEAERRRQPQIKQEPESEEEEEEKQEKEEKREEPMEEEEEPEQKPCLKPTLRPISSAPSVSSASGNATPNTPGDESPCGIIIPHENSPDQQQPEEHRPKIGLSLKLGASNSPGQPNSVKRKKLPVDSVFNKFEDEDSDDVPRKRKLVPLDYGEDDKNATKGTVNTEEKRKHIKSLIEKIPTAKPELFAYPLDWSIVDSILMERRIRPWINKKIIEYIGEEEATLVDFVCSKVMAHSSPQSILDDVAMVLDEEAEVFIVKMWRLLIYETEAKKIGLVK

SEQ ID NO: 9847 - protein, 294 aa, Homo sapiens
MSFPPHLNRPPMGIPALPPGIPPPQFPGFPPPVPPGTPMIPVPMSIMAPAPTVLVPTVSMVGKHLGARKDHPGLKAKENDENCGPTTTVFVGNISEKASDMLIRQLLAKCGLVLSWKRVQGASGKLQAFGFCEYKEPESTLRALRLLHDLQIGEKKLLVKVDAKTKAQLDEWKAKKKASNGNARPETVTNDDEEALDEETKRRDQMIKGAIEVLIREYSSELNAPSQESDSHPRKKKKEKKEDIFRRFPVAPLIPYPLITKEDINAIEMEEDKRDLISREISKFRDTHKRSYGD

SEQ ID NO: 9848 - protein, 300 aa, Homo sapiens
MSFPPHLNRPPMGIPALPPGIPPPQFPGFPPPVPPGTPMIPVPMSIMAPAPTVLVPTVSMVGKHLGARKDHPGLKAKENDENCGPTTTVFVGNISEKASDMLIRQLLAKCGLVLSWKRVQGASGKLQAFGFCEYKEPESTLRALRLLHDLQIGEKKLLVKVDAKTKAQLDEWKAKKKASNGNARPETVTNDDEEALDEETKRRDQMIKGAIEVLIREYSSELNAPSQESDSHPRKKKKEKKEDIFRRFPVAPLIPYPLITKEDINAIEMEEDKRDLISREISKFRDTHKVVFLSFHLIPI

SEQ ID NO: 9849 - protein, 164 aa, Homo sapiens
MSFPPHLNRPPMGIPALPPGIPPPQFPGFPPPVPPGTPMIPVPMSIMAPAPTVLVPTVSMVGKHLGARKDHPGLKAKENDENCGPTTTVFVGNISEKASDMLIRQLLAPSDSVSTRSQNLPSVHSDYYMTCKLERKSYSLKLMQRQRHSWMNGKQRRKLLMGLG

SEQ ID NO: 9850 - protein, 577 aa, Homo sapiens
MEGSGGGAGERAPLLGARRAAAAAAAAGAFAGRRAACGAVLLTELLERAAFYGITSNLVLFLNGAPFCWEGAQASEALLLFMGLTYLGSPFGGWLADARLGRARAILLSLALYLLGMLAFPLLAAPATRAALCGSARLLNCTAPGPDAAARCCSPATFAGLVLVGLGVATVKANITPFGADQVKDRGPEATRRFFNWFYWSINLGAILSLGGIAYIQQNVSFVTGYAIPTVCVGLAFVVFLCGQSVFITKPPDGSAFTDMFKILTYSCCSQKRSGERQSNGEGIGVFQQSSKQSLFDSCKMSHGGPFTEEKVEDVKALVKIVPVFLALIPYWTVYFQMQTTYVLQSLHLRIPEISNITTTPHTLPAAWLTMFDAVLILLLIPLKDKLVDPILRRHGLLPSSLKRIAVGMFFVMCSAFAAGILESKRLNLVKEKTINQTIGNVVYHAADLSLWWQVPQYLLIGISEIFASIAGLEFAYSAAPKSMQSAIMGLFFFFSGVGSFVGSGLLALVSIKAIGWMSSHTDFGNINGCYLNYYFFLLAAIQGATLLLFLIISVKYDHHRDHQRSRANGVPTSRRA

SEQ ID NO: 9851 - protein, 240 aa, Homo sapiens
MQTTYVLQSLHLRIPEISNITTTPHTLPAAWLTMFDAVLILLLIPLKDKLVDPILRRHGLLPSSLKRIAVGMFFVMCSAFAAGILESKRLNLVKEKTINQTIGNVVYHAADLSLWWQVPQYLLIGISEIFASIAGLEFAYSAAPKSMQSAIMGLFFFFSGVGSFVGSGLLALVSIKAIGWMSSHTDFGNINGCYLNYYFFLLAAIQGATLLLFLIISVKYDHHRDHQRSRANGVPTSRRA

SEQ ID NO: 9852 - protein, 578 aa, Homo sapiens
MACGFRRAIACQLSRVLNLPPENLITSISAVPISQKEEVADFQLSVDSLLEKDNDHSRPDIQVQAKRLAEKLRCDTVVSEISTGQRTVNFKINRELLTKTVLQQVIEDGSKYGLKSELFSGLPQKKIVVEFSSPNVAKKFHVGHLRSTIIGNFIANLKEALGHQVIRINYLGDWGMQFGLLGTGFQLFGYEEKLQSNPLQHLFEVYVQVNKEAADDKSVAKAAQEFFQRLELGDVQALSLWQKFRDLSIEEYIRVYKRLGVYFDEYSGESFYREKSQEVLKLLESKGLLLKTIKGTAVVDLSGNGDPSSICTVMRSDGTSLYATRDLAAAIDRMDKYNFDTMIYVTDKGQKKHFQQVFQMLKIMGYDWAERCQHVPFGVVQGMKTRRGDVTFLEDVLNEIQLRMLQNMASIKTTKELKNPQETAERVGLAALIIQDFKGLLLSDYKFSWDRVFQSRGDTGVFLQYTHARLHSLEETFGCGYLNDFNTACLQEPQSVSILQHLLRFDEVLYKSSQDFQPRHIVSYLLTLSHLAAVAHKTLQIKDSPPEVAGARLHLFKAVRSVLANGMKLLGITPVCRM

SEQ ID NO: 9853 - protein, 1872 aa, Homo sapiens
MGPGCDLLLRTAATITAAAIMSDTDSDEDSAGGGPFSLAGFLFGNINGAGQLEGESVLDDECKKHLAGLGALGLGSLITELTANEELTGTDGALVNDEGWVRSTEDAVDYSDINEVAEDESRRYQQTMGSLQPLCHSDYDEDDYDADCEDIDCKLMPPPPPPPGPMKKDKDQDSITGEKVDFSSSSDSESEMGPQEATQAESEDGKLTLPLAGIMQHDATKLLPSVTELFPEFRPGKVLRFLRLFGPGKNVPSVWRSARRKRKKKHRELIQEEQIQEVECSVESEVSQKSLWNYDYAPPPPPEQCLSDDEITMMAPVESKFSQSTGDIDKVTDTKPRVAEWRYGPARLWYDMLGVPEDGSGFDYGFKLRKTEHEPVIKSRMIEEFRKLEENNGTDLLADENFLMVTQLHWEDDIIWDGEDVKHKGTKPQRASLAGWLPSSMTRNAMAYNVQQGFAATLDDDKPWYSIFPIDNEDLVYGRWEDNIIWDAQAMPRLLEPPVLTLDPNDENLILEIPDEKEEATSNSPSKESKKESSLKKSRILLGKTGVIKEEPQQNMSQPEVKDPWNLSNDEYYYPKQQGLRGTFGGNIIQHSIPAVELRQPFFPTHMGPIKLRQFHRPPLKKYSFGALSQPGPHSVQPLLKHIKKKAKMREQERQASGGGEMFFMRTPQDLTGKDGDLILAEYSEENGPLMMQVGMATKIKNYYKRKPGKDPGAPDCKYGETVYCHTSPFLGSLHPGQLLQAFENNLFRAPIYLHKMPETDFLIIRTRQGYYIRELVDIFVVGQQCPLFEVPGPNSKRANTHIRDFLQVFIYRLFWKSKDRPRRIRMEDIKKAFPSHSESSIRKRLKLCADFKRTGMDSNWWVLKSDFRLPTEEEIRAMVSPEQCCAYYSMIAAEQRLKDAGYGEKSFFAPEEENEEDFQMKIDDEVRTAPWNTTRAFIAAMKGKCLLEVTGVADPTGCGEGFSYVKIPNKPTQQKDDKEPQPVKKTVTGTDADLRRLSLKNAKQLLRKFGVPEEEIKKLSRWEVIDVVRTMSTEQARSGEGPMSKFARGSRFSVAEHQERYKEECQRIFDLQNKVLSSTEVLSTDTDSSSAEDSDFEEMGKNIENMLQNKKTSSQLSREREEQERKELQRMLLAAGSAASGNNHRDDDTASVTSLNSSATGRCLKIYRTFRDEEGKEYVRCETVRKPAVIDAYVRIRTTKDEEFIRKFALFDEQHREEMRKERRRIQEQLRRLKRNQEKEKLKGPPEKKPKKMKERPDLKLKCGACGAIGHMRTNKFCPLYYQTNAPPSNPVAMTEEQEEELEKTVIHNDNEELIKVEGTKIVLGKQLIESADEVRRKSLVLKFPKQQLPPKKKRRVGTTVHCDYLNRPHKSIHRRRTDPMVTLSSILESIINDMRDLPNTYPFHTPVNAKVVKDYYKIITRPMDLQTLRENVRKRLYPSREEFREHLELIVKNSATYNGPKHSLTQISQSMLDLCDEKLKEKEDKLARLEKAINPLLDDDDQVAFSFILDNIVTQKMMAVPDSWPFHHPVNKKFVPDYYKVIVNPMDLETIRKNISKHKYQSRESFLDDVNLILANSVKYNGPESQYTKTAQEIVNVCYQTLTEYDEHLTQLEKDICTAKEAALEEAELESLDPMTPGPYTPQPPDLYDTNTSLSMSRDASVFQDESNMSVLDIPSATPEKQVTQEGEDGDGDLADEEEGTVQQPQASVLYEDLLMSEGEDDEEDAGSDEEGDNPFSAIQLSESGSDSDVGSGGIRPKQPRMLQENTRMDMENEESMMSYEGDGGEASHGLEDSNISYGSYEEPDPKSNTQDTSFSSIGGYEVSEEEEDEEEEEQRSGPSVLSQVHLSEDEEDSEDFHSIAGDSDLDSDE

SEQ ID NO: 9854 - protein, 1893 aa, Homo sapiens
MGPGCDLLLRTAATITAAAIMSDTDSDEDSAGGGPFSLAGFLFGNINGAGQLEGESVLDDECKKHLAGLGALGLGSLITELTANEELTGTDGALVNDEGWVRSTEDAVDYSDINEVAEDESRRYQQTMGSLQPLCHSDYDEDDYDADCEDIDCKLMPPPPPPPGPMKKDKDQDSITGVSENGEGIILPSIIAPSSLASEKVDFSSSSDSESEMGPQEATQAESEDGKLTLPLAGIMQHDATKLLPSVTELFPEFRPGKVLRFLRLFGPGKNVPSVWRSARRKRKKKHRELIQEEQIQEVECSVESEVSQKSLWNYDYAPPPPPEQCLSDDEITMMAPVESKFSQSTGDIDKVTDTKPRVAEWRYGPARLWYDMLGVPEDGSGFDYGFKLRKTEHEPVIKSRMIEEFRKLEENNGTDLLADENFLMVTQLHWEDDIIWDGEDVKHKGTKPQRASLAGWLPSSMTRNAMAYNVQQGFAATLDDDKPWYSIFPIDNEDLVYGRWEDNIIWDAQAMPRLLEPPVLTLDPNDENLILEIPDEKEEATSNSPSKESKKESSLKKSRILLGKTGVIKEEPQQNMSQPEVKDPWNLSNDEYYYPKQQGLRGTFGGNIIQHSIPAVELRQPFFPTHMGPIKLRQFHRPPLKKYSFGALSQPGPHSVQPLLKHIKKKAKMREQERQASGGGEMFFMRTPQDLTGKDGDLILAEYSEENGPLMMQVGMATKIKNYYKRKPGKDPGAPDCKYGETVYCHTSPFLGSLHPGQLLQAFENNLFRAPIYLHKMPETDFLIIRTRQGYYIRELVDIFVVGQQCPLFEVPGPNSKRANTHIRDFLQVFIYRLFWKSKDRPRRIRMEDIKKAFPSHSESSIRKRLKLCADFKRTGMDSNWWVLKSDFRLPTEEEIRAMVSPEQCCAYYSMIAAEQRLKDAGYGEKSFFAPEEENEEDFQMKIDDEVRTAPWNTTRAFIAAMKGKCLLEVTGVADPTGCGEGFSYVKIPNKPTQQKDDKEPQPVKKTVTGTDADLRRLSLKNAKQLLRKFGVPEEEIKKLSRWEVIDVVRTMSTEQARSGEGPMSKFARGSRFSVAEHQERYKEECQRIFDLQNKVLSSTEVLSTDTDSSSAEDSDFEEMGKNIENMLQNKKTSSQLSREREEQERKELQRMLLAAGSAASGNNHRDDDTASVTSLNSSATGRCLKIYRTFRDEEGKEYVRCETVRKPAVIDAYVRIRTTKDEEFIRKFALFDEQHREEMRKERRRIQEQLRRLKRNQEKEKLKGPPEKKPKKMKERPDLKLKCGACGAIGHMRTNKFCPLYYQTNAPPSNPVAMTEEQEEELEKTVIHNDNEELIKVEGTKIVLGKQLIESADEVRRKSLVLKFPKQQLPPKKKRRVGTTVHCDYLNRPHKSIHRRRTDPMVTLSSILESIINDMRDLPNTYPFHTPVNAKVVKDYYKIITRPMDLQTLRENVRKRLYPSREEFREHLELIVKNSATYNGPKHSLTQISQSMLDLCDEKLKEKEDKLARLEKAINPLLDDDDQVAFSFILDNIVTQKMMAVPDSWPFHHPVNKKFVPDYYKVIVNPMDLETIRKNISKHKYQSRESFLDDVNLILANSVKYNGPESQYTKTAQEIVNVCYQTLTEYDEHLTQLEKDICTAKEAALEEAELESLDPMTPGPYTPQPPDLYDTNTSLSMSRDASVFQDESNMSVLDIPSATPEKQVTQEGEDGDGDLADEEEGTVQQPQASVLYEDLLMSEGEDDEEDAGSDEEGDNPFSAIQLSESGSDSDVGSGGIRPKQPRMLQENTRMDMENEESMMSYEGDGGEASHGLEDSNISYGSYEEPDPKSNTQDTSFSSIGGYEVSEEEEDEEEEEQRSGPSVLSQVHLSEDEEDSEDFHSIAGDSDLDSDE

SEQ ID NO: 9855 - protein, 1832 aa, Homo sapiens
MGPGCDLLLRTAATITAAAIMSDTDSDEDSAGGGPFSLAGFLFGNINGAGQLEGESVLDDECKKHLAGLGALGLGSLITELTANEELTGTDGALVNDEGWVRSTEDAVDYSDINEVAEDESRRYQQTMGSLQPLCHSDYDEDDYDADCEDIDCKLMPPPPPPPGPMKKDKDQDSITGEKVDFSSSSDSESEMGPQEATQAESEDGKLTLPLAGIMQHDATKLLPSVTELFPEFRPGKVLRFLRLFGPGKNVPSVWRSARRKRKKKHRELIQEEQIQEVECSVESEVSQKSLWNYDYAPPPPPEQCLSDDEITMMAPVESKFSQSTGDIDKVTDTKPRVAEWRYGPARLWYDMLGVPEDGSGFDYGFKLRKTEHEPVIKSRMIEEFRKLEENNGTDLLADENFLMVTQLHWEDDIIWDGEDVKHKGTKPQRASLAGWLPSSMTRNAMAYNVQQGFAATLDDDKPWYSIFPIDNEDLVYGRWEDNIIWDAQAMPRLLEPPVLTLDPNDENLILEIPDEKEEATSNSPSKESKKESSLKKSRILLGKTGVIKEEPQQNMSQPEVKDPWNLSNDEYYYPKQQGLRGTFGGNIIQHSIPAVELRQPFFPTHMGPIKLRQFHRPPLKKYSFGALSQPGPHSVQPLLKHIKKKAKMREQERQASGGGEMFFMRTPQDLTGKDGDLILAEYSEENGPLMMQVGMATKIKNYYKRKPGKDPGAPDCKYGETVYCHTSPFLGSLHPGQLLQAFENNLFRAPIYLHKMPETDFLIIRTRQGYYIRELVDIFVVGQQCPLFEVPGPNSKRANTHIRDFLQVFIYRLFWKSKDRPRRIRMEDIKKAFPSHSESSIRKRLKLCADFKRTGMDSNWWVLKSDFRLPTEEEIRAMVSPEQCCAYYSMIAAEQRLKDAGYGEKSFFAPEEENEEDFQMKIDDEVRTAPWNTTRAFIAAMKGKCLLEVTGVADPTGCGEGFSYVKIPNKPTQQKDDKEPQPVKKTVTGTDADLRRLSLKNAKQLLRKFGVPEEEIKKLSRWEVIDVVRTMSTEQARSGEGPMSKFARGSRFSVAEHQERYKEECQRIFDLQNKVLSSTEVLSTDTDSSSAEDSDFEEMGKNIENMLQNKKTSSQLSREREEQERKELQRMLLAAGSAASGNNHRDDDTASVTSLNSSATGRCLKIYRTFRDEEGKEYVRCETVRKPAVIDAYVRIRTTKDEEFIRKFALFDEQHREEMRKERRRIQEQLRRLKRNQEKEKLKGPPEKKPKKMKERPDLKLKCGACGAIGHMRTNKFCPLYYQTNAPPSNPVAMTEEQEEELEKTVIHNDNEELIKVEGTKIVLGKQLIESADEVRRKSLVLKFPKQQLPPKKKRRVGTTVHCDYLNRPHKSIHRRRTDPMVTLSSILESIINDMRDLPNTYPFHTPVNAKVVKDYYKIITRPMDLQTLRENVRKRLYPSREEFREHLELIVKNSATYNGPKHSLTQISQSMLDLCDEKLKEKEDKLARLEKAINPLLDDDDQVAFSFILDNIVTQKMMAVPDSWPFHHPVNKKFVPDYYKVIVNPMDLETIRKNISKHKYQSRESFLDDVNLILANSVKYNGPESQYTKTAQEIVNVCYQTLTEYDEHLTQLEKDICTAKEAALEEAELESLDPMTPGPYTPQPPDLYDTNTSLSMSRDASVFQDESNMSVLDIPSATPEKQMRQGRGRLGEEDSDVDIEGYDDEEEDGKPKTPAPEGEDGDGDLADEEEGTVQQPQASVLYEDLLMSEGEDDEEDAGSDEEGDNPFSAIQLSESGSDSDVGSGGIRPKQPRMLQENTRMDMENEESMMSYEGDGGEASHGLEDSNIRYQ

SEQ ID NO: 9856 - protein, 1906 aa, Homo sapiens
MGPGCDLLLRTAATITAAAIMSDTDSDEDSAGGGPFSLAGFLFGNINGAGQLEGESVLDDECKKHLAGLGALGLGSLITELTANEELTGTDGALVNDEGWVRSTEDAVDYSDINEVAEDESRRYQQTMGSLQPLCHSDYDEDDYDADCEDIDCKLMPPPPPPPGPMKKDKDQDSITGEKVDFSSSSDSESEMGPQEATQAESEDGKLTLPLAGIMQHDATKLLPSVTELFPEFRPGKVLRFLRLFGPGKNVPSVWRSARRKRKKKHRELIQEEQIQEVECSVESEVSQKSLWNYDYAPPPPPEQCLSDDEITMMAPVESKFSQSTGDIDKVTDTKPRVAEWRYGPARLWYDMLGVPEDGSGFDYGFKLRKTEHEPVIKSRMIEEFRKLEENNGTDLLADENFLMVTQLHWEDDIIWDGEDVKHKGTKPQRASLAGWLPSSMTRNAMAYNVQQGFAATLDDDKPWYSIFPIDNEDLVYGRWEDNIIWDAQAMPRLLEPPVLTLDPNDENLILEIPDEKEEATSNSPSKESKKESSLKKSRILLGKTGVIKEEPQQNMSQPEVKDPWNLSNDEYYYPKQQGLRGTFGGNIIQHSIPAVELRQPFFPTHMGPIKLRQFHRPPLKKYSFGALSQPGPHSVQPLLKHIKKKAKMREQERQASGGGEMFFMRTPQDLTGKDGDLILAEYSEENGPLMMQVGMATKIKNYYKRKPGKDPGAPDCKYGETVYCHTSPFLGSLHPGQLLQAFENNLFRAPIYLHKMPETDFLIIRTRQGYYIRELVDIFVVGQQCPLFEVPGPNSKRANTHIRDFLQVFIYRLFWKSKDRPRRIRMEDIKKAFPSHSESSIRKRLKLCADFKRTGMDSNWWVLKSDFRLPTEEEIRAMVSPEQCCAYYSMIAAEQRLKDAGYGEKSFFAPEEENEEDFQMKIDDEVRTAPWNTTRAFIAAMKGKCLLEVTGVADPTGCGEGFSYVKIPNKPTQQKDDKEPQPVKKTVTGTDADLRRLSLKNAKQLLRKFGVPEEEIKKLSRWEVIDVVRTMSTEQARSGEGPMSKFARGSRFSVAEHQERYKEECQRIFDLQNKVLSSTEVLSTDTDSSSAEDSDFEEMGKNIENMLQNKKTSSQLSREREEQERKELQRMLLAAGSAASGNNHRDDDTASVTSLNSSATGRCLKIYRTFRDEEGKEYVRCETVRKPAVIDAYVRIRTTKDEEFIRKFALFDEQHREEMRKERRRIQEQLRRLKRNQEKEKLKGPPEKKPKKMKERPDLKLKCGACGAIGHMRTNKFCPLYYQTNAPPSNPVAMTEEQEEELEKTVIHNDNEELIKVEGTKIVLGKQLIESADEVRRKSLVLKFPKQQLPPKKKRRVGTTVHCDYLNRPHKSIHRRRTDPMVTLSSILESIINDMRDLPNTYPFHTPVNAKVVKDYYKIITRPMDLQTLRENVRKRLYPSREEFREHLELIVKNSATYNGPKHSLTQISQSMLDLCDEKLKEKEDKLARLEKAINPLLDDDDQVAFSFILDNIVTQKMMAVPDSWPFHHPVNKKFVPDYYKVIVNPMDLETIRKNISKHKYQSRESFLDDVNLILANSVKYNGPESQYTKTAQEIVNVCYQTLTEYDEHLTQLEKDICTAKEAALEEAELESLDPMTPGPYTPQPPDLYDTNTSLSMSRDASVFQDESNMSVLDIPSATPEKQVTQMRQGRGRLGEEDSDVDIEGYDDEEEDGKPKTPAPEGEDGDGDLADEEEGTVQQPQASVLYEDLLMSEGEDDEEDAGSDEEGDNPFSAIQLSESGSDSDVGSGGIRPKQPRMLQENTRMDMENEESMMSYEGDGGEASHGLEDSNISYGSYEEPDPKSNTQDTSFSSIGGYEVSEEEEDEEEEEQRSGPSVLSQVHLSEDEEDSEDFHSIAGDSDLDSDE

SEQ ID NO: 9857 - protein, 1835 aa, Homo sapiens
MGPGCDLLLRTAATITAAAIMSDTDSDEDSAGGGPFSLAGFLFGNINGAGQLEGESVLDDECKKHLAGLGALGLGSLITELTANEELTGTDGALVNDEGWVRSTEDAVDYSDINEVAEDESRRYQQTMGSLQPLCHSDYDEDDYDADCEDIDCKLMPPPPPPPGPMKKDKDQDSITGEKVDFSSSSDSESEMGPQEATQAESEDGKLTLPLAGIMQHDATKLLPSVTELFPEFRPGKVLRFLRLFGPGKNVPSVWRSARRKRKKKHRELIQEEQIQEVECSVESEVSQKSLWNYDYAPPPPPEQCLSDDEITMMAPVESKFSQSTGDIDKVTDTKPRVAEWRYGPARLWYDMLGVPEDGSGFDYGFKLRKTEHEPVIKSRMIEEFRKLEENNGTDLLADENFLMVTQLHWEDDIIWDGEDVKHKGTKPQRASLAGWLPSSMTRNAMAYNVQQGFAATLDDDKPWYSIFPIDNEDLVYGRWEDNIIWDAQAMPRLLEPPVLTLDPNDENLILEIPDEKEEATSNSPSKESKKESSLKKSRILLGKTGVIKEEPQQNMSQPEVKDPWNLSNDEYYYPKQQGLRGTFGGNIIQHSIPAVELRQPFFPTHMGPIKLRQFHRPPLKKYSFGALSQPGPHSVQPLLKHIKKKAKMREQERQASGGGEMFFMRTPQDLTGKDGDLILAEYSEENGPLMMQVGMATKIKNYYKRKPGKDPGAPDCKYGETVYCHTSPFLGSLHPGQLLQAFENNLFRAPIYLHKMPETDFLIIRTRQGYYIRELVDIFVVGQQCPLFEVPGPNSKRANTHIRDFLQVFIYRLFWKSKDRPRRIRMEDIKKAFPSHSESSIRKRLKLCADFKRTGMDSNWWVLKSDFRLPTEEEIRAMVSPEQCCAYYSMIAAEQRLKDAGYGEKSFFAPEEENEEDFQMKIDDEVRTAPWNTTRAFIAAMKGKCLLEVTGVADPTGCGEGFSYVKIPNKPTQQKDDKEPQPVKKTVTGTDADLRRLSLKNAKQLLRKFGVPEEEIKKLSRWEVIDVVRTMSTEQARSGEGPMSKFARGSRFSVAEHQERYKEECQRIFDLQNKVLSSTEVLSTDTDSSSAEDSDFEEMGKNIENMLQNKKTSSQLSREREEQERKELQRMLLAAGSAASGNNHRDDDTASVTSLNSSATGRCLKIYRTFRDEEGKEYVRCETVRKPAVIDAYVRIRTTKDEEFIRKFALFDEQHREEMRKERRRIQEQLRRLKRNQEKEKLKGPPEKKPKKMKERPDLKLKCGACGAIGHMRTNKFCPLYYQTNAPPSNPVAMTEEQEEELEKTVIHNDNEELIKVEGTKIVLGKQLIESADEVRRKSLVLKFPKQQLPPKKKRRVGTTVHCDYLNRPHKSIHRRRTDPMVTLSSILESIINDMRDLPNTYPFHTPVNAKVVKDYYKIITRPMDLQTLRENVRKRLYPSREEFREHLELIVKNSATYNGPKHSLTQISQSMLDLCDEKLKEKEDKLARLEKAINPLLDDDDQVAFSFILDNIVTQKMMAVPDSWPFHHPVNKKFVPDYYKVIVNPMDLETIRKNISKHKYQSRESFLDDVNLILANSVKYNGPESQYTKTAQEIVNVCYQTLTEYDEHLTQLEKDICTAKEAALEEAELESLDPMTPGPYTPQPPDLYDTNTSLSMSRDASVFQDESNMSVLDIPSATPEKQVTQMRQGRGRLGEEDSDVDIEGYDDEEEDGKPKTPAPEGEDGDGDLADEEEGTVQQPQASVLYEDLLMSEGEDDEEDAGSDEEGDNPFSAIQLSESGSDSDVGSGGIRPKQPRMLQENTRMDMENEESMMSYEGDGGEASHGLEDSNIRYQ

SEQ ID NO: 9858 - protein, 1801 aa, Homo sapiens
MGPGCDLLLRTAATITAAAIMSDTDSDEDSAGGGPFSLAGFLFGNINGAGQLEGESVLDDECKKHLAGLGALGLGSLITELTANEELTGTDGALVNDEGWVRSTEDAVDYSDINEVAEDESRRYQQTMGSLQPLCHSDYDEDDYDADCEDIDCKLMPPPPPPPGPMKKDKDQDSITGEKVDFSSSSDSESEMGPQEATQAESEDGKLTLPLAGIMQHDATKLLPSVTELFPEFRPGKVLRFLRLFGPGKNVPSVWRSARRKRKKKHRELIQEEQIQEVECSVESEVSQKSLWNYDYAPPPPPEQCLSDDEITMMAPVESKFSQSTGDIDKVTDTKPRVAEWRYGPARLWYDMLGVPEDGSGFDYGFKLRKTEHEPVIKSRMIEEFRKLEENNGTDLLADENFLMVTQLHWEDDIIWDGEDVKHKGTKPQRASLAGWLPSSMTRNAMAYNVQQGFAATLDDDKPWYSIFPIDNEDLVYGRWEDNIIWDAQAMPRLLEPPVLTLDPNDENLILEIPDEKEEATSNSPSKESKKESSLKKSRILLGKTGVIKEEPQQNMSQPEVKDPWNLSNDEYYYPKQQGLRGTFGGNIIQHSIPAVELRQPFFPTHMGPIKLRQFHRPPLKKYSFGALSQPGPHSVQPLLKHIKKKAKMREQERQASGGGEMFFMRTPQDLTGKDGDLILAEYSEENGPLMMQVGMATKIKNYYKRKPGKDPGAPDCKYGETVYCHTSPFLGSLHPGQLLQAFENNLFRAPIYLHKMPETDFLIIRTRQGYYIRELVDIFVVGQQCPLFEVPGPNSKRANTHIRDFLQVFIYRLFWKSKDRPRRIRMEDIKKAFPSHSESSIRKRLKLCADFKRTGMDSNWWVLKSDFRLPTEEEIRAMVSPEQCCAYYSMIAAEQRLKDAGYGEKSFFAPEEENEEDFQMKIDDEVRTAPWNTTRAFIAAMKGKCLLEVTGVADPTGCGEGFSYVKIPNKPTQQKDDKEPQPVKKTVTGTDADLRRLSLKNAKQLLRKFGVPEEEIKKLSRWEVIDVVRTMSTEQARSGEGPMSKFARGSRFSVAEHQERYKEECQRIFDLQNKVLSSTEVLSTDTDSSSAEDSDFEEMGKNIENMLQNKKTSSQLSREREEQERKELQRMLLAAGSAASGNNHRDDDTASVTSLNSSATGRCLKIYRTFRDEEGKEYVRCETVRKPAVIDAYVRIRTTKDEEFIRKFALFDEQHREEMRKERRRIQEQLRRLKRNQEKEKLKGPPEKKPKKMKERPDLKLKCGACGAIGHMRTNKFCPLYYQTNAPPSNPVAMTEEQEEELEKTVIHNDNEELIKVEGTKIVLGKQLIESADEVRRKSLVLKFPKQQLPPKKKRRVGTTVHCDYLNRPHKSIHRRRTDPMVTLSSILESIINDMRDLPNTYPFHTPVNAKVVKDYYKIITRPMDLQTLRENVRKRLYPSREEFREHLELIVKNSATYNGPKHSLTQISQSMLDLCDEKLKEKEDKLARLEKAINPLLDDDDQVAFSFILDNIVTQKMMAVPDSWPFHHPVNKKFVPDYYKVIVNPMDLETIRKNISKHKYQSRESFLDDVNLILANSVKYNGPESQYTKTAQEIVNVCYQTLTEYDEHLTQLEKDICTAKEAALEEAELESLDPMTPGPYTPQPPDLYDTNTSLSMSRDASVFQDESNMSVLDIPSATPEKQVTQEGEDGDGDLADEEEGTVQQPQASVLYEDLLMSEGEDDEEDAGSDEEGDNPFSAIQLSESGSDSDVGSGGIRPKQPRMLQENTRMDMENEESMMSYEGDGGEASHGLEDSNIRYQ

SEQ ID NO: 9859 - protein, 1803 aa, Homo sapiens
MGPGCDLLLRTAATITAAAIMSDTDSDEDSAGGGPFSLAGFLFGNINGAGQLEGESVLDDECKKHLAGLGALGLGSLITELTANEELTGTDGALVNDEGWVRSTEDAVDYSDINEVAEDESRRYQQTMGSLQPLCHSDYDEDDYDADCEDIDCKLMPPPPPPPGPMKKDKDQDSITGEKVDFSSSSDSESEMGPQEATQAESEDGKLTLPLAGIMQHDATKLLPSVTELFPEFRPGKVLRFLRLFGPGKNVPSVWRSARRKRKKKHRELIQEEQIQEVECSVESEVSQKSLWNYDYAPPPPPEQCLSDDEITMMAPVESKFSQSTGDIDKVTDTKPRVAEWRYGPARLWYDMLGVPEDGSGFDYGFKLRKTEHEPVIKSRMIEEFRKLEENNGTDLLADENFLMVTQLHWEDDIIWDGEDVKHKGTKPQRASLAGWLPSSMTRNAMAYNVQQGFAATLDDDKPWYSIFPIDNEDLVYGRWEDNIIWDAQAMPRLLEPPVLTLDPNDENLILEIPDEKEEATSNSPSKESKKESSLKKSRILLGKTGVIKEEPQQNMSQPEVKDPWNLSNDEYYYPKQQGLRGTFGGNIIQHSIPAVELRQPFFPTHMGPIKLRQFHRPPLKKYSFGALSQPGPHSVQPLLKHIKKKAKMREQERQASGGGEMFFMRTPQDLTGKDGDLILAEYSEENGPLMMQVGMATKIKNYYKRKPGKDPGAPDCKYGETVYCHTSPFLGSLHPGQLLQAFENNLFRAPIYLHKMPETDFLIIRTRQGYYIRELVDIFVVGQQCPLFEVPGPNSKRANTHIRDFLQVFIYRLFWKSKDRPRRIRMEDIKKAFPSHSESSIRKRLKLCADFKRTGMDSNWWVLKSDFRLPTEEEIRAMVSPEQCCAYYSMIAAEQRLKDAGYGEKSFFAPEEENEEDFQMKIDDEVRTAPWNTTRAFIAAMKGKCLLEVTGVADPTGCGEGFSYVKIPNKPTQQKDDKEPQPVKKTVTGTDADLRRLSLKNAKQLLRKFGVPEEEIKKLSRWEVIDVVRTMSTEQARSGEGPMSKFARGSRFSVAEHQERYKEECQRIFDLQNKVLSSTEVLSTDTDSSSAEDSDFEEMGKNIENMLQNKKTSSQLSREREEQERKELQRMLLAAGSAASGNNHRDDDTASVTSLNSSATGRCLKIYRTFRDEEGKEYVRCETVRKPAVIDAYVRIRTTKDEEFIRKFALFDEQHREEMRKERRRIQEQLRRLKRNQEKEKLKGPPEKKPKKMKERPDLKLKCGACGAIGHMRTNKFCPLYYQTNAPPSNPVAMTEEQEEELEKTVIHNDNEELIKVEGTKIVLGKQLIESADEVRRKSLVLKFPKQQLPPKKKRRVGTTVHCDYLNRPHKSIHRRRTDPMVTLSSILESIINDMRDLPNTYPFHTPVNAKVVKDYYKIITRPMDLQTLRENVRKRLYPSREEFREHLELIVKNSATYNGPKHSLTQISQSMLDLCDEKLKEKEDKLARLEKAINPLLDDDDQVAFSFILDNIVTQKMMAVPDSWPFHHPVNKKFVPDYYKVIVNPMDLETIRKNISKHKYQSRESFLDDVNLILANSVKYNGPESQYTKTAQEIVNVCYQTLTEYDEHLTQLEKDICTAKEAALEEAELESLDPMTPGPYTPQAKPPDLYDTNTSLSMSRDASVFQDESNMSVLDIPSATPEKQVTQEGEDGDGDLADEEEGTVQQPQASVLYEDLLMSEGEDDEEDAGSDEEGDNPFSAIQLSESGSDSDVGSGGIRPKQPRMLQENTRMDMENEESMMSYEGDGGEASHGLEDSNIRYQ

SEQ ID NO: 9860 - protein, 1592 aa, Homo sapiens
MGPGCDLLLRTAATITAAAIMSDTDSDEDSAGGGPFSLAGFLFGNINGAGQLEGESVLDDECKKHLAGLGALGLGSLITELTANEELTGTDGALVNDEGWVRSTEDAVDYSDINEVAEDESRRYQQTMGSLQPLCHSDYDEDDYDADCEDIDCKLMPPPPPPPGPMKKDKDQDSITGEKVDFSSSSDSESEMGPQEATQAESEDGKLTLPLAGIMQHDATKLLPSVTELFPEFRPGKVLRFLRLFGPGKNVPSVWRSARRKRKKKHRELIQEEQIQEVECSVESEVSQKSLWNYDYAPPPPPEQCLSDDEITMMAPVESKFSQSTGDIDKVTDTKPRVAEWRYGPARLWYDMLGVPEDGSGFDYGFKLRKTEHEPVIKSRMIEEFRKLEENNGTDLLADENFLMVTQLHWEDDIIWDGEDVKHKGTKPQRASLAGWLPSSMTRNAMAYNVQQGFAATLDDDKPWYSIFPIDNEDLVYGRWEDNIIWDAQAMPRLLEPPVLTLDPNDENLILEIPDEKEEATSNSPSKESKKESSLKKSRILLGKTGVIKEEPQQNMSQPEVKDPWNLSNDEYYYPKQQGLRGTFGGNIIQHSIPAVELRQPFFPTHMGPIKLRQFHRPPLKKYSFGALSQPGPHSVQPLLKHIKKKAKMREQERQASGGGEMFFMRTPQDLTGKDGDLILAEYSEENGPLMMQVGMATKIKNYYKRKPGKDPGAPDCKYGETVYCHTSPFLGSLHPGQLLQAFENNLFRAPIYLHKMPETDFLIIRTRQGYYIRELVDIFVVGQQCPLFEVPGPNSKRANTHIRDFLQVFIYRLFWKSKDRPRRIRMEDIKKAFPSHSESSIRKRLKLCADFKRTGMDSNWWVLKSDFRLPTEEEIRAMVSPEQCCAYYSMIAAEQRLKDAGYGEKSFFAPEEENEEDFQMKIDDEVRTAPWNTTRAFIAAMKGKCLLEVTGVADPTGCGEGFSYVKIPNKPTQQKDDKEPQPVKKTVTGTDADLRRLSLKNAKQLLRKFGVPEEEIKKLSRWEVIDVVRTMSTEQARSGEGPMSKFARGSRFSVAEHQERYKEECQRIFDLQNKVLSSTEVLSTDTDSSSAEDSDFEEMGKNIENMLQNKKTSSQLSREREEQERKELQRMLLAAGSAASGNNHRDDDTASVTSLNSSATGRCLKIYRTFRDEEGKEYVRCETVRKPAVIDAYVRIRTTKDEEFIRKFALFDEQHREEMRKERRRIQEQLRRLKRNQEKEKLKGPPEKKPKKMKERPDLKLKCGACGAIGHMRTNKFCPLYYQTNAPPSNPVAMTEEQEEELEKTVIHNDNEELIKVEGTKIVLGKQLIESADEVRRKSLVLKFPKQQLPPKKKRRVGTTVHCDYLNRPHKSIHRRRTDPMVTLSSILESIINDMRDLPNTYPFHTPVNAKVVKDYYKIITRPMDLQTLRENVRKRLYPSREEFREHLELIVKNSATYNGPKHSLTQISQSMLDLCDEKLKEKEDKLARLEKAINPLLDDDDQVAFSFILDNIVTQKMMAVPDSWPFHHPVNKKFVPDYYKVIVNPMDLETIRKNISKHKYQSRESFLDDVNLILANSVKYNGYMCTTCRT

SEQ ID NO: 9861 - protein, 1837 aa, Homo sapiens
MGPGCDLLLRTAATITAAAIMSDTDSDEDSAGGGPFSLAGFLFGNINGAGQLEGESVLDDECKKHLAGLGALGLGSLITELTANEELTGTDGALVNDEGWVRSTEDAVDYSDINEVAEDESRRYQQTMGSLQPLCHSDYDEDDYDADCEDIDCKLMPPPPPPPGPMKKDKDQDSITGEKVDFSSSSDSESEMGPQEATQAESEDGKLTLPLAGIMQHDATKLLPSVTELFPEFRPGKVLRFLRLFGPGKNVPSVWRSARRKRKKKHRELIQEEQIQEVECSVESEVSQKSLWNYDYAPPPPPEQCLSDDEITMMAPVESKFSQSTGDIDKVTDTKPRVAEWRYGPARLWYDMLGVPEDGSGFDYGFKLRKTEHEPVIKSRMIEEFRKLEENNGTDLLADENFLMVTQLHWEDDIIWDGEDVKHKGTKPQRASLAGWLPSSMTRNAMAYNVQQGFAATLDDDKPWYSIFPIDNEDLVYGRWEDNIIWDAQAMPRLLEPPVLTLDPNDENLILEIPDEKEEATSNSPSKESKKESSLKKSRILLGKTGVIKEEPQQNMSQPEVKDPWNLSNDEYYYPKQQGLRGTFGGNIIQHSIPAVELRQPFFPTHMGPIKLRQFHRPPLKKYSFGALSQPGPHSVQPLLKHIKKKAKMREQERQASGGGEMFFMRTPQDLTGKDGDLILAEYSEENGPLMMQVGMATKIKNYYKRKPGKDPGAPDCKYGETVYCHTSPFLGSLHPGQLLQAFENNLFRAPIYLHKMPETDFLIIRTRQGYYIRELVDIFVVGQQCPLFEVPGPNSKRANTHIRDFLQVFIYRLFWKSKDRPRRIRMEDIKKAFPSHSESSIRKRLKLCADFKRTGMDSNWWVLKSDFRLPTEEEIRAMVSPEQCCAYYSMIAAEQRLKDAGYGEKSFFAPEEENEEDFQMKIDDEVRTAPWNTTRAFIAAMKGKCLLEVTGVADPTGCGEGFSYVKIPNKPTQQKDDKEPQPVKKTVTGTDADLRRLSLKNAKQLLRKFGVPEEEIKKLSRWEVIDVVRTMSTEQARSGEGPMSKFARGSRFSVAEHQERYKEECQRIFDLQNKVLSSTEVLSTDTDSSSAEDSDFEEMGKNIENMLQNKKTSSQLSREREEQERKELQRMLLAAGSAASGNNHRDDDTASVTSLNSSATGRCLKIYRTFRDEEGKEYVRCETVRKPAVIDAYVRIRTTKDEEFIRKFALFDEQHREEMRKERRRIQEQLRRLKRNQEKEKLKGPPEKKPKKMKERPDLKLKCGACGAIGHMRTNKFCPLYYQTNAPPSNPVAMTEEQEEELEKTVIHNDNEELIKVEGTKIVLGKQLIESADEVRRKSLVLKFPKQQLPPKKKRRVGTTVHCDYLNRPHKSIHRRRTDPMVTLSSILESIINDMRDLPNTYPFHTPVNAKVVKDYYKIITRPMDLQTLRENVRKRLYPSREEFREHLELIVKNSATYNGPKHSLTQISQSMLDLCDEKLKEKEDKLARLEKAINPLLDDDDQVAFSFILDNIVTQKMMAVPDSWPFHHPVNKKFVPDYYKVIVNPMDLETIRKNISKHKYQSRESFLDDVNLILANSVKYNGPESQYTKTAQEIVNVCYQTLTEYDEHLTQLEKDICTAKEAALEEAELESLDPMTPGPYTPQAKPPDLYDTNTSLSMSRDASVFQDESNMSVLDIPSATPEKQVTQMRQGRGRLGEEDSDVDIEGYDDEEEDGKPKTPAPEGEDGDGDLADEEEGTVQQPQASVLYEDLLMSEGEDDEEDAGSDEEGDNPFSAIQLSESGSDSDVGSGGIRPKQPRMLQENTRMDMENEESMMSYEGDGGEASHGLEDSNIRYQ

SEQ ID NO: 9862 - protein, 1528 aa, Homo sapiens
MGPGCDLLLRTAATITAAAIMSDTDSDEDSAGGGPFSLAGFLFGNINGAGQLEGESVLDDECKKHLAGLGALGLGSLITELTANEELTGTDGALVNDEGWVRSTEDAVDYSDINEVAEDESRRYQQTMGSLQPLCHSDYDEDDYDADCEDIDCKLMPPPPPPPGPMKKDKDQDSITGEKVDFSSSSDSESEMGPQEATQAESEDGKLTLPLAGIMQHDATKLLPSVTELFPEFRPGKVLRFLRLFGPGKNVPSVWRSARRKRKKKHRELIQEEQIQEVECSVESEVSQKSLWNYDYAPPPPPEQCLSDDEITMMAPVESKFSQSTGDIDKVTDTKPRVAEWRYGPARLWYDMLGVPEDGSGFDYGFKLRKTEHEPVIKSRMIEEFRKLEENNGTDLLADENFLMVTQLHWEDDIIWDGEDVKHKGTKPQRASLAGWLPSSMTRNAMAYNVQQGFAATLDDDKPWYSIFPIDNEDLVYGRWEDNIIWDAQAMPRLLEPPVLTLDPNDENLILEIPDEKEEATSNSPSKESKKESSLKKSRILLGKTGVIKEEPQQNMSQPEVKDPWNLSNDEYYYPKQQGLRGTFGGNIIQHSIPAVELRQPFFPTHMGPIKLRQFHRPPLKKYSFGALSQPGPHSVQPLLKHIKKKAKMREQERQASGGGEMFFMRTPQDLTGKDGDLILAEYSEENGPLMMQVGMATKIKNYYKRKPGKDPGAPDCKYGETVYCHTSPFLGSLHPGQLLQAFENNLFRAPIYLHKMPETDFLIIRTRQGYYIRELVDIFVVGQQCPLFEVPGPNSKRANTHIRDFLQVFIYRLFWKSKDRPRRIRMEDIKKAFPSHSESSIRKRLKLCADFKRTGMDSNWWVLKSDFRLPTEEEIRAMVSPEQCCAYYSMIAAEQRLKDAGYGEKSFFAPEEENEEDFQMKIDDEVRTAPWNTTRAFIAAMKGKCLLEVTGVADPTGCGEGFSYVKIPNKPTQQKDDKEPQPVKKTVTGTDADLRRLSLKNAKQLLRKFGVPEEEIKKLSRWEVIDVVRTMSTEQARSGEGPMSKFARGSRFSVAEHQERYKEECQRIFDLQNKVLSSTEVLSTDTDSSSAEDSDFEEMGKNIENMLQNKKTSSQLSREREEQERKELQRMLLAAGSAASGNNHRDDDTASVTSLNSSATGRCLKIYRTFRDEEGKEYVRCETVRKPAVIDAYVRIRTTKDEEFIRKFALFDEQHREEMRKERRRIQEQLRRLKRNQEKEKLKGPPEKKPKKMKERPDLKLKCGACGAIGHMRTNKFCPLYYQTNAPPSNPVAMTEEQEEELEKTVIHNDNEELIKVEGTKIVLGKQLIESADEVRRKSLVLKFPKQQLPPKKKRRVGTTVHCDYLNRPHKSIHRRRTDPMVTLSSILESIINDMRDLPNTYPFHTPVNAKVVKDYYKIITRPMDLQTLRENVRKRLYPSREEFREHLELIVKNSATYNGPKHSLTQISQSMLDLCDEKLKEKEDKLARLEKAINPLLDDDDQVAFSFILDNIVTQKMMAVPDIITK

SEQ ID NO: 9863 - protein, 1540 aa, Homo sapiens
MGPGCDLLLRTAATITAAAIMSDTDSDEDSAGGGPFSLAGFLFGNINGAGQLEGESVLDDECKKHLAGLGALGLGSLITELTANEELTGTDGALVNDEGWVRSTEDAVDYSDINEVAEDESRRYQQTMGSLQPLCHSDYDEDDYDADCEDIDCKLMPPPPPPPGPMKKDKDQDSITGEKVDFSSSSDSESEMGPQEATQAESEDGKLTLPLAGIMQHDATKLLPSVTELFPEFRPGKVLRFLRLFGPGKNVPSVWRSARRKRKKKHRELIQEEQIQEVECSVESEVSQKSLWNYDYAPPPPPEQCLSDDEITMMAPVESKFSQSTGDIDKVTDTKPRVAEWRYGPARLWYDMLGVPEDGSGFDYGFKLRKTEHEPVIKSRMIEEFRKLEENNGTDLLADENFLMVTQLHWEDDIIWDGEDVKHKGTKPQRASLAGWLPSSMTRNAMAYNVQQGFAATLDDDKPWYSIFPIDNEDLVYGRWEDNIIWDAQAMPRLLEPPVLTLDPNDENLILEIPDEKEEATSNSPSKESKKESSLKKSRILLGKTGVIKEEPQQNMSQPEVKDPWNLSNDEYYYPKQQGLRGTFGGNIIQHSIPAVELRQPFFPTHMGPIKLRQFHRPPLKKYSFGALSQPGPHSVQPLLKHIKKKAKMREQERQASGGGEMFFMRTPQDLTGKDGDLILAEYSEENGPLMMQVGMATKIKNYYKRKPGKDPGAPDCKYGETVYCHTSPFLGSLHPGQLLQAFENNLFRAPIYLHKMPETDFLIIRTRQGYYIRELVDIFVVGQQCPLFEVPGPNSKRANTHIRDFLQVFIYRLFWKSKDRPRRIRMEDIKKAFPSHSESSIRKRLKLCADFKRTGMDSNWWVLKSDFRLPTEEEIRAMVSPEQCCAYYSMIAAEQRLKDAGYGEKSFFAPEEENEEDFQMKIDDEVRTAPWNTTRAFIAAMKGKCLLEVTGVADPTGCGEGFSYVKIPNKPTQQKDDKEPQPVKKTVTGTDADLRRLSLKNAKQLLRKFGVPEEEIKKLSRWEVIDVVRTMSTEQARSGEGPMSKFARGSRFSVAEHQERYKEECQRIFDLQNKVLSSTEVLSTDTDSSSAEDSDFEEMGKNIENMLQNKKTSSQLSREREEQERKELQRMLLAAGSAASGNNHRDDDTASVTSLNSSATGRCLKIYRTFRDEEGKEYVRCETVRKPAVIDAYVRIRTTKDEEFIRKFALFDEQHREEMRKERRRIQEQLRRLKRNQEKEKLKGPPEKKPKKMKERPDLKLKCGACGAIGHMRTNKFCPLYYQTNAPPSNPVAMTEEQEEELEKTVIHNDNEELIKVEGTKIVLGKQLIESADEVRRKSLVLKFPKQQLPPKKKRRVGTTVHCDYLNRPHKSIHRRRTDPMVTLSSILESIINDMRDLPNTYPFHTPVNAKVVKDYYKIITRPMDLQTLRENVRKRLYPSREEFREHLELIVKNSATYNGPKHSLTQISQSMLDLCDEKLKEKEDKLARLEKAINPLLDDDDQVAFSFILDNIVTQKMMAVPDVSCLCAKYFLAISSPS

SEQ ID NO: 9864 - protein, 1895 aa, Homo sapiens
MGPGCDLLLRTAATITAAAIMSDTDSDEDSAGGGPFSLAGFLFGNINGAGQLEGESVLDDECKKHLAGLGALGLGSLITELTANEELTGTDGALVNDEGWVRSTEDAVDYSDINEVAEDESRRYQQTMGSLQPLCHSDYDEDDYDADCEDIDCKLMPPPPPPPGPMKKDKDQDSITGVSENGEGIILPSIIAPSSLASEKVDFSSSSDSESEMGPQEATQAESEDGKLTLPLAGIMQHDATKLLPSVTELFPEFRPGKVLRFLRLFGPGKNVPSVWRSARRKRKKKHRELIQEEQIQEVECSVESEVSQKSLWNYDYAPPPPPEQCLSDDEITMMAPVESKFSQSTGDIDKVTDTKPRVAEWRYGPARLWYDMLGVPEDGSGFDYGFKLRKTEHEPVIKSRMIEEFRKLEENNGTDLLADENFLMVTQLHWEDDIIWDGEDVKHKGTKPQRASLAGWLPSSMTRNAMAYNVQQGFAATLDDDKPWYSIFPIDNEDLVYGRWEDNIIWDAQAMPRLLEPPVLTLDPNDENLILEIPDEKEEATSNSPSKESKKESSLKKSRILLGKTGVIKEEPQQNMSQPEVKDPWNLSNDEYYYPKQQGLRGTFGGNIIQHSIPAVELRQPFFPTHMGPIKLRQFHRPPLKKYSFGALSQPGPHSVQPLLKHIKKKAKMREQERQASGGGEMFFMRTPQDLTGKDGDLILAEYSEENGPLMMQVGMATKIKNYYKRKPGKDPGAPDCKYGETVYCHTSPFLGSLHPGQLLQAFENNLFRAPIYLHKMPETDFLIIRTRQGYYIRELVDIFVVGQQCPLFEVPGPNSKRANTHIRDFLQVFIYRLFWKSKDRPRRIRMEDIKKAFPSHSESSIRKRLKLCADFKRTGMDSNWWVLKSDFRLPTEEEIRAMVSPEQCCAYYSMIAAEQRLKDAGYGEKSFFAPEEENEEDFQMKIDDEVRTAPWNTTRAFIAAMKGKCLLEVTGVADPTGCGEGFSYVKIPNKPTQQKDDKEPQPVKKTVTGTDADLRRLSLKNAKQLLRKFGVPEEEIKKLSRWEVIDVVRTMSTEQARSGEGPMSKFARGSRFSVAEHQERYKEECQRIFDLQNKVLSSTEVLSTDTDSSSAEDSDFEEMGKNIENMLQNKKTSSQLSREREEQERKELQRMLLAAGSAASGNNHRDDDTASVTSLNSSATGRCLKIYRTFRDEEGKEYVRCETVRKPAVIDAYVRIRTTKDEEFIRKFALFDEQHREEMRKERRRIQEQLRRLKRNQEKEKLKGPPEKKPKKMKERPDLKLKCGACGAIGHMRTNKFCPLYYQTNAPPSNPVAMTEEQEEELEKTVIHNDNEELIKVEGTKIVLGKQLIESADEVRRKSLVLKFPKQQLPPKKKRRVGTTVHCDYLNRPHKSIHRRRTDPMVTLSSILESIINDMRDLPNTYPFHTPVNAKVVKDYYKIITRPMDLQTLRENVRKRLYPSREEFREHLELIVKNSATYNGPKHSLTQISQSMLDLCDEKLKEKEDKLARLEKAINPLLDDDDQVAFSFILDNIVTQKMMAVPDSWPFHHPVNKKFVPDYYKVIVNPMDLETIRKNISKHKYQSRESFLDDVNLILANSVKYNGPESQYTKTAQEIVNVCYQTLTEYDEHLTQLEKDICTAKEAALEEAELESLDPMTPGPYTPQAKPPDLYDTNTSLSMSRDASVFQDESNMSVLDIPSATPEKQVTQEGEDGDGDLADEEEGTVQQPQASVLYEDLLMSEGEDDEEDAGSDEEGDNPFSAIQLSESGSDSDVGSGGIRPKQPRMLQENTRMDMENEESMMSYEGDGGEASHGLEDSNISYGSYEEPDPKSNTQDTSFSSIGGYEVSEEEEDEEEEEQRSGPSVLSQVHLSEDEEDSEDFHSIAGDSDLDSDE

SEQ ID NO: 9865 - protein, 249 aa, Homo sapiens
MKITRQKHAKKHLGFFRNNFGVREPYQILLDGTFCQAALRGRIQLREQLPRYLMGETQLCTTRCVLKELETLGKDLYGAKLIAQKCQVRNCPHFKNAVSGSECLLSMVEEGNPHHYFVATQDQNLSVKVKKKPGVPLMFIIQNTMVLDKPSPKTIAFVKAVESGQLVSVHEKESIKHLKEEQGLVKNTEQSRRKKRKKISGPNPLSCLKKKKKAPDTQSSASEKKRKRKRIRNRSNPKVLSEKQNAEGE

SEQ ID NO: 9866 - protein, 145 aa, Homo sapiens
MKITRQKHAKKHLGFFRNNFGVREPYQILLDGTFCQAALRGRIQLREQLPRYLMGETQLCTTRCVLKELETLGKDLYGAKLIAQKCQVRNCPHFKNAVSGSECLLSMVEEGNPHHYFVATQYIPRMYTFCTNYGGQQYVIDALIG

SEQ ID NO: 9867 - protein, 671 aa, Homo sapiens
MSELLDLSFLSEEEKDLILSVLQRDEEVRKADEKRIRRLKNELLEIKRKGAKRGSQHYSDRTCARCQESLGRLSPKTNTCRGCNHLVCRDCRIQESNGTWRCKVCAKEIELKKATGDWFYDQKVNRFAYRTGSEIIRMSLRHKPAVSKRETVGQSLLHQTQMGDIWPGRKIIQERQKEPSVLFEVPKLKSGKSALEAESESLDSFTADSDSTSRRDSLDKSGLFPEWKKMSAPKSQVEKETQPGGQNVVFVDEGEMIFKKNTRKILRPSEYTKSVIDLRPEDVVHESGSLGDRSKSVPGLNVDMEEEEEEEDIDHLVKLHRQKLARSSMQSGSSMSTIGSMMSIYSEAGDFGNIFVTGRIAFSLKYEQQTQSLVVHVKECHQLAYADEAKKRSNPYVKTYLLPDKSRQGKRKTSIKRDTINPLYDETLRYEIPESLLAQRTLQFSVWHHGRFGRNTFLGEAEIQMDSWKLDKKLDHCLPLHGKISAESPTGLPSHKGELVVSLKYIPASKTPVGGDRKKSKGGEGGELQVWIKEAKNLTAAKAGGTSDSFVKGYLLPMRNKASKRKTPVMKKTLNPHYNHTFVYNGVRLEDLQHMCLELTVWDREPLASNDFLGGVRLGVGTGISNGEVVDWMDSTGEEVSLWQKMRQYPGSWAEGTLQLRSSMAKQKLGL

SEQ ID NO: 9868 - protein, 349 aa, Homo sapiens
MSELLDLSFLSEEEKDLILSVLQRDEEVRKADEKRIRRLKNELLEIKRKGAKRGSQHYSDRTCARCQESLGRLSPKTNTCRGCNHLVCRDCRIQESNGTWRCKVCAKEIELKKATGDWFYDQKVNRFAYRTGSEIIRMSLRHKPAVSKRETVGQSLLHQTQMGDIWPGRKIIQERQKEPSVLFEVPKLKSGKSALEAESESLDSFTADSDSTSRRDSLDKSGLFPEWKKMSAPKSQVEKETQPGGQNVVFVDEGEMIFKKNTRKILRPSEYTKSVIDLRPEDVVHESGSLGDRSKSVPGLNVDMEEEEEEEDIDHLVKLHRQKLARSSMQSGSSMVSSIRSVVTGMLGY

SEQ ID NO: 9869 - protein, 312 aa, Homo sapiens
MPSAIEAIYIILIAGELTIGIWGNGFIVLVNCIDWLKRRDISLIDIILISLAISRICLLCVISLDGFFMLLFPGTYGNSVLVSIVNVVWTFANNSSLWFTSCLSIFYLLKIANISHPFFFWLKLKINKVMLAILLGSFLISLIISVPKNDDMWYHLFKVSHEENITWKFKVSKIPGTFKQLTLNLGVMVPFILCLISFFLLLFSLVRHTKQIRLHATGFRDPSTEAHMRAIKAVIIFLLLLIVYYPVFLVMTSSALIPQGKLVLMIGDIVTVIFPSSHSFILIMGNSKLREAFLKMLRFVKCFLRRRKPFVP

SEQ ID NO: 9870 - protein, 339 aa, Homo sapiens
MMPFCHNIINISCVKNNWSNDVRASLYSLMVLIILTTLVGNLIVIVSISHFKQLHTPTNWLIHSMATVDFLLGCLVMPYSMVRSAEHCWYFGEVFCKIHTSTDIMLSSASIFHLSFISIDRYYAVCDPLRYKAKMNILVICVMIFISWSVPAVFAFGMIFLELNFKGAEEIYYKHVHCRGGCSVFFSKISGVLTFMTSFYIPGSIMLCVYYRIYLIAKEQARLISDANQKLQIGLEMKNGISQSKERKAVKTLGIVMGVFLICWCPFFICTVMDPFLHYIIPPTLNDVLIWFGYLNSTFNPMVYAFFYPWFRKALKMMLFGKIFQKDSSRCKLFLELSS

SEQ ID NO: 9871 - protein, 730 aa, Homo sapiens
MSKNSEFINLSFLLDHEKEMILGVLKRDEYLKKVEDKRIRKLKNELLEAKRRSGKTQQEASRVCVHCHRNLGLIFDRGDPCQACSLRVCRECRVAGPNGSWKCTVCDKIAQLRIITGEWFFEEKAKRFKQVNVLGTDVVRQSILRRSPGAEEVQSQEQTRQDAEKSDTSPVAGKKASHDGPKRKGFLLSKFRSATRGEIITPKTDTGRSYSLDLDGQHFRSLKSPPGSDRGSTGSSDLNDQEPGPRTPKSSRSNGVTPGTQSSPAPSTRTVTSVISREYGFENSMDLAAIEGTSQELTKSHRRNTSGTPSIAVSGTSLSSDQSRSELDLSESFTEDSEDTVSIRSKSVPGALDKDSLEETEESIDALVSSQLSTNTHRLASGLSTTSLNSMMSVYSETGDYGNVKVSGEILLHISYCYKTGGLYIFVKNCRNLAIGDEKKQRTDAYVKSYLLPDKSRNNKRKTKIRTGTNPEFNETLKYTISHTQLETRTLQLSVWHYDRFGRNSFLGEVEIPFDSWNFENPTDEWFVLQPKVEFAPDIGLQYKGELTVVLRYIPPEENLMLPPEQLQGNKTFKKGKKKESPVISGGILEVFIKEAKNLTAVKSGGTSDSFVKGYLLPDDSKATKHKTLVIKKSVNPQWNHTFMFSGIHPQDIKNVCLELTIWDKEAFSSNIFLGGVRLNSGSGVSHGKNVDWMDSQGEEQRLWQKMANNPGTPFEGVLMLRSSMGKCRL

SEQ ID NO: 9872 - protein, 752 aa, Homo sapiens
MSKNSEFINLSFLLDHEKEMILGVLKRDEYLKKVEDKRIRKLKNELLEAKRRSGKTQQEASRVCVHCHRNLGLIFDRGDPCQACSLRVCRECRVAGPNGSWKCTVCDKIAQLRIITGEWFFEEKAKRFKQVNVLGTDVVRQSILRRSPGAEEVQSQEQTRQDAEKSDTSPVAGKKASHDGPKRKGFLLSKFRSATRGEIITPKTDTGRSYSLDLDGQHFRSLKSPPGSDRGSTGSSDLNDQEPGPRTPKSSRSNGVTPGTQSSPAPSTRTVTSVISREYGFENSMDLAAIEGTSQELTKSHRRNTSGTPSIAVSGTSLSSDQSRSELDLSESFTEDSEDTVSIRSKSVPGALDKDSLEETEESIDALVSSQLSTNTHRLASGLSTSSQAGSDRKWTYLNVPDADSDTTSLNSMMSVYSETGDYGNVKVSGEILLHISYCYKTGGLYIFVKNCRNLAIGDEKKQRTDAYVKSYLLPDKSRNNKRKTKIRTGTNPEFNETLKYTISHTQLETRTLQLSVWHYDRFGRNSFLGEVEIPFDSWNFENPTDEWFVLQPKVEFAPDIGLQYKGELTVVLRYIPPEENLMLPPEQLQGNKTFKKGKKKESPVISGGILEVFIKEAKNLTAVKSGGTSDSFVKGYLLPDDSKATKHKTLVIKKSVNPQWNHTFMFSGIHPQDIKNVCLELTIWDKEAFSSNIFLGGVRLNSGSGVSHGKNVDWMDSQGEEQRLWQKMANNPGTPFEGVLMLRSSMGKCRL

SEQ ID NO: 9873 - protein, 335 aa, Homo sapiens
MATFVSELEAAKKNLSEALGDNVKQYWANLKLWFKQKISKEEFDLEAHRLLTQDNVHSHNDFLLAILTRCQILVSTPDGAGSLPWPGGSAAKPGKPKGKKKLSSVRQKFDHRFQPQNPLSGAQQFVAKDPQDDDDLKLCSHTMMLPTRGQLEGRMIVTAYEHGLDNVTEEAVSAVVYAVENHLKDILTSVVSRRKAYRLRDGHFKYAFGSNVTPQPYLKNSVVAYNNLIESPPAFTAPCAGQNPASHPPPDDAEQQAALLLACSGDTLPASLPPVNMYDLFEALQVHREVIPTHTVYALNIERIITKLWHPNHEELQQDKVHRQRLAAKEGLLLC

SEQ ID NO: 9874 - protein, 436 aa, Homo sapiens
MLKVSAVLCVCAAAWCSQSLAAAAAVAAAGGRSDGGNFLDDKQWLTTISQYDKEVGQWNKFRDEVEDDYFRTWSPGKPFDQALDPAKDPCLKMKCSRHKVCIAQDSQTAVCISHRRLTHRMKEAGVDHRQWRGPILSTCKQCPVVYPSPVCGSDGHTYSFQCKLEYQACVLGKQISVKCEGHCPCPSDKPTSTSRNVKRACSDLEFREVANRLRDWFKALHESGSQNKKTKTLLRPERSRFDTSILPICKDSLGWMFNRLDTNYDLLLDQSELRSIYLDKNEQCTKAFFNSCDTYKDSLISNNEWCYCFQRQQDPPCQTELSNIQKRQGVKKLLGQYIPLCDEDGYYKPTQCHGSVGQCWCVDRYGNEVMGSRINGVADCAIDFEISGDFASGDFHEWTDDEDDEDDIMNDEDEIEDDDEDEGDDDDGGDDHDVYI

SEQ ID NO: 9875 - protein, 433 aa, Homo sapiens
MLKVSAVLCVCAAAWCSQSLAAAAAVAAAGGRSDGGNFLDDKQWLTTISQYDKEVGQWNKFRDDDYFRTWSPGKPFDQALDPAKDPCLKMKCSRHKVCIAQDSQTAVCISHRRLTHRMKEAGVDHRQWRGPILSTCKQCPVVYPSPVCGSDGHTYSFQCKLEYQACVLGKQISVKCEGHCPCPSDKPTSTSRNVKRACSDLEFREVANRLRDWFKALHESGSQNKKTKTLLRPERSRFDTSILPICKDSLGWMFNRLDTNYDLLLDQSELRSIYLDKNEQCTKAFFNSCDTYKDSLISNNEWCYCFQRQQDPPCQTELSNIQKRQGVKKLLGQYIPLCDEDGYYKPTQCHGSVGQCWCVDRYGNEVMGSRINGVADCAIDFEISGDFASGDFHEWTDDEDDEDDIMNDEDEIEDDDEDEGDDDDGGDDHDVYI

SEQ ID NO: 9876 - protein, 316 aa, Homo sapiens
MLKVSAVLCVCAAAWCSQSLAAAAAVAAAGGRSDGGNFLDDKQWLTTISQYDKEVGQWNKFRDEVEDDYFRTWSPGKPFDQALDPAKDPCLKMKCSRHKVCIAQDSQTAVCISHRRLTHRMKEAGVDHRQWRGPILSTCKQCPVVYPSPVCGSDGHTYSFQCKLEYQACVLGKQISVKCEGHCPCPSDKPTSTSRNVKRACSDLEFREVANRLRDWFKALHESGSQNKKTKTLLRPERSRFDTSILPICKDSLGWMFNRLDTNYDLLLDQSELRSIYLDKNEQCTKAFFNSCDTYKDSLISNNEWCYCFQRQQGKR

SEQ ID NO: 9877 - protein, 385 aa, Homo sapiens
MITQDHIHMSSGLSQDDYFRTWSPGKPFDQALDPAKDPCLKMKCSRHKVCIAQDSQTAVCISHRRLTHRMKEAGVDHRQWRGPILSTCKQCPVVYPSPVCGSDGHTYSFQCKLEYQACVLGKQISVKCEGHCPCPSDKPTSTSRNVKRACSDLEFREVANRLRDWFKALHESGSQNKKTKTLLRPERSRFDTSILPICKDSLGWMFNRLDTNYDLLLDQSELRSIYLDKNEQCTKAFFNSCDTYKDSLISNNEWCYCFQRQQDPPCQTELSNIQKRQGVKKLLGQYIPLCDEDGYYKPTQCHGSVGQCWCVDRYGNEVMGSRINGVADCAIDFEISGDFASGDFHEWTDDEDDEDDIMNDEDEIEDDDEDEGDDDDGGDDHDVYI

SEQ ID NO: 9878 - protein, 338 aa, Homo sapiens
MLKVSAVLCVCAAAWCSQSLAAAAAVAAAGGRSDGGNFLDDKQWLTTISQYDKEVGQWNKFRDCKLEYQACVLGKQISVKCEGHCPCPSDKPTSTSRNVKRACSDLEFREVANRLRDWFKALHESGSQNKKTKTLLRPERSRFDTSILPICKDSLGWMFNRLDTNYDLLLDQSELRSIYLDKNEQCTKAFFNSCDTYKDSLISNNEWCYCFQRQQDPPCQTELSNIQKRQGVKKLLGQYIPLCDEDGYYKPTQCHGSVGQCWCVDRYGNEVMGSRINGVADCAIDFEISGDFASGDFHEWTDDEDDEDDIMNDEDEIEDDDEDEGDDDDGGDDHDVYI

SEQ ID NO: 9879 - protein, 340 aa, Homo sapiens
MINNGSPQSLSMTRKSDSGTNSETMKEAGVDHRQWRGPILSTCKQCPVVYPSPVCGSDGHTYSFQCKLEYQACVLGKQISVKCEGHCPCPSDKPTSTSRNVKRACSDLEFREVANRLRDWFKALHESGSQNKKTKTLLRPERSRFDTSILPICKDSLGWMFNRLDTNYDLLLDQSELRSIYLDKNEQCTKAFFNSCDTYKDSLISNNEWCYCFQRQQDPPCQTELSNIQKRQGVKKLLGQYIPLCDEDGYYKPTQCHGSVGQCWCVDRYGNEVMGSRINGVADCAIDFEISGDFASGDFHEWTDDEDDEDDIMNDEDEIEDDDEDEGDDDDGGDDHDVYI

SEQ ID NO: 9880 - protein, 316 aa, Homo sapiens
MKEAGVDHRQWRGPILSTCKQCPVVYPSPVCGSDGHTYSFQCKLEYQACVLGKQISVKCEGHCPCPSDKPTSTSRNVKRACSDLEFREVANRLRDWFKALHESGSQNKKTKTLLRPERSRFDTSILPICKDSLGWMFNRLDTNYDLLLDQSELRSIYLDKNEQCTKAFFNSCDTYKDSLISNNEWCYCFQRQQDPPCQTELSNIQKRQGVKKLLGQYIPLCDEDGYYKPTQCHGSVGQCWCVDRYGNEVMGSRINGVADCAIDFEISGDFASGDFHEWTDDEDDEDDIMNDEDEIEDDDEDEGDDDDGGDDHDVYI

SEQ ID NO: 9881 - protein, 393 aa, Homo sapiens
MLKVSAVLCVCAAAWCSQSLAAAAAVAAAGGRSDGGNFLDDKQWLTTISQYDKEVGQWNKFRDDDYFRTWSPGKPFDQALDPAKDPCLKMKCSRHKVCIAQDSQTAVCISHRRLTHRMKEAGVDHRQWRGPILSTCKQCPVVYPSPVCGSDGHTYSFQCKLEYQACVLGKQISVKCEGHCPCPSDKPTSTSRNVKRGFDTSILPICKDSLGWMFNRLDTNYDLLLDQSELRSIYLDKNEQCTKAFFNSCDTYKDSLISNNEWCYCFQRQQDPPCQTELSNIQKRQGVKKLLGQYIPLCDEDGYYKPTQCHGSVGQCWCVDRYGNEVMGSRINGVADCAIDFEISGDFASGDFHEWTDDEDDEDDIMNDEDEIEDDDEDEGDDDDGGDDHDVYI

SEQ ID NO: 9882 - protein, 313 aa, Homo sapiens
MLKVSAVLCVCAAAWCSQSLAAAAAVAAAGGRSDGGNFLDDKQWLTTISQYDKEVGQWNKFRDDDYFRTWSPGKPFDQALDPAKDPCLKMKCSRHKVCIAQDSQTAVCISHRRLTHRMKEAGVDHRQWRGPILSTCKQCPVVYPSPVCGSDGHTYSFQCKLEYQACVLGKQISVKCEGHCPCPSDKPTSTSRNVKRACSDLEFREVANRLRDWFKALHESGSQNKKTKTLLRPERSRFDTSILPICKDSLGWMFNRLDTNYDLLLDQSELRSIYLDKNEQCTKAFFNSCDTYKDSLISNNEWCYCFQRQQGKR

SEQ ID NO: 9883 - protein, 421 aa, Homo sapiens
MDLENKVKKMGLGHEQGFGAPCLKCKEKCEGFELHFWRKICRNCKCGQEEHDVLLSNEEDRKVGKLFEDTKYTTLIAKLKSDGIPMYKRNVMILTNPVAAKKNVSINTVTYEWAPPVQNQALARQYMQMLPKEKQPVAGSEGAQYRKKQLAKQLPAHDQDPSKCHELSPREVKEMEQFVKKYKSEALGVGDVKLPCEMDAQGPKQMNIPGGDRSTPAAVGAMEDKSAEHKRTQYSCYCCKLSMKEGDPAIYAERAGYDKLWHPACFVCSTCHELLVDMIYFWKNEKLYCGRHYCDSEKPRCAGCDELIFSNEYTQAENQNWHLKHFCCFDCDSILAGEIYVMVNDKPVCKPCYVKNHAVVCQGCHNAIDPEVQRVTYNNFSWHASTECFLCSCCSKCLIGQKFMPVEGMVFCSVECKKRMS

SEQ ID NO: 9884 - protein, 412 aa, Homo sapiens
MGLGHEQGFGAPCLKCKEKCEGFELHFWRKICRNCKCGQEEHDVLLSNEEDRKVGKLFEDTKYTTLIAKLKSDGIPMYKRNVMILTNPVAAKKNVSINTVTYEWAPPVQNQALARQYMQMLPKEKQPVAGSEGAQYRKKQLAKQLPAHDQDPSKCHELSPREVKEMEQFVKKYKSEALGVGDVKLPCEMDAQGPKQMNIPGGDRSTPAAVGAMEDKSAEHKRTQYSCYCCKLSMKEGDPAIYAERAGYDKLWHPACFVCSTCHELLVDMIYFWKNEKLYCGRHYCDSEKPRCAGCDELIFSNEYTQAENQNWHLKHFCCFDCDSILAGEIYVMVNDKPVCKPCYVKNHAVVCQGCHNAIDPEVQRVTYNNFSWHASTECFLCSCCSKCLIGQKFMPVEGMVFCSVECKKRMS

SEQ ID NO: 9885 - protein, 230 aa, Homo sapiens
MAQGLIEVERKFLPGPGTEERLQELGGTLEYRVTFRDTYYDTPELSLMQADHWLRRREDSGWELKCPGAAGVLGPHTEYKELTAEPTIVAQLCKVLRADGLGAGDVAAVLGPLGLQEVASFVTKRSAWKLVLLGADEEEPQLRVDLDTADFGYAVGEVEALVHEEAEVPTALEKIHRLSSMLGVPAQETAPAKLIVYLQRFRPQDYQRLLEVNSSRERPQETEDPDHCLG

SEQ ID NO: 9886 - protein, 105 aa, Homo sapiens
MAQGLIEVERKFLPGPGTEERLQELGGTLEYRVTFRDTYYDTPELSLMQADHWLRRREDSGWELKCPGAAGVLGPHTEYKELTAEPTIVAQLCKVCLHRRQHQPS

SEQ ID NO: 9887 - protein, 1124 aa, Homo sapiens
MDSLASLVLCGVSLLLSGTVEGAMDLILINSLPLVSDAETSLTCIASGWRPHEPITIGRDFEALMNQHQDPLEVTQDVTREWAKKVVWKREKASKINGAYFCEGRVRGEAIRIRTMKMRQQASFLPATLTMTVDKGDNVNISFKKVLIKEEDAVIYKNGSFIHSVPRHEVPDILEVHLPHAQPQDAGVYSARYIGGNLFTSAFTRLIVRRCEAQKWGPECNHLCTACMNNGVCHEDTGECICPPGFMGRTCEKACELHTFGRTCKERCSGQEGCKSYVFCLPDPYGCSCATGWKGLQCNEACHPGFYGPDCKLRCSCNNGEMCDRFQGCLCSPGWQGLQCEREGIQRMTPKIVDLPDHIEVNSGKFNPICKASGWPLPTNEEMTLVKPDGTVLHPKDFNHTDHFSVAIFTIHRILPPDSGVWVCSVNTVAGMVEKPFNISVKVLPKPLNAPNVIDTGHNFAVINISSEPYFGDGPIKSKKLLYKPVNHYEAWQHIQVTNEIVTLNYLEPRTEYELCVQLVRRGEGGEGHPGPVRRFTTASIGLPPPRGLNLLPKSQTTLNLTWQPIFPSSEDDFYVEVERRSVQKSDQQNIKVPGNLTSVLLNNLHPREQYVVRARVNTKAQGEWSEDLTAWTLSDILPPQPENIKISNITHSSAVISWTILDGYSISSITIRYKVQGKNEDQHVDVKIKNATITQYQLKGLEPETAYQVDIFAENNIGSSNPAFSHELVTLPESQAPADLGGGKMLLIAILGSAGMTCLTVLLAFLIILQLKRANVQRRMAQAFQNVREEPAVQFNSGTLALNRKVKNNPDPTIYPVLDWNDIKFQDVIGEGNFGQVLKARIKKDGLRMDAAIKRMKEYASKDDHRDFAGELEVLCKLGHHPNIINLLGACEHRGYLYLAIEYAPHGNLLDFLRKSRVLETDPAFAIANSTASTLSSQQLLHFAADVARGMDYLSQKQFIHRDLAARNILVGENYVAKIADFGLSRGQEVYVKKTMGRLPVRWMAIESLNYSVYTTNSDVWSYGVLLWEIVSLGGTPYCGMTCAELYEKLPQGYRLEKPLNCDDEVYDLMRQCWREKPYERPSFAQILVSLNRMLEERKTYVNTTLYEKFTYAGIDCSAEEAA

SEQ ID NO: 9888 - protein, 1081 aa, Homo sapiens
MDSLASLVLCGVSLLLSGTVEGAMDLILINSLPLVSDAETSLTCIASGWRPHEPITIGRDFEALMNQHQDPLEVTQDVTREWAKKVVWKREKASKINGAYFCEGRVRGEAIRIRTMKMRQQASFLPATLTMTVDKGDNVNISFKKVLIKEEDAVIYKNGSFIHSVPRHEVPDILEVHLPHAQPQDAGVYSARYIGGNLFTSAFTRLIVRRCEAQKWGPECNHLCTACMNNGVCHEDTGECICPPGFMGRTCEKACELHTFGRTCKERCSGQEGCKSYVFCLPDPYGCSCATGWKGLQCNEGIQRMTPKIVDLPDHIEVNSGKFNPICKASGWPLPTNEEMTLVKPDGTVLHPKDFNHTDHFSVAIFTIHRILPPDSGVWVCSVNTVAGMVEKPFNISVKVLPKPLNAPNVIDTGHNFAVINISSEPYFGDGPIKSKKLLYKPVNHYEAWQHIQVTNEIVTLNYLEPRTEYELCVQLVRRGEGGEGHPGPVRRFTTASIGLPPPRGLNLLPKSQTTLNLTWQPIFPSSEDDFYVEVERRSVQKSDQQNIKVPGNLTSVLLNNLHPREQYVVRARVNTKAQGEWSEDLTAWTLSDILPPQPENIKISNITHSSAVISWTILDGYSISSITIRYKVQGKNEDQHVDVKIKNATITQYQLKGLEPETAYQVDIFAENNIGSSNPAFSHELVTLPESQAPADLGGGKMLLIAILGSAGMTCLTVLLAFLIILQLKRANVQRRMAQAFQNVREEPAVQFNSGTLALNRKVKNNPDPTIYPVLDWNDIKFQDVIGEGNFGQVLKARIKKDGLRMDAAIKRMKEYASKDDHRDFAGELEVLCKLGHHPNIINLLGACEHRGYLYLAIEYAPHGNLLDFLRKSRVLETDPAFAIANSTASTLSSQQLLHFAADVARGMDYLSQKQFIHRDLAARNILVGENYVAKIADFGLSRGQEVYVKKTMGRLPVRWMAIESLNYSVYTTNSDVWSYGVLLWEIVSLGGTPYCGMTCAELYEKLPQGYRLEKPLNCDDEVYDLMRQCWREKPYERPSFAQILVSLNRMLEERKTYVNTTLYEKFTYAGIDCSAEEAA

SEQ ID NO: 9889 - protein, 976 aa, Homo sapiens
MDSLASLVLCGVSLLLSASFLPATLTMTVDKGDNVNISFKKVLIKEEDAVIYKNGSFIHSVPRHEVPDILEVHLPHAQPQDAGVYSARYIGGNLFTSAFTRLIVRRCEAQKWGPECNHLCTACMNNGVCHEDTGECICPPGFMGRTCEKACELHTFGRTCKERCSGQEGCKSYVFCLPDPYGCSCATGWKGLQCNEGIQRMTPKIVDLPDHIEVNSGKFNPICKASGWPLPTNEEMTLVKPDGTVLHPKDFNHTDHFSVAIFTIHRILPPDSGVWVCSVNTVAGMVEKPFNISVKVLPKPLNAPNVIDTGHNFAVINISSEPYFGDGPIKSKKLLYKPVNHYEAWQHIQVTNEIVTLNYLEPRTEYELCVQLVRRGEGGEGHPGPVRRFTTASIGLPPPRGLNLLPKSQTTLNLTWQPIFPSSEDDFYVEVERRSVQKSDQQNIKVPGNLTSVLLNNLHPREQYVVRARVNTKAQGEWSEDLTAWTLSDILPPQPENIKISNITHSSAVISWTILDGYSISSITIRYKVQGKNEDQHVDVKIKNATITQYQLKGLEPETAYQVDIFAENNIGSSNPAFSHELVTLPESQAPADLGGGKMLLIAILGSAGMTCLTVLLAFLIILQLKRANVQRRMAQAFQNREEPAVQFNSGTLALNRKVKNNPDPTIYPVLDWNDIKFQDVIGEGNFGQVLKARIKKDGLRMDAAIKRMKEYASKDDHRDFAGELEVLCKLGHHPNIINLLGACEHRGYLYLAIEYAPHGNLLDFLRKSRVLETDPAFAIANSTASTLSSQQLLHFAADVARGMDYLSQKQFIHRDLAARNILVGENYVAKIADFGLSRGQEVYVKKTMGRLPVRWMAIESLNYSVYTTNSDVWSYGVLLWEIVSLGGTPYCGMTCAELYEKLPQGYRLEKPLNCDDEVYDLMRQCWREKPYERPSFAQILVSLNRMLEERKTYVNTTLYEKFTYAGIDCSAEEAA

SEQ ID NO: 9890 - protein, 225 aa, Homo sapiens
MSRPRKRLAGTSGSDKGLSGKRTKTENSGEALAKVEDSNPQKTSATKNCLKNLSSHWLMKSEPESRLEKGVDVKFSIEDLKAQPKQTTCWDGVRNYQARNFLRAMKLGEEAFFYHSNCKEPGIAGLMKIVKEAYPDHTQFEKNNPHYDPSSKEDNPKWSMVDVQFVRMMKRFIPLAELKSYHQAHKATGGPLKNMVLFTRQRLSIQPLTQEEFDFVLSLEEKEPS

SEQ ID NO: 9891 - protein, 166 aa, Homo sapiens
MSRPRKRLAGTSGSDKGLSGKRTKTENSGEALAKVEDSNPQKTSATKNCLKNLSSHWLMKSEPESRLEKGVDVKFSIEDLKAQPKQTTCWDGVRNYQARNFLRAMKLGEEAFFYHSNCKEPGIAGLMKIVKEAYPDHTQFEKNNPHYDPSSKEDNPKWSMKSLILF

SEQ ID NO: 9892 - protein, 150 aa, Homo sapiens
MDSRKLSPRGKKLESHLSQEHRRPPLGLIAAWGQPSIQSSVQQGLQTQDWVCEPPERRRPGRRWSVSIDERRRLATLGGRERPGAAGTQLHCRDVVQMVAQLVSEDVDKDVLLPHPLRSTESTNAFQAFLARSAPFWHNATFEASRSPPS

SEQ ID NO: 9893 - protein, 1243 aa, Homo sapiens
MLASPATETTVLMSQTEADLALRPPPPLGTAGQPRLGPPPRRARRFSGKAEPRPRSSRLSRRSSVDLGLLSSWSLPASPAPDPPDPPDSAGPGPARSPPPSSKEPPEGTWTEGAPVKAAEDSARPELPDSAVGPGSREPLRVPEAVALERRREQEEKEDMETQAVATSPDGRYLKFDIEIGRGSFKTVYRGLDTDTTVEVAWCELQTRKLSRAERQRFSEEVEMLKGLQHPNIVRFYDSWKSVLRGQVCIVLVTELMTSGTLKTYLRRFREMKPRVLQRWSRQILRGLHFLHSRVPPILHRDLKCDNVFITGPTGSVKIGDLGLATLKRASFAKSVIGTPEFMAPEMYEEKYDEAVDVYAFGMCMLEMATSEYPYSECQNAAQIYRKVTSGRKPNSFHKVKIPEVKEIIEGCIRTDKNERFTIQDLLAHAFFREERGVHVELAEEDDGEKPGLKLWLRMEDARRGGRPRDNQAIEFLFQLGRDAAEEVAQEMVALGLVCEADYQPVARAVRERVAAIQRKREKLRKARELEALPPEPGPPPATVPMAPGPPSVFPPEPEEPEADQHQPFLFRHASYSSTTSDCETDGYLSSSGFLDASDPALQPPGGVPSSLAESHLCLPSAFALSIPRSGPGSDFSPGDSYASDAASGLSDVGEGMGQMRRPPGRNLRRRPRSRLRVTSVSDQNDRVVECQLQTHNSKMVTFRFDLDGDSPEEIAAAMVYNEFILPSERDGFLRRIREIIQRVETLLKRDTGPMEAAEDTLSPQEEPAPLPALPVPLPDPSNEELQSSTSLEHRSWTAFSTSSSSPGTPLSPGNPFSPGTPISPGPIFPITSPPCHPSPSPFSPISSQVSSNPSPHPTSSPLPFSSSTPEFPVPLSQCPWSSLPTTSPPTFSPTCSQVTLSSPFFPPCPSTSSFPSTTAAPLLSLASAFSLAVMTVAQSLLSPSPGLLSQSPPAPPSPLPSLPLPPPVAPGGQESPSPHTAEVESEASPPPARPLPGEARLAPISEEGKPQLVGRFQVTSSKEPAEPLPLQPTSPTLSGSPKPSTPQLTSESSDTEDSAGGGPETREALAESDRAAEGLGAGVEEEGDDGKEPQVGGSPQPLSHPSPVWMNYSYSSLCLSSEESESSGEDEEFWAELQSLRQKHLSEVETLQTLQKKEIEDLYSRLGKQPPPGIVAPAAMLSSRQRRLSKGSFPTSRRNSLQRSEPPGPGIMRRNSLSGSSTGSQEQRASKGVTFAGDVGRM

SEQ ID NO: 9894 - protein, 663 aa, Homo sapiens
MRRRQQGAAGGNFPVGGSFPEDVSPHQDSGYAPSPRYLRRFREMKPRVLQRWSRQILRGLHFLHSRVPPILHRDLKCDNVFITGPTGSVKIGDLGLATLKRASFAKSVIGTPEFMAPEMYEEKYDEAVDVYAFGMCMLEMATSEYPYSECQNAAQIYRKVTSGRKPNSFHKVKIPEVKEIIEGCIRTDKNERFTIQDLLAHAFFREERGVHVELAEEDDGEKPGLKLWLRMEDARRGGRPRDNQAIEFLFQLGRDAAEEVAQEMVALGLVCEADYQPVARAVRERVAAIQRKREKLRKARELEALPPEPGPPPATVPMAPGPPSVFPPEPEEPEADQHQPFLFRHASYSSTTSDCETDGYLSSSGFLDASDPALQPPGGVPSSLAESHLCLPSAFALSIPRSGPGSDFSPGDSYASDAASGLSDVGEGMGQMRRPPGRNLRRRPRSRLRVTSVSDQNDRVVECQLQTHNSKMVTFRFDLDGDSPEEIAAAMVYNEFILPSERDGFLRRIREIIQRVETLLKRDTGPMEAAEDTLSPQEEPAPLPALPVPLPDPSNEELQSSTSLEHRSWTAFSTSSSSPGTPLSPGNPFSPGTPISPGPGIMRRNSLSGSSTGSQEQRASKEAGQRPGKLWLRATVQLRVWGLELRRKEMMGRNPKLGAAPNP

SEQ ID NO: 9895 - protein, 1165 aa, Homo sapiens
MLASPATETTVLMSQTEADLALRPPPPLGTAGQPRLGPPPRRARRFSGKAEPRPRSSRLSRRSSVDLGLLSSWSLPASPAPDPPDPPDSAGPGPARSPPPSSKEPPEGTWTEGAPVKAAEDSARPELPDSAVGPGSREPLRVPEAVALERRREQEEKEDMETQAVATSPDGRYLKFDIEIGRGSFKTVYRGLDTDTTVEVAWCELQTRKLSRAERQRFSEEVEMLKGLQHPNIVRFYDSWKSVLRGQVCIVLVTELMTSGTLKTYLRRFREMKPRVLQRWSRQILRGLHFLHSRVPPILHRDLKCDNVFITGPTGSVKIGDLGLATLKRASFAKSVIGTPEFMAPEMYEEKYDEAVDVYAFGMCMLEMATSEYPYSECQNAAQIYRKVTSGRKPNSFHKVKIPEVKEIIEGCIRTDKNERFTIQDLLAHAFFREERGVHVELAEEDDGEKPGLKLWLRMEDARRGGRPRDNQAIEFLFQLGRDAAEEVAQEMVALGLVCEADYQPVARAVRERVAAIQRKREKLRKARELEALPPEPGPPPATVPMAPGPPSVFPPEPEEPEADQHQPFLFRHASYSSTTSDCETDGYLSSSGFLDASDPALQPPGGVPSSLAESHLCLPSAFALSIPRSGPGSDFSPGDSYASDAASGLSDVGEGMGQMRRPPGRNLRRRPRSRLRVTSVSDQNDRVVECQLQTHNSKMVTFRFDLDGDSPEEIAAAMVYNEFILPSERDGFLRRIREIIQRVETLLKRDTGPMEAAEDTLSPQEEPAPLPALPVPLPDPSNEELQSSTSLEHRSWTAFSTSSSSPGTPLSPGNPFSPGTPISPGPIFPITSPPCHPSPSPFSPISSQVSSNPSPHPTSSPLPFSSSTPEFPVPLSQCPWSSLPTTSPPTFSPTCSQVTLSSPFFPPCPSTSSFPSTTAAPLLSLASAFSLAVMTVAQSLLSPSPGLLSQSPPAPPSPLPSLPLPPPVAPGGQESPSPHTAEVESEASPPPARPLPGEARLAPISEEGKPQLVGRFQVTSSKEPAEPLPLQPTSPTLSGSPKPSTPQLTSESSDTEDSAGGGPETREALAESDRAAEGLGAGVEEEGDDGKEPQVGGSPQPLSHPSPVWMNYSYSSLCLSSEESESSGEDEEFWAELQSLRQKPFHALRASSGTCQRWKHYRHY

SEQ ID NO: 9896 - protein, 220 aa, Homo sapiens
MPLTGVGPGSCRRQIIRALCLLLLLLHAGSAKNIWKRALPARLAEKSRAEEAGAPGGPRQPRADRCPPPPRTLPPGACQAARCQADSECPRHRRCCYNGCAYACLEAVPPPPVLDWLVQPKPRWLGGNGWLLDGPEEVLQAEACSTTEDGAEPLLCPSGYECHILSPGDVAEGIPNRGQCVKQRRQADGRILRHKLYKEYPEGDSKNVAEPGRGQQKHFQ

SEQ ID NO: 9897 - protein, 2789 aa, Homo sapiens
MPSDAKDSVNGDLLLNWTSLKNILSGLNASFPLHNNTGSSTVTTSKSIKDPRLMRREESMGEQSSTAGLNEVLQFEKSSDNVNSEIKSTPSNSASSSEVVPGDCAVLTNGLDTPCFKTSVNDSQSWAHNMGSEDYDCIPPNKVTMAGQCKDQGNFSFPISVSNVVSEVENQNHSEEKAQRAQQESGNAYTKEYSSHIFQDSQSSDLKTIYQTGCQTSTVFPLKKKVSIDEYLQNTGKMKNFADLEDSSKHEEKQTSWKEIDNDFTNETKISPIDNYIVLHQEYKESESHNSFGKSCDKILITQELEITKSSTSTIKDKDELDHLALEWQITPSFESLSQKHPQHSVEYEGNIHTSLAIAQKLMELKLGKINQNYASIITEAFPKPKDIPQAKEMFIDTVISSYNIETAHDSSNCSITREHICVHRKNENEPVSLENIQRDYKETAYVEDRGQDHNLFCNSQLSNDIWLNVNFKKQTDRENQNEAKENSASCVENNIENIYGDKKQDSHTNENFSNIDEKEDKNYHNIEILSSEEFSTKFNLICREDNAVSAATALLESEEDTISAVKQKDTENTGRSVEHLASTTFPKTASSSVCVASNAAIQIASATMPALSLNNDDHQIYQFKETCSSESPDFGLLVKHRVSDCEIDTDKNKSQESFHQSINENLVLQSIELESEIEIELEDCDDAFIFQQDTHSHENMLCEEFVTSYKALKSRISWEGLLALDNGEMEVLESTTGRENSDQHYSKESNYFYSSTQNNETELTSPILLPDLQIKITNIFRPGFSPTADSLALKDSFCTHVTEATKPEINKEDGEILGFDIYSQPFGENADYPCEDKVDNIRQESGPVSNSEISLSFDLSRNTDVNHTSENQNSESLFTEPSNVTTIDDGSRCFFTKSKTDYNDTKNKKEVESRISKRKLHISSRDQNIPHKDLRRHKIYGRKRRLTSQDSSECFSSLSQGRIKTFSQSEKHIKSVLNILSDEASLCKSKCLSRKLDKAVVHLKKAHRRVHTSLQLITKVGEERKGPLPKSYAIICNNFWESCDLQGYSSVSQRKYYSTKHFSSKRKYDKRRKKRAPKADISKSLTHVSKHKSYKTSGEKKCLSRKSMASSVSKSHPTTSHMGEFCNQEHPESQLPVSSTSQSTSQSVYYNSSVSNPSLSEEHQPFSGKTAYLFSPDHSDEKLIEKENQIDTAFLSSTSKYEKLEKHSANHNVKDATKENSCDANEVINESNSVSLSCIKENINSSTGNDCDATCIGHTKAKTDVLISVLDSNVKHFLNDLYQQGNLILSDCKRNLEVKWTDPIERPKQNIITGNFLMGPLNLTLIASKKYSIPQLSAAAVTDSEGESSKSYLDKQRILTVDSFAASSTVPHCEQSCREKELLKTEQCSSGNCLHTDGNETNVTENYELDVASGTEEDKSYGENIVELSSSDSSLLLKDNVKGSSSETCIVKKDTEDRITWKVKQAEKAKDSVYKRSMTEGSTVNTEYKNQKNQISEESCLNEKIITTNLIDSHLSTKNTTTESVPLKNTVSNPLNKREKKGEIKVSKDSQSDLTLHSEIAYISKPGILGVNHTPILPAHSETCKVPTLLKKPASYVSDFKEKHCSANHTALIANLSQILQRADEASSLQILQEETKVCLNILPLFVEAFERKQECSVEQILISRELLVDQNLWNNCKHTLKPCAVDTLVELQMMMETIQFIENKKRHLEGEPTLRSLLWYDETLYAELLGKPRGFQQQSNFYPGFQGRLKYNAFCELQTYHDQLVELLEETKREKNSYYVFLKYKRQVNECEAIMEHCSDCFDFSLSVPFTCGVNFGDSLEDLEILRKSTLKLINVCGDSPKVHSYPGKQDHLWIIIEMISSKVNFIKNNEAVRVKISLYGLEHIFFDAAKNLVWKERTQSFSKKYSQKKDEERLLRVNKCAFSKLQKIYDTLSKDLNNEPISPIGLEEDTIIASRKSDHPINEATISIENSKFNSNLLAHPDICCISEILDQAEFADLKKLQDLTLRCTDHLEILKKYFQMLQDNNMDNIFITEENVLDVVINHSHEAIILKPEAIEMYIEIVMVSETIHFLKNSIAKKLDKQRFRGMLWFDLSLLPELVQCQEKMASFSFLKDNSTDVCLWKVIETAVSELKKDLDIICKYNEAVNCSYAIHLLSRELQELSEIKKLLKKSKYFISTYIDFVPYIASINYGSTVTELEYNYNQFSTLLKNVMSAPRKDLGKMAHIRKVMKTIEHMKMICTKNAELTISFFLCQMLYNRRKILQLKRKEKMNIHIVKPGENNNKFSISTMLPPVSECINKNISNSSKKRPSTVDKCEDSQEQQQDTTVSSCKKLKVDMKDVTKINREKATFKHPRTTGSHPKSENKIVPSSCDSLKRNHLTPKKVEMQRSLPGSLLPLENPKDTCASKSESKIDLTVSSDHFSGQQENLNSMKKRNVNFSAAETKSDKKDCAAFAICDQKSVHGTFSPDHGTLLQKFLKNSPDPTQKSCLSDINPETDVSLVPDASVLSKPIFCFVKDVHPDLEMNDTVFELQDNDIVNSSIKNSSCMTSPEPICIQNKIPTLQINKLQPTETESEDKYMKDTLNPNTVHTFGASGHITLNVNQGAEYSLSEQQNDKNSKVLMQNAATYWNELPQSACNPTYNSSEHLFGTSYPYSAWCVYQYSNSNGNAITQTYQGITSYEVQPSPSGLLTTVASTAQGTHSNLLYSQYFTYFAGEPQANGFVPVNGYFQSQIPASNFRQPIFSQYASHQPLPQATYPYLPNRFVPPEVPWVYAPWHQESFHPGH

SEQ ID NO: 9898 - protein, 131 aa, Homo sapiens
MAFFNLYLLGYQNSFQNKKRNTTEETNQKEPEPTRLPPIISKDGNYSVHQNSHTRYHEAVRKVLLKTFPNQVFRIPLTDAQNFSFWWSHDPGVRPEETMPWIRSPRHCLIKSAMTRFMDHSILNDRTFSLY

SEQ ID NO: 9899 - protein, 124 aa, Homo sapiens
MGCCQDKDFEMSDEQSKEEESEDGREDETTDTQRGPRECERGLPEGRGELRGLVVPSGAEDIDLNSPDHPNHKSNESLLITVLWRRLSTFGRRGSSRPSKRQPDQIRKQESPIREGNQEEPEKG

SEQ ID NO: 9900 - protein, 227 aa, Homo sapiens
MEKLFNENEGMPSNQGKIDNEEQPPHEGKPEVACILEDKKLENEGNTENTGKRVEEPLKDKEKPESAGKAKGEGKSERKGKSEMQGGSKTEGKPERGGRAEGEGEPDSEREPESEGEPESETRAAGKRPAEDDIPRKAKRKTNKGLAQYLKQYKEAIHDMNFSNEDMIREFDNMARVEDKRRKSKQKLGAFLWMQRNLQDPFYPRGPREFRGGCRAPRRDTEDIPYV

SEQ ID NO: 9901 - protein, 1184 aa, Homo sapiens
MKKYRKISIGCFAMATQTSHVFHGQENMFLENHCIRRNTGRDSKKPLKQKNMNGLGQNSDNGLLVTHVNQTQDLLRLQGSETQSSDWEDSEDWLSAHSLKCQKLTLADLISQGTEVLEEGTNVVQKICFSTQIIRHFESKLSDTIEVYQERIQWLTENSKKAFGLIKGARVSILIDVSAISSGPQKEEFQKDLMSLIDEQLSHKEKLFVLSFGTNAGSLWPDPMEVSASTLQELKLWVKTLQPDGGSNLLQALKKIFTLKGLDSLVAIMRSCPDQPSEILSDYIQQSTMGRDLIIHFITYRCDDQMPPAVLKNLAEAVRGYYHCYSPKMEHYTSRDMDELLAEIQKAQSLLSHVQALQHSSPCEALTCTMEEISTEITNGPLISLLPKPPKHDAPLTIEFPNLDKTSAEWLKVNGLKAKKLSLYQVLAPNAFSPVEEFVPILQKTVSSTIHEKAMIQFEWHDGTVKNIHVDPPFLYKYQQQLSRAMRMYERRIEWLSLASRRIWGTVCEKRVVVLLDISATNSMYIIHIQHSLRLLLEEQLSNKDCFNLIAFGSTIESWRPEMVPVSHNNLQSAWRWALNLRCRGSRNVLSALRKAVEVDFKDKDKHQSQGIYLFTGGIPDQDMPTLSAYMAEACGGCDLQLNVCLFYVGEPKMDTTPPARYASHTDTAAAYKEVTRAAGGRFHWFGDTGIYESDDINSIMSEMEKALNYSQKCAFLMASLKNHSGKVLGSSALPKEKPKTLQLRSQPKKLCPPRPTVPLGARMSIKDDPDREKSPPLKSLKWRPLSSRVGISPAAAQPTKEGMMELRRKTKSREAETSLLLFYTEKGNDVGSVYKKYPQGRGLRRTSSSIDLPRKDTVCSSQEWVAKYGLKKLKLEISRCMGPNCTHQKSGQRSASAKHCSIFPSVEIHGVVRHIQWTPREMEVYIRHLEKVLRRYVQRLQWLLSGSRRLFGTVLESKVCILLDTSGSMGPYLQQVKTELVLLIWEQLRKCCDSFNLLSFAESFQSWQDTLVETTDAACHEAMQWVTHLQAQGSTSILQALLKAFSFHDLEGLYLLTDGKPDTSCSLVLNEVQKLREKRDVKVHTISLNCSDRAAVEFLRKLASFTGGRYHCPVGEDTLSKIHSLLTKGFINEKDPTLPPFEGDDLRILAQEITKARSFLWQAQSFRSQLQKKNDAEPKVTLS

SEQ ID NO: 9902 - protein, 808 aa, Homo sapiens
MKKYRKISLLPKPPKHDAPLTIEFPNLDKTSAEWLKVNGLKAKKLSLYQVLAPNAFSPVEEFVPILQKTVSSTIHEKAMIQFEWHDGTVKNIHVDPPFLYKYQQQLSRAMRMYERRIEWLSLASRRIWGTVCEKRVVVLLDISATNSMYIIHIQHSLRLLLEEQLSNKDCFNLIAFGSTIESWRPEMVPVSHNNLQSAWRWALNLRCRGSRNVLSALRKAVEVDFKDKDKHQSQGIYLFTGGIPDQDMPTLSAYMAEACGGCDLQLNVCLFYVGEPKMDTTPPARYASHTDTAAAYKEVTRAAGGRFHWFGDTGIYESDDINSIMSEMEKALNYSQKCAFLMASLKNHSGKVLGSSALPKEKPKTLQLRSQPKKLCPPRPTVPLGARMSIKDDPDREKSPPLKSLKWRPLSSRVGISPAAAQPTKEGMMELRRKTKSREAETSLLLFYTEKGNDVGSVYKKYPQGRGLRRTSSSIDLPRKDTVCSSQEWVAKYGLKKLKLEISRCMGPNCTHQKSGQRSASAKHCSIFPSVEIHGVVRHIQWTPREMEVYIRHLEKVLRRYVQRLQWLLSGSRRLFGTVLESKVCILLDTSGSMGPYLQQVKTELVLLIWEQLRKCCDSFNLLSFAESFQSWQDTLVETTDAACHEAMQWVTHLQAQGSTSILQALLKAFSFHDLEGLYLLTDGKPDTSCSLVLNEVQKLREKRDVKVHTISLNCSDRAAVEFLRKLASFTGGRYHCPVGEDTLSKIHSLLTKGFINEKDPTLPPFEGDDLRILAQEITKARSFLWQAQSFRSQLQKKNDAEPKVTLS

SEQ ID NO: 9903 - protein, 262 aa, Homo sapiens
MEVYIRHLEKVLRRYVQRLQWLLSGSRRLFGTVLESKVCILLDTSGSMGPYLQQVKTELVLLIWEQLRKCCDSFNLLSFAESFQSWQDTLVETTDAACHEAMQWVTHLQAQGSTSILQALLKAFSFHDLEGLYLLTDGKPDTSCSLVLNEVQKLREKRDVKVHTISLNCSDRAAVEFLRKLASFTGGRYHCPVGEDTLSKIHSLLTKGFINEKDPTLPPFEGDDLRILAQEITKARSFLWQAQSFRSQLQKKNDAEPKVTLS

SEQ ID NO: 9904 - protein, 286 aa, Homo sapiens
MEVYIRHLEKVLRRYVQRLQWLLSGPVLCSRTWYRQSMDRGVMMTAASGSRRLFGTVLESKVCILLDTSGSMGPYLQQVKTELVLLIWEQLRKCCDSFNLLSFAESFQSWQDTLVETTDAACHEAMQWVTHLQAQGSTSILQALLKAFSFHDLEGLYLLTDGKPDTSCSLVLNEVQKLREKRDVKVHTISLNCSDRAAVEFLRKLASFTGGRYHCPVGEDTLSKIHSLLTKGFINEKDPTLPPFEGDDLRILAQEITKARSFLWQAQSFRSQLQKKNDAEPKVTLS

SEQ ID NO: 9905 - protein, 699 aa, Homo sapiens
MAEGEDVPPLPTSSGDGWEKDLEEALEAGGCDLETLRNIIQGRPLPADLRAKVWKIALNVAGKGDSLASWDGILDLPEQNTIHKDCLQFIDQLSVPEEKAAELLLDIESVITFYCKSRNIKYSTSLSWIHLLKPLVHLQLPRSDLYNCFYAIMNKYIPRDCSQKGRPFHLFRLLIQYHEPELCSYLDTKKITPDSYALNWLGSLFACYCSTEVTQAIWDGYLQQADPFFIYFLMLIILVNAKEVILTQESDSKEEVIKFLENTPSSLNIEDIEDLFSLAQYYCSKTPASFRKDNHHLFGSTLLGIKDDDADLSQALCLAISVSEILQANQLQGEGVRFFVVDCRPAEQYNAGHLSTAFHLDSDLMLQNPSEFAQSVKSLLEAQKQSIESGSIAGGEHLCFMGSGREEEDMYMNMVLAHFLQKNKEYVSIASGGFMALQQHLADINVDGPENGYGHWIASTSGSRSSINSVDGESPNGSSDRGMKSLVNKMTVALKTKSVNVREKVISFIENTSTPVDRMSFNLPWPDRSCTERHVSSSDRVGKPYRGVKPVFSIGDEEEYDTDEIDSSSMSDDDRKEVVNIQTWINKPDVKHHFPCKEVKESGHMFPSHLLVTATHMYCLREIVSRKGLAYIQSRQALNSVVKITSKKKHPELITFKYGNSSASGIEILAIERYLIPNAGDATKAIKQQIMKVLDALES

SEQ ID NO: 9906 - protein, 684 aa, Homo sapiens
MAEGEDVPPLPTSSGDGWEKDLEEALEAGGCDLETLRNIIQGRPLPADLRAKVWKIALNVAGKGDSLASWDGILDLPEQNTIHKDCLQFIDQLSVPEEKAAELLLDIESVITFYCKSRNIKYSTSLSWIHLLKPLVHLQLPRSDLYNCFYAIMNKYIPRDCSQKGRPFHLFRLLIQYHEPELCSYLDTKKITPDSYALNWLGSLFACYCSTEVTQAIWDGYLQQADPFFIYFLMLIILVNAKEVILTQESDSKEEVIKFLENTPSSLNIEDIEDLFSLAQYYCSKTPASFRKDNHHLFGSTLLGIKDDDADLSQALCLAISVSEILQANQLQGEGVRFFVVDCRPAEQYNAGHLSTAFHLDSDLMLQNPSEFAQSVKSLLEAQKQSIESGSIAGGEHLCFMGSGREEEDMYMNMVLAHFLQKNKEYVSIASGGFMALQQHLADINVDGPENGYGHWIASTSGSRSSINSVDGESPNGSSDRGMKSLVNKMTVALKTKSVNVREKVISFIENTSTPVDRHVSSSDRVGKPYRGVKPVFSIGDEEEYDTDEIDSSSMSDDDRKEVVNIQTWINKPDVKHHFPCKEVKESGHMFPSHLLVTATHMYCLREIVSRKGLAYIQSRQALNSVVKITSKKKHPELITFKYGNSSASGIEILAIERYLIPNAGDATKAIKQQIMKVLDALES

SEQ ID NO: 9907 - protein, 446 aa, Homo sapiens
MREIVHIQAGQCGNQIGTKFWEVISDEHGIDPAGGYVGDSALQLERINVYYNESSSQKYVPRAALVDLEPGTMDSVRSGPFGQLFRPDNFIFGQTGAGNNWAKGHYTEGAELVDAVLDVVRKECEHCDCLQGFQLTHSLGGGTGSGMGTLLISKIREEFPDRIMNTFSVMPSPKVSDTVVEPYNATLSVHQLVENTDETYCIDNEALYDICFRTLKLTTPTYGDLNHLVSATMSGVTTSLRFPGQLNADLRKLAVNMVPFPRLHFFMPGFAPLTSRGSQQYRALTVPELTQQMFDARNMMAACDPRHGRYLTVATVFRGPMSMKEVDEQMLAIQSKNSSYFVEWIPNNVKVAVCDIPPRGLKMASTFIGNSTAIQELFKRISEQFSAMFRRKAFLHWFTGEGMDEMEFTEAESNMNDLVSEYQQYQDATANDGEEAFEDEEEEIDG

SEQ ID NO: 9908 - protein, 715 aa, Homo sapiens
MSQVMSSPLLAGGHAVSLAPCDEPRRTLHPAPSPSLPPQCSYYTTEGWGAQALMAPVPCMGPPGRLQQAPQVEAKATCFLPSPGEKALGTPEDLDSYIDFSLESLNQMILELDPTFQLLPPGTGGSQAELAQSTMSMRKKEESEALDIKYIEVTSARSRCHDGPQHCSSPSVTPPFGSLRSGGLLLSRDVPRETRSSSESLIFSGNQGRGHQRPLPPSEGLSPRPPNSPSISIPCMGSKASSPHGLGSPLVASPRLEKRLGGLAPQRGSRISVLSASPVSDVSYMFGSSQSLLHSSNSSHQSSSRSLESPANSSSSLHSLGSVSLCTRPSDFQAPRNPTLTMGQPRTPHSPPLAKEHASSCPPSITNSMVDIPIVLINGCPEPGSSPPQRTPGHQNSVQPGAASPSNPCPATRSNSQTLSDAPFTTCPEGPARDMQPTMKFVMDTSKYWFKPNITREQAIELLRKEEPGAFVIRDSSSYRGSFGLALKVQEVPASAQSRPGEDSNDLIRHFLIESSAKGVHLKGADEEPYFGSLSAFVCQHSIMALALPCKLTIPQRELGGADGASDSTDSPASCQKKSAGCHTLYLSSVSVETLTGALAVQKAISTTFERDILPTPTVVHFKVTEQGITLTDVQRKVFFRRHYPLTTLRFCGMDPEQRKWQKYCKPSWIFGFVAKSQTEPQENVCHLFAEYDMVQPASQVIGLVTALLQDAERM

SEQ ID NO: 9909 - protein, 183 aa, Homo sapiens
MQAPRAALVFALVIALVPVGRGNYEELENSGDTTVESERPNKVTIPSTFAAVTIKETLNANINSTNFAPDENQLEFILMVLIPLILLVLLLLSVVFLATYYKRKRTKQEPSSQGSQSALQTYELGSENVKVPIFEEDTPSVMEIEMEELDKWMNSMNRNADFECLPTLKEEKESNHNPSDSES

SEQ ID NO: 9910 - protein, 666 aa, Homo sapiens
MLPEAGSLWLLKLLRDIQLAQFYWPILEELNVTRPEHFDFVKPEDLDGIGMGRPAQRRLSEALKRLRSGPKSKNWVYKILGGFAPEHKEPTLPSDSPRHLPEPEGGLKCLIPEGAVCRGELLGSGCFGVVHRGLWTLPSGKSVPVAVKSLRVGPEGPMGTELGDFLREVSVMMNLEHPHVLRLHGLVLGQPLQMVMELAPLGSLHARLTAPAPTPPLLVALLCLFLRQLAGAMAYLGARGLVHRDLATRNLLLASPRTIKVADFGLVRPLGGARGRYVMGGPRPIPYAWCAPESLRHGAFSSASDVWMFGVTLWEMFSGGEEPWAGVPPYLILQRLEDRARLPRPPLCSRALYSLALRCWAPHPADRPSFSHLEGLLQEAGPSEACCVRDVTEPGALRMETGDPITVIEGSSSFHSPDSTIWKGQNGRTFKVGSFPASAVTLADAGGLPATRPVHRGTPARGDQHPGSIDGDRKKANLWDAPPARGQRRNMPLERMKGISRSLESVLSLGPRPTGGGSSPPEIRQARAVPQGPPGLPPRPPLSSSSPQPSQPSRERLPWPKRKPPHNHPMGMPGARKAAALSGGLLSDPELQRKIMEVELSVHGVTHQECQTALGATGGDVVSAIRNLKVDQLFHLSSRSRADCWRILEHYQWDLSAASRYVLARP

SEQ ID NO: 9911 - protein, 661 aa, Homo sapiens
MLPEAGSLWLLKLLRDIQLAQFYWPILEELNVTRPEHFDFVKPEDLDGIGMGRPAQRRLSEALKRLRSGPKSKNWVYKILGGFAPEHKEPTLPSDSPRHLPEPEGGLKCLIPEGAVCRGELLGSGCFGVVHRGLWTLPSGKSVPVAVKSLRVGPEGPMGTELGDFLREVSVMMNLEHPHVLRLHGLVLGQPLQMVMELAPLGSLHARLTAPAPTPPLLVALLCLFLRQLAGAMAYLGARGLVHRDLATRNLLLASPRTIKVADFGLVRPLGGARGRYVMGGPRPIPYAWCAPESLRHGAFSSASDVWMFGVTLWEMFSGGEEPWAGVPPYLILQRLEDRARLPRPPLCSRALYSLALRCWAPHPADRPSFSHLEGLLQEAGPSEACCVRDVTEPGALRMETGDPITVIEGSPDSTIWKGQNGRTFKVGSFPASAVTLADAGGLPATRPVHRGTPARGDQHPGSIDGDRKKANLWDAPPARGQRRNMPLERMKGISRSLESVLSLGPRPTGGGSSPPEIRQARAVPQGPPGLPPRPPLSSSSPQPSQPSRERLPWPKRKPPHNHPMGMPGARKAAALSGGLLSDPELQRKIMEVELSVHGVTHQECQTALGATGGDVVSAIRNLKVDQLFHLSSRSRADCWRILEHYQWDLSAASRYVLARP

SEQ ID NO: 9912 - protein, 435 aa, Homo sapiens
MAQAVWSRLGRILWLACLLPWAPAGVAAGLYELNLTTDSPATTGAVVTISASLVAKDNGSLALPADAHLYRFHWIHTPLVLTGKMEKGLSSTIRVVGHVPGEFPVSVWVTAADCWMCQPVARGFVVLPITEFLVGDLVVTQNTSLPWPSSYLTKTVLKVSFLLHDPSNFLKTALFLYSWDFGDGTQMVTEDSVVYYNYSIIGTFTVKLKVVAEWEEVEPDATRAVKQKTGDFSASLKLQETLRGIQVLGPTLIQTFQKMTVTLNFLGSPPLTVCWRLKPECLPLEEGECHPVSVASTAYNLTHTFRDPGDYCFSIRAENIISKTHQYHKIQVWPSRIQPAVFAFPCATLITVMLAFIMYMTLRNATQQKDMVEVADFDFSPMSDKNPEPPSGVRCCCQMCCGPFLLETPSEYLEIVRENHGLLPPLYKSVKTYTV

SEQ ID NO: 9913 - protein, 423 aa, Homo sapiens
MAQAVWSRLGRILWLACLLPWAPAGVAAGLYELNLTTDSPATTGAVVTISASLVAKDNGSLALPADAHLYRFHWIHTPLVLTGKMEKGLSSTIRVVGHVPGEFPVSVWVTAADCWMCQPVARGFVVLPITEFLVGDLVVTQNTSLPWPSSYLTKTVLKVSFLLHDPSNFLKTALFLYSWDFGDGTQMVTEDSVVYYNYSIIGTFTVKLKVVAEWEEVEPDATRAVKQKTGDFSASLKLQETLRGIQVLGPTLIQTFQKMTVTLNFLGSPPLTVCWRLKPECLPLEEGECHPVSVASTAYNLTHTFRDPGDYCFSIRAENIISKTHQYHKIQVWPSRIQPAVFAFPCATLITVMLAFIMYMTLRNATQQKDMVENPEPPSGVRCCCQMCCGPFLLETPSEYLEIVRENHGLLPPLYKSVKTYTV

SEQ ID NO: 9914 - protein, 321 aa, Homo sapiens
MAQAVWSRLGRILWLACLLPWAPAGVAAEFLVGDLVVTQNTSLPWPSSYLTKTVLKVSFLLHDPSNFLKTALFLYSWDFGDGTQMVTEDSVVYYNYSIIGTFTVKLKVVAEWEEVEPDATRAVKQKTGDFSASLKLQETLRGIQVLGPTLIQTFQKMTVTLNFLGSPPLTVCWRLKPECLPLEEGECHPVSVASTAYNLTHTFRDPGDYCFSIRAENIISKTHQYHKIQVWPSRIQPAVFAFPCATLITVMLAFIMYMTLRNATQQKDMVENPEPPSGVRCCCQMCCGPFLLETPSEYLEIVRENHGLLPPLYKSVKTYTV

SEQ ID NO: 9915 - protein, 1094 aa, Homo sapiens
MAARQAVGSGAQETCGLDRILEALKLLLSPGGSGSSSLQVTKHDVLLATLKSNLSALEDKFLKDPQWKNLKLLRDEIADKAEWPQNSVDVTWSFTSQTLLLLLCLKETMIRLAANFNPGKPNPRTPEVAPALSPDALSISQQKTVQFVLQFVVTLGICPYLMPGVGVPLRYRTEFGAVVQDVVCFDAAPDATRRLYTSCKALLNVAQHTSLGSLIFCHHFGDIAAGLCQLGFCPTKRKLLTPAEEVLTEEERTLSRGALRDMLDQVYQPLAVRELLILQGGPPQSCTDVKTQMRCRAPAWLRRLCGQLLSERLMRPNGVQAVVRGILEGAGAGAAGGSDAEVTAADWKKCDLIAKILASCPQQSLSPENYYRDICPQVLDLFHFQDKLTARQFQRVATTTFITLSRERPHLAAKYLLQPVLAPLHRCLNTAELSESDMVPGTILVTEEELSRCIEDVFKVYVVGNEPLTVLMDSLLPVLGVLFLLYCFTKQSVSHIRSLCQEILLWILGKLERKKAIASLKGFAGLDKAVPSLHSLCQFRVATQGGIMITIKEAISDEDEDEALYQKVSSEQGRVEHLGDLLSHCQECGLAGDFFIFCLKELTHVASENETELKTEPFSSKSLLELEQHQTLLVEGQERKLLVLQLMAVLCERMSEQIFTNVTQVVDFVAATLQRACASLAHQAESTVESQTLSMSMGLVAVMLGGAVQLKSSDFAVLKQLLPLLEKVSNTYPDPVIQELAVDLRITISTHGAFATEAVSMAAQSTLNRKDLEGKIEEQQQTSHERPTDVAHSHLEQQQSHETAPQTGLQSNAPIIPQGVNEPSTTTSQKSGSVTTEQLQEVLLSAYDPQIPTRAAALRTLSHWIEQREAKALEMQEKLLKIFLENLEHEDTFVYLSAIQGVALLSDVYPEKILPDLLAQYDSSKDKHTPETRMKVGEVLMRIVRALGDMVSKYREPLIHTFLRGVRDPDGAHRASSLANLGELCQRLDFLLGSVVHEVTACLIAVAKTDGEVQVRRAAIHVVVLLLRGLSQKATEVLSAVLKDLYHLLKHVVCLEPDDVAKLHAQLALEELDDIMKNFLFPPQKLEKKIMVLP

SEQ ID NO: 9916 - protein, 249 aa, Homo sapiens
MAARRSQRRRGRRGEPGTALLVPLALGLGLALACLGLLLAVVSLGSRASLSAQEPAQEELVAEEDQDPSELNPQTEESQDPAPFLNRLVRPRRSAPKGRKTRARRAIAAHYEVHPRPGQDGAQAGVDGTVSGWEEARINSSSPLRYNRQIGEFIVTRAGLYYLYCQVHFDEGKAVYLKLDLLVDGVLALRCLEEFSATAASSLGPQLRLCQVSGLLALRPGSSLRIRTLPWAHLKAAPFLTYFGLFQVH

SEQ ID NO: 9917 - protein, 330 aa, Homo sapiens
MAARRSQRRRGRRGEPGTALLVPLALGLGLALACLGLLLAVVSLGSRASLSAQEPAQEELVAEEDQDPSELNPQTEESQDPAPFLNRLVRPRRSAPKGRKTRARRAIAAHYEVHPRPGQDGAQAGVDGTVSGWEEARINSSSPLRYNRQIGEFIVTRAGLYYLYCQSSDALEAWENGERSRKRRAVLTQKQKKQHSVLHLVPINATSKDDSDVTEVMWQPALRRGRGLQAQGYGVRIQDAGVYLLYSQVLFQDVTFTMGQVVSREGQGRQETLFRCIRSMPSHPDRAYNSCYSAGVFHLHQGDILSVIIPRARAKLNLSPHGTFLGFVKL

SEQ ID NO: 9918 - protein, 2968 aa, Homo sapiens
MDGRDFGPQRSVHGPPPPLLSGLAMDSHRVGAATAGRLPASGLPGPLPPGKYMAGLNLHPHPGEAFLGSFVASGMGPSASSHGSPVPLPSDLSFRSPTPSNLPMVQLWAAHAHEGFSHLPSGLYPSYLHLNHLEPPSSGSPLLSQLGQPSIFDTQKGQGPGGDGFYLPTAGAPGSLHSHAPSARTPGGGHSSGAPAKGSSSRDGPAKERAGRGGEPPPLFGKKDPRARGEEASGPRGVVDLTQEARAEGRQDRGPPRLAERLSPFLAESKTKNAALQPSVLTMCNGGAGDVGLPALVAEAGRGGAKEAARQDEGARLLRRTETLLPGPRPCPSPLPPPPAPPKGPPAPPAATPAGVYTVFREQGREHRVVAPTFVPSVEAFDERPGPIQIASQARDARAREREAGRPGVLQAPPGSPRPLDRPEGLREKNSVIRSLKRPPPADAPTVRATRASPDPRAYVPAKELLKPEADPRPCERAPRGPAGPAAQQAAKLFGLEPGRPPPTGPEHKWKPFELGNFAATQMAVLAAQHHHSRAEEEAAVVAASSSKKAYLDPGAVLPRSAATCGRPVADMHSAAHGSGEASAMQSLIKYSGSFARDAVAVRPGGCGKKSPFGGLGTMKPEPAPTSAGASRAQARLPHSGGPAAGGGRQLKRDPERPESAKAFGREGSGAQGEAEVRHPPVGIAVAVARQKDSGGSGRLGPGLVDQERSLSLSNVKGHGRADEDCVDDRARHREERLLGARLDRDQEKLLRESKELADLARLHPTSCAPNGLNPNLMVTGGPALAGSGRWSADPAAHLATHPWLPRSGNASMWLAGHPYGLGPPSLHQGMAPAFPPGLGGSLPSAYQFVRDPQSGQLVVIPSDHLPHFAELMERATVPPLWPALYPPGRSPLHHAQQLQLFSQQHFLRQQEFLYLQQQAAQALELQRSAQLVQERLKAQEHRAEMEEKGSKRGLEAAGKAGLATAGPGLLPRKPPGLAAGPAGTYGKAVSPPPSPRASPVAALKAKVIQKLEDVSKPPAYAYPATPSSHPTSPPPASPPPTPGITRKEEAPENVVEKKDLELEKEAPSPFQALFSDIPPRYPFQALPPHYGRPYPFLLQPTAAADADGLAPDVPLPADGPERLALSPEDKPIRLSPSKITEPLREGPEEEPLAEREVKAEVEDMDEGPTELPPLESPLPLPAAEAMATPSPAGGCGGGLLEAQALSATGQSCAEPSECPDFVEGPEPRVDSPGRTEPCTAALDLGVQLTPETLVEAKEEPVEVPVAVPVVEAVPEEGLAQVAPSESQPTLEMSDCDVPAGEGQCPSLEPQEAVPVLGSTCFLEEASSDQFLPSLEDPLAGMNALAAAAELPQARPLPSPGAAGAQALEKLEAAESLVLEQSFLHGITLLSEIAELELERRSQEMGGAERALVARPSLESLLAAGSHMLREVLDGPVVDPLKNLRLPRELKPNKKYSWMRKKEERMYAMKSSLEDMDALELDFRMRLAEVQRQYKEKQRELVKLQRRRDSEDRREEPHRSLARRGPGRPRKRTHAPSALSPPRKRGKSGHSSGKLSSKSLLTSDDYELGAGIRKRHKGSEEEHDALIGMGKARGRNQTWDEHEASSDFISQLKIKKKKMASDQEQLASKLDKALSLTKQDKLKSPFKFSDSAGGKSKTSGGCGRYLTPYDSLLGKNRKALAKGLGLSLKSSREGKHKRAAKTRKMEVGFKARGQPKSAHSPFASEVSSYSYNTDSEEDEEFLKDEWPAQGPSSSKLTPSLLCSMVAKNSKAAGGPKLTKRGLAAPRTLKPKPATSRKQPFCLLLREAEARSSFSDSSEESFDQDESSEEEDEEEELEEEDEASGGGYRLGARERALSPGLEESGLGLLARFAASALPSPTVGPSLSVVQLEAKQKARKKEERQSLLGTEFEYTDSESEVKVRKRSPAGLLRPKKGLGEPGPSLAAPTPGARGPDPSSPDKAKLAVEKGRKARKLRGPKEPGFEAGPEASDDDLWTRRRSERIFLHDASAAAPAPVSTAPATKTSRCAKGGPLSPRKDAGRAKDRKDPRKKKKGKEAGPGAGLPPPRAPALPSEARAPHASSLTAAKRSKAKAKGKEVKKENRGKGGAVSKLMESMAAEEDFEPNQDSSFSEDEHLPRGGAVERPLTPAPRSCIIDKDELKDGLRVLIPMDDKLLYAGHVQTVHSPDIYRVVVEGERGNRPHIYCLEQLLQEAIIDVRPASTRFLPQGTRIAAYWSQQYRCLYPGTVVRGLLDLEDDGDLITVEFDDGDTGRIPLSHIRLLPPDYKIQCAEPSPALLVPSAKRRSRKTSKDTGEGKDGGTAGSEEPGAKARGRGRKPSAKAKGDRAATLEEGNPTDEVPSTPLALEPSSTPGSKKSPPEPVDKRAKAPKARPAPPQPSPAPPAFTSCPAPEPFAELPAPATSLAPAPLITMPATRPKPKKARAAEESGAKGPRRPGEEAELLVKLDHEGVTSPKSKKAKEALLLREDPGAGGWQEPKSLLSLGSYPPAAGSSEPKAPWPKATDGDLAQEPGPGLTFEDSGNPKSPDKAQAEQDGAEESESSSSSSSGSSSSSSSSSSSGSETEGEEEGDKNGDGGCGTGGRNCSAASSRAASPASSSSSSSSSSSSSSSSSSSSSSSSSSSSSSSSSSSSSSSSSSSSSSSSSSSSSSSSSSTTDEDSSCSSDDEAAPAPTAGPSAQAALPTKATKQAGKARPSAHSPGKKTPAPQPQAPPPQPTQPLQPKAQAGAKSRPKKREGVHLPTTKELAKRQRLPSVENRPKIAAFLPARQLWKWFGKPTQRRGMKGKARKLFYKAIVRGKEMIRIGDCAVFLSAGRPNLPYIGRIQSMWESWGNNMVVRVKWFYHPEETSPGKQFHQGQHWDQKSSRSLPAALRVSSQRKDFMERALYQSSHVDENDVQTVSHKCLVVGLEQYEQMLKTKKYQDSEGLYYLAGTYEPTTGMIFSTDGVPVLC

SEQ ID NO: 9919 - protein, 2256 aa, Homo sapiens
MDGRDFGPQRSVHGPPPPLLSGLAMDSHRVGAATAGRLPASGLPGPLPPGKYMAGLNLHPHPGEAFLGSFVASGMGPSASSHGSPVPLPSDLSFRSPTPSNLPMVQLWAAHAHEGFSHLPSGLYPSYLHLNHLEPPSSGSPLLSQLGQPSIFDTQKGQGPGGDGFYLPTAGAPGSLHSHAPSARTPGGGHSSGAPAKGSSSRDGPAKERAGRGGEPPPLFGKKDPRARGEEASGPRGVVDLTQEARAEGRQDRGPPRLAERLSPFLAESKTKNAALQPSVLTMCNGGAGDVGLPALVAEAGRGGAKEAARQDEGARLLRRTETLLPGPRPCPSPLPPPPAPPKGPPAPPAATPAGVYTVFREQGREHRVVAPTFVPSVEAFDERPGPIQIASQARDARAREREAGRPGVLQAPPGSPRPLDRPEGLREKNSVIRSLKRPPPADAPTVRATRASPDPRAYVPAKELLKPEADPRPCERAPRGPAGPAAQQAAKLFGLEPGRPPPTGPEHKWKPFELGNFAATQMAVLAAQHHHSRAEEEAAVVAASSSKKAYLDPGAVLPRSAATCGRPVADMHSAAHGSGEASAMQSLIKYSGSFARDAVAVRPGGCGKKSPFGGLGTMKPEPAPTSAGASRAQARLPHSGGPAAGGGRQLKRDPERPESAKAFGREGSGAQGEAEVRHPPVGIAVAVARQKDSGGSGRLGPGLVDQERSLSLSNVKGHGRADEDCVDDRARHREERLLGARLDRDQEKLLRESKELADLARLHPTSCAPNGLNPNLMVTGGPALAGSGRWSADPAAHLATHPWLPRSGNASMWLAGHPYGLGPPSLHQGMAPAFPPGLGGSLPSAYQFVRDPQSGQLVVIPSDHLPHFAELMERATVPPLWPALYPPGRSPLHHAQQLQLFSQQHFLRQQEFLYLQQQAAQALELQRSAQLVQERLKAQEHRAEMEEKGSKRGLEAAGKAGLATAGPGLLPRKPPGLAAGPAGTYGKAVSPPPSPRASPVAALKAKVIQKLEDVSKPPAYAYPATPSSHPTSPPPASPPPTPGITRKEEAPENVVEKKDLELEKEAPSPFQALFSDIPPRYPFQALPPHYGRPYPFLLQPTAAADADGLAPDVPLPADGPERLALSPEDKPIRLSPSKITEPLREGPEEEPLAEREVKAEVEDMDEGPTELPPLESPLPLPAAEAMATPSPAGGCGGGLLEAQALSATGQSCAEPSECPDFVEGPEPRVDSPGRTEPCTAALDLGVQLTPETLVEAKEEPVEVPVAVPVVEAVPEEGLAQVAPSESQPTLEMSDCDVPAGEGQCPSLEPQEAVPVLGSTCFLEEASSDQFLPSLEDPLAGMNALAAAAELPQARPLPSPGAAGAQALEKLEAAESLVLEQSFLHGITLLSEIAELELERRSQEMGGAERALVARPSLESLLAAGSHMLREVLDGPVVDPLKNLRLPRELKPNKKYSWMRKKEERMYAMKSSLEDMDALELDFRMRLAEVQRQYKEKQRELVKLQRRRDSEDRREEPHRSLARRGPGRPRKRTHAPSALSPPRKRGKSGHSSGKLSSKSLLTSDDYELGAGIRKRHKGSEEEHDALIGMGKARGRNQTWDEHEASSDFISQLKIKKKKMASDQEQLASKLDKALSLTKQDKLKSPFKFSDSAGGKSKTSGGCGRYLTPYDSLLGKNRKALAKGLGLSLKSSREGKHKRAAKTRKMEVGFKARGQPKSAHSPFASEVSSYSYNTDSEEDEEFLKDEWPAQGPSSSKLTPSLLCSMVAKNSKAAGGPKLTKRGLAAPRTLKPKPATSRKQPFCLLLREAEARSSFSDSSEESFDQDESSEEEDEEEELEEEDEASGGGYRLGARERALSPGLEESGLGLLARFAASALPSPTVGPSLSVVQLEAKQKARKKEERQSLLGTEFEYTDSESEVKVRKRSPAGLLRPKKGLGEPGPSLAAPTPGARGPDPSSPDKAKLAVEKGRKARKLRGPKEPGFEAGPEASDDDLWTRRRSERIFLHDASAAAPAPVSTAPATKTSRCAKGGPLSPRKDAGRAKDRKDPRKKKKGKEAGPGAGLPPPRAPALPSEARAPPPPPPPPPHPPLPPPPLPPPPLPLRLPPLPPPPLPRPHPPPPPPLPPLLPPPQTRTLPAARTMRQPPPPRLALPRRRRSPPRPPSRPARRGPRPTPQARRRPRPSPRRLLRSPHSLCSPRLRPGPRADPRRERASTSPPPRSWPSGSACRPWRTGPRSPPSCQPGSSGSGSASPPSGVA

SEQ ID NO: 9920 - protein, 414 aa, Homo sapiens
KEAPSPFQALFSDIPPRYPFQALPPHYGRPYPFLLQPTAAADADGLAPDVPLPADGPERLALSPEDKPIRLSPSKITEPLREGPEEEPLAEREVKAEVEDMDEGPTELPPLESPLPLPAAEAMATPSPAGGCGGGLLEAQALSATGQSCAEPSECPDFVEGPEPRVDSPGRTEPCTAALDLGVQLTPETLVEAKEEPVEVPVAVPVVEAVPEEGLAQVAPSESQPTLEMSDCDVPAGEGQCPSLEPQEAVPVLGSTCFLEEASSDQFLPSLEDPLAGMNALAAAAELPQARPLPSPGAAGAQALEKLEAAESLVLEQSFLHGITLLSEIAELELERRSPPQGLPPCMGQGSPMPAGLPDCARGPAPTLSGWPRLGEQSRVGLQPGVSVKGTRWRGPGTGPPWSKPSHYRKPQWC

SEQ ID NO: 9921 - protein, 187 aa, Homo sapiens
MPEVERKPKITASRKLLLKSLMLAKAKECWEQEHEEREAEKVRYLAERIPTLQTRGLSLSALQDLCRELHAKVEVVDEERYDIEAKCLHNTREIKDLKLKVMDLRGKFKRPPLRRVRVSADAMLRALLGSKHKVSMDLRANLKSVKKEDTEKERPVEVGDWRKNVEAMSGMEGRKKMFDAAKSPTSQ

SEQ ID NO: 9922 - protein, 476 aa, Homo sapiens
MSGPTWLPPKQPEPARAPQGRAIPRGTPGPPPAHGAALQPHPRVNFCPLPSEQCYQAPGGPEDRGPAWVGSHGVLQHTQGLPADRGGLRPGSLDAEIDLLSSTLAELNGGRGHASRRPDRQAYEPPPPPAYRTGSLKPNPASPLPASPYGGPTPASYTTASTPAGPAFPVQVKVAQPVRGCGPPRRGASQASGPLPGPHFPLPGRGEVWGPGYRSQREPGPGAKEEAAGVSGPAGRGRGGEHGPQVPLSQPPEDELDRLTKKLVHDMNHPPSGEYFGQCGGCGEDVVGDGAGVVALDRVFHVGCFVCSTCRAQLRGQHFYAVERRAYCEGCYVATLEKCATCSQPILDRILRAMGKAYHPGCFTCVVCHRGLDGIPFTVDATSQIHCIEDFHRKFAPRCSVCGGAIMPEPGQEETVRIVALDRSFHIGCYKCEECGLLLSSEGECQGCYPLDGHILCKACSAWRIQELSATVTTDC

SEQ ID NO: 9923 - protein, 106 aa, Homo sapiens
MSGPTWLPPKQPEPARAPQGRAIPRGTPGPPPAHGAVLPGPRGTGGSGAGVGGVPWSTPAHAGAPCRQGGPSPWKPGRRDRLAEQHAGRAEWGSGSCVTATRPTGI

SEQ ID NO: 9924 - protein, 80 aa, Homo sapiens
MSGPTWLPPKQPEPARAPQGRAIPRGTPGPPPAHGAGAPCRQGGPSPWKPGRRDRLAEQHAGRAEWGSGSCVTATRPTGI

SEQ ID NO: 9925 - protein, 407 aa, Homo sapiens
MELLEEDLTCPICCSLFDDPRVLPCSHNFCKKCLEGILEGSVRNSLWRPAPFKCPTCRKETSATGINSLQVNYSLKGIVEKYNKIKISPKMPVCKGHLGQPLNIFCLTDMQLICGICATRGEHTKHVFCSIEDAYAQERDAFESLFQSFETWRRGDALSRLDTLETSKRKSLQLLTKDSDKVKEFFEKLQHTLDQKKNEILSDFETMKLAVMQAYDPEINKLNTILQEQRMAFNIAEAFKDVSEPIVFLQQMQEFREKIKVIKETPLPPSNLPASPLMKNFDTSQWEDIKLVDVDKLSLPQDTGTFISKIPWSFYKLFLLILLLGLVIVFGPTMFLEWSLFDDLATWKGCLSNFSSYLTKTADFIEQSVFYWEQVTDGFFIFNERFKNFTLVVLNNVAEFVCKYKLL

SEQ ID NO: 9926 - protein, 175 aa, Homo sapiens
MELLEEDLTCPICCSLFDDPRVLPCSHNFCKKCLEGILEGSVRNSLWRPAPFKCPTCRKETSATGINSLQVNYSLKGIVEKYNKIKISPKMPVCKGHLGQPLNIFCLTDMQLICGICATRGEHTKHVFCSIEDAYAQERDAFESLFQSFETWRRGDALSRLDTLETSKRKSLQLD

SEQ ID NO: 9927 - protein, 410 aa, Homo sapiens
MDVMELLEEDLTCPICCSLFDDPRVLPCSHNFCKKCLEGILEGSVRNSLWRPAPFKCPTCRKETSATGINSLQVNYSLKGIVEKYNKIKISPKMPVCKGHLGQPLNIFCLTDMQLICGICATRGEHTKHVFCSIEDAYAQERDAFESLFQSFETWRRGDALSRLDTLETSKRKSLQLLTKDSDKVKEFFEKLQHTLDQKKNEILSDFETMKLAVMQAYDPEINKLNTILQEQRMAFNIAEAFKDVSEPIVFLQQMQEFREKIKVIKETPLPPSNLPASPLMKNFDTSQWEDIKLVDVDKLSLPQDTGTFISKIPWSFYKLFLLILLLGLVIVFGPTMFLEWSLFDDLATWKGCLSNFSSYLTKTADFIEQSVFYWEQVTDGFFIFNERFKNFTLVVLNNVAEFVCKYKLL

SEQ ID NO: 9928 - protein, 1208 aa, Homo sapiens
MDLHMMNCELLATCSALGYLEGDTYHKEPDCLESVKDLIRYLRHEDETRDVRQQLGAAQILQSDLLPILTQHHQDKPLFDAVIRLMVNLTQPALLCFGNLPKEPSFRHHFLQVLTYLQAYKEAFASEKAFGVLSETLYELLQLGWEERQEEDNLLIERILLLVRNILHVPADLDQEKKIDDDASAHDQLLWAIHLSGLDDLLLFLASSSAEEQWSLHVLEIVSLMFRDQNPEQLAGVGQGRLAQERSADFAELEVLRQREMAEKKTRALQRGNRHSRFGGSYIVQGLKSIGERDLIFHKGLHNLRNYSSDLGKQPKKVPKRRQAARELSIQRRSALNVRLFLRDFCSEFLENCYNRLMGSVKDHLLREKAQQHDETYYMWALAFFMAFNRAASFRPGLVSETLSVRTFHFIEQNLTNYYEMMLTDRKEAASWARRMHLALKAYQELLATVNEMDISPDEAVRESSRIIKNNIFYVMEYRELFLALFRKFDERCQPRSFLRDLVETTHLFLKMLERFCRSRGNLVVQNKQKKRRKKKKKVLDQAIVSGNVPSSPEEVEAVWPALAEQLQCCAQNSELSMDSVVPFDAASEVPVEEQRAEAMVRIQDCLLAGQAPQALTLLRSAREVWPEGDVFGSQDISPEEEIQLLKQILSAPLPRQQGPEERGAEEEEEEEEEEEEELQVVQVSEKEFNFLDYLKRFACSTVVRAYVLLLRSYQQNSAHTNHCIVKMLHRLAHDLKMEALLFQLSVFCLFNRLLSDPAAGAYKELVTFAKYILGKFFALAAVNQKAFVELLFWKNTAVVREMTEGYGSLDDRSSSRRAPTWSPEEEAHLRELYLANKDVEGQDVVEAILAHLNTVPRTRKQIIHHLVQMGLADSVKDFQRKGTHIVLWTGDQELELQRLFEEFRDSDDVLGHIMKNITAKRSRARIVDKLLALGLVAERRELYKKRQKKLASSILPNGAESLKDFCQEDLEEEENLPEEDSEEEEEGGSEAEQVQGSLVLSNENLGQSLHQEGFSIPLLWLQNCLIRAADDREEDGCSQAVPLVPLTEENEEAMENEQFQQLLRKLGVRPPASGQETFWRIPAKLSPTQLRRAAASLSQPEEEQKLQPELQPKVPGEQGSDEEHCKEHRAQALRALLLAHKKKAGLASPEEEDAVGKEPLKAAPKKRQLLDSDEEQEEDEGRNRAPELGAPGIQKKKRYQIEDDEDD

SEQ ID NO: 9929 - protein, 1207 aa, Homo sapiens
MDLHMMNCELLATCSALGYLEGDTYHKEPDCLESVKDLIRYLRHEDETRDVRQQLGAAQILQSDLLPILTQHHQDKPLFDAVIRLMVNLTQPALLCFGNLPKEPSFRHHFLQVLTYLQAYKEAFASEKAFGVLSETLYELLQLGWEERQEEDNLLIERILLLVRNILHVPADLDQEKIDDDASAHDQLLWAIHLSGLDDLLLFLASSSAEEQWSLHVLEIVSLMFRDQNPEQLAGVGQGRLAQERSADFAELEVLRQREMAEKKTRALQRGNRHSRFGGSYIVQGLKSIGERDLIFHKGLHNLRNYSSDLGKQPKKVPKRRQAARELSIQRRSALNVRLFLRDFCSEFLENCYNRLMGSVKDHLLREKAQQHDETYYMWALAFFMAFNRAASFRPGLVSETLSVRTFHFIEQNLTNYYEMMLTDRKEAASWARRMHLALKAYQELLATVNEMDISPDEAVRESSRIIKNNIFYVMEYRELFLALFRKFDERCQPRSFLRDLVETTHLFLKMLERFCRSRGNLVVQNKQKKRRKKKKKVLDQAIVSGNVPSSPEEVEAVWPALAEQLQCCAQNSELSMDSVVPFDAASEVPVEEQRAEAMVRIQDCLLAGQAPQALTLLRSAREVWPEGDVFGSQDISPEEEIQLLKQILSAPLPRQQGPEERGAEEEEEEEEEEEEELQVVQVSEKEFNFLDYLKRFACSTVVRAYVLLLRSYQQNSAHTNHCIVKMLHRLAHDLKMEALLFQLSVFCLFNRLLSDPAAGAYKELVTFAKYILGKFFALAAVNQKAFVELLFWKNTAVVREMTEGYGSLDDRSSSRRAPTWSPEEEAHLRELYLANKDVEGQDVVEAILAHLNTVPRTRKQIIHHLVQMGLADSVKDFQRKGTHIVLWTGDQELELQRLFEEFRDSDDVLGHIMKNITAKRSRARIVDKLLALGLVAERRELYKKRQKKLASSILPNGAESLKDFCQEDLEEEENLPEEDSEEEEEGGSEAEQVQGSLVLSNENLGQSLHQEGFSIPLLWLQNCLIRAADDREEDGCSQAVPLVPLTEENEEAMENEQFQQLLRKLGVRPPASGQETFWRIPAKLSPTQLRRAAASLSQPEEEQKLQPELQPKVPGEQGSDEEHCKEHRAQALRALLLAHKKKAGLASPEEEDAVGKEPLKAAPKKRQLLDSDEEQEEDEGRNRAPELGAPGIQKKKRYQIEDDEDD

SEQ ID NO: 9930 - protein, 198 aa, Homo sapiens
MELPDPVRQRLGNFSRAVFSDSNRTGPESNEGPENEMVSSLALQMSLYFNTYYFPLWWVSSIMMLHMKYSILPDYYKFIVITVIILITLIEAIRLYLGYVGNLQEKVPELAGFWLLSLLLQLPLILFLLFNEGLTNLPLEKAIHIIFTLFLAFQVVAAFLTLRKMVNQLAVRFHLQDFDRLSANRGDMRRMRSCIEEI

SEQ ID NO: 9931 - protein, 200 aa, Homo sapiens
MAWGGVHTCCFHLCCCCSWPQGAVPEELHKHPGQTLLLQCQYSPKRGPYQPKSWCQQTSPSRCTLLVTSSKPWTAVQKSHYTIWDKPNAGFFNITMIQLTQNDSGFYWCGIYNASENIITVLRNISLVVSPAPTTSPMWTLPWLPTSTVLITSPEGTSGHPSINGSETRKSRAPACLGSGGPRFLVLVLCGLLLAKGLML

SEQ ID NO: 9932 - protein, 1013 aa, Homo sapiens
MGLGTLSPRMLVWLVASGIVFYGELWVCAGLDYDYTFDGNEEDKTETIDYKDPCKAAVFWGDIALDDEDLNIFQIDRTIDLTQNPFGNLGHTTGGLGDHAMSKKRGALYQLIDRIRRIGFGLEQNNTVKGKVPLQFSGQNEKNRVPRAATSRTERIWPGGVIPYVIGGNFTGSQRAMFKQAMRHWEKHTCVTFIERSDEESYIVFTYRPCGCCSYVGRRGNGPQAISIGKNCDKFGIVVHELGHVIGFWHEHTRPDRDNHVTIIRENIQPGQEYNFLKMEPGEVNSLGERYDFDSIMHYARNTFSRGMFLDTILPSRDDNGIRPAIGQRTRLSKGDIAQARKLYRCPACGETLQESNGNLSSPGFPNGYPSYTHCIWRVSVTPGEKIVLNFTTMDLYKSSLCWYDYIEVRDGYWRKSPLLGRFCGDKLPEVLTSTDSRMWIEFRSSSNWVGKGFAAVYEAICGGEIRKNEGQIQSPNYPDDYRPMKECVWKITVSESYHVGLTFQSFEIERHDNCAYDYLEVRDGTSENSPLIGRFCGYDKPEDIRSTSNTLWMKFVSDGTVNKAGFAANFFKEEDECAKPDRGGCEQRCLNTLGSYQCACEPGYELGPDRRSCEAACGGLLTKLNGTITTPGWPKEYPPNKNCVWQVVAPTQYRISVKFEFFELEGNEVCKYDYVEIWSGLSSESKLHGKFCGAEVPEVITSQFNNMRIEFKSDNTVSKKGFKAHFFSDKDECSKDNGGCQHECVNTMGSYMCQCRNGFVLHDNKHDCKEAECEQKIHSPSGLITSPNWPDKYPSRKECTWEISATPGHRIKLAFSEFEIEQHQECAYDHLEVFDGETEKSPILGRLCGNKIPDPLVATGNKMFVRFVSDASVQRKGFQATHSTECGGRLKAESKPRDLYSHAQFGDNNYPGQVDCEWLLVSERGSRLELSFQTFEVEEEADCGYDYVELFDGLDSTAVGLGRFCGSGPPEEIYSIGDSVLIHFHTDDTINKKGFHIRYKSIRYPDTTHTKK

SEQ ID NO: 9933 - protein, 392 aa, Homo sapiens
MGLGTLSPRMLVWLVASGIVFYGELWVCAGLDYDYTFDGNEEDKTETIDYKDPCKAAVFWGDIALDDEDLNIFQIDRTIDLTQNPFGNLGHTTGGLGDHAMSKKRGALYQLIDRIRRIGFGLEQNNTVKGKVPLQFSGQNEKNRVPRAATSRTERIWPGGVIPYVIGGNFTGSQRAMFKQAMRHWEKHTCVTFIERSDEESYIVFTYRPCGCCSYVGRRGNGPQAISIGKNCDKFGIVVHELGHVIGFWHEHTRPDRDNHVTIIRENIQPGQEYNFLKMEPGEVNSLGERYDFDSIMHYARNTFSRGMFLDTILPSRDDNGIRPAIGQRTRLSKGDIAQARKLYRCPACGETLQESNGNLSSPGFPNGYPSYTHCIWRVSVTPGEKVVFSLC

SEQ ID NO: 9934 - protein, 1165 aa, Homo sapiens
MQDVQGPRPGSPGDAEDRRELGLHRGEVNFGGSGKKRGKFVRVPSGVAPSVLFDLLLAEWHLPAPNLVVSLVGEEQPFAMKSWLRDVLRKGLVKAAQSTGAWILTSALRVGLARHVGQAVRDHSLASTSTKVRVVAVGMASLGRVLHRRILEEAQEDFPVHYPEDDGGSQGPLCSLDSNLSHFILVEPGPPGKGDGLTELRLRLEKHISEQRAGYGGTGSIEIPVLCLLVNGDPNTLERISRAVEQAAPWLILVGSGGIADVLAALVNQPHLLVPKVAEKQFKEKFPSKHFSWEDIVRWTKLLQNITSHQHLLTVYDFEQEGSEELDTVILKALVKACKSHSQEPQDYLDELKLAVAWDRVDIAKSEIFNGDVEWKSCDLEEVMVDALVSNKPEFVRLFVDNGADVADFLTYGRLQELYRSVSRKSLLFDLLQRKQEEARLTLAGLGTQQAREPPAGPPAFSLHEVSRVLKDFLQDACRGFYQDGRPGDRRRAEKGPAKRPTGQKWLLDLNQKSENPWRDLFLWAVLQNRHEMATYFWAMGQEGVAAALAACKILKEMSHLETEAEAARATREAKYERLALDLFSECYSNSEARAFALLVRRNRCWSKTTCLHLATEADAKAFFAHDGVQAFLTRIWWGDMAAGTPILRLLGAFLCPALVYTNLITFSEEAPLRTGLEDLQDLDSLDTEKSPLYGLQSRVEELVEAPRAQGDRGPRAVFLLTRWRKFWGAPVTVFLGNVVMYFAFLFLFTYVLLVDFRPPPQGPSGPEVTLYFWVFTLVLEEIRQGFFTDEDTHLVKKFTLYVGDNWNKCDMVAIFLFIVGVTCRMLPSAFEAGRTVLAMDFMVFTLRLIHIFAIHKQLGPKIIVVERMMKDVFFFLFFLSVWLVAYGVTTQALLHPHDGRLEWIFRRVLYRPYLQIFGQIPLDEIDEARVNCSTHPLLLEDSPSCPSLYANWLVILLLVTFLLVTNVLLMNLLIAMFSYTFQVVQGNADMFWKFQRYNLIVEYHERPALAPPFILLSHLSLTLRRVFKKEAEHKREHLERDLPDPLDQKVVTWETVQKENFLSKMEKRRRDSEGEVLRKTAHRVDFIAKYLGGLREQEKRIKCLESQINYCSVLVSSVADVLAQGGGPRSSQHCGEGSQLVAADHRGGLDGWEQPGAGQPPSDT

SEQ ID NO: 9935 - protein, 1167 aa, Homo sapiens
MQDVQGPRPGSPGDAEDRRELGLHRGEVNFGGSGKKRGKFVRVPSGVAPSVLFDLLLAEWHLPAPNLVVSLVGEEQPFAMKSWLRDVLRKGLVKAAQSTGAWILTSALRVGLARHVGQAVRDHSLASTSTKVRVVAVGMASLGRVLHRRILEEAQVHEDFPVHYPEDDGGSQGPLCSLDSNLSHFILVEPGPPGKGDGLTELRLRLEKHISEQRAGYGGTGSIEIPVLCLLVNGDPNTLERISRAVEQAAPWLILVGSGGIADVLAALVNQPHLLVPKVAEKQFKEKFPSKHFSWEDIVRWTKLLQNITSHQHLLTVYDFEQEGSEELDTVILKALVKACKSHSQEPQDYLDELKLAVAWDRVDIAKSEIFNGDVEWKSCDLEEVMVDALVSNKPEFVRLFVDNGADVADFLTYGRLQELYRSVSRKSLLFDLLQRKQEEARLTLAGLGTQQAREPPAGPPAFSLHEVSRVLKDFLQDACRGFYQDGRPGDRRRAEKGPAKRPTGQKWLLDLNQKSENPWRDLFLWAVLQNRHEMATYFWAMGQEGVAAALAACKILKEMSHLETEAEAARATREAKYERLALDLFSECYSNSEARAFALLVRRNRCWSKTTCLHLATEADAKAFFAHDGVQAFLTRIWWGDMAAGTPILRLLGAFLCPALVYTNLITFSEEAPLRTGLEDLQDLDSLDTEKSPLYGLQSRVEELVEAPRAQGDRGPRAVFLLTRWRKFWGAPVTVFLGNVVMYFAFLFLFTYVLLVDFRPPPQGPSGPEVTLYFWVFTLVLEEIRQGFFTDEDTHLVKKFTLYVGDNWNKCDMVAIFLFIVGVTCRMLPSAFEAGRTVLAMDFMVFTLRLIHIFAIHKQLGPKIIVVERMMKDVFFFLFFLSVWLVAYGVTTQALLHPHDGRLEWIFRRVLYRPYLQIFGQIPLDEIDEARVNCSTHPLLLEDSPSCPSLYANWLVILLLVTFLLVTNVLLMNLLIAMFSYTFQVVQGNADMFWKFQRYNLIVEYHERPALAPPFILLSHLSLTLRRVFKKEAEHKREHLERDLPDPLDQKVVTWETVQKENFLSKMEKRRRDSEGEVLRKTAHRVDFIAKYLGGLREQEKRIKCLESQINYCSVLVSSVADVLAQGGGPRSSQHCGEGSQLVAADHRGGLDGWEQPGAGQPPSDT

SEQ ID NO: 9936 - protein, 872 aa, Homo sapiens
MQDVQGPRPGSPGDAEDRRELGLHRGEVNFGGSGKKRGKFVRVPSGVAPSVLFDLLLAEWHLPAPNLVVSLVGEEQPFAMKSWLRDVLRKGLVKAAQSTGAWILTSALRVGLARHVGQAVRDHSLASTSTKVRVVAVGMASLGRVLHRRILEEAQEDFPVHYPEDDGGSQGPLCSLDSNLSHFILVEPGPPGKGDGLTELRLRLEKHISEQRAGYGGTGSIEIPVLCLLVNGDPNTLERISRAVEQAAPWLILVGSGGIADVLAALVNQPHLLVPKVAEKQFKEKFPSKHFSWEDIVRWTKLLQNITSHQHLLTVYDFEQEGSEELDTVILKALVKACKSHSQEPQDYLDELKLAVAWDRVDIAKSEIFNGDVEWKSCDLEEVMVDALVSNKPEFVRLFVDNGADVADFLTYGRLQELYRSVSRKSLLFDLLQRKQEEARLTLAGLGTQQAREPPAGPPAFSLHEVSRVLKDFLQDACRGFYQDGRPGDRRRAEKGPAKRPTGQKWLLDLNQKSENPWRDLFLWAVLQNRHEMATYFWAMGQEGVAAALAACKILKEMSHLETEAEAARATREAKYERLALDLFSECYSNSEARAFALLVRRNRCWSKTTCLHLATEADAKAFFAHDGVQAFLTRIWWGDMAAGTPILRLLGAFLCPALVYTNLITFSEEAPLRTGLEDLQDLDSLDTEKSPLYGLQSRVEELVEAPRAQGDRGPRAVFLLTRWRKFWGAPVTVFLGNVVMYFAFLFLFTYVLLVDFRPPPQGPSGPEVTLYFWVFTLVLEEIRQGFFTDEDTHLVKKFTLYVGDNWNKCDMVAIFLFIVGVTCRMLPSAFEAGRTVLAMDFMVFTLRLIHIFAIHKQLGPKIIVVERMKPV

SEQ ID NO: 9937 - protein, 1564 aa, Homo sapiens
MSSKEVKTALKSARDAIRNKEYKEALKHCKTVLKQEKNNYNAWVFIGVAAAELEQPDQAQSAYKKAAELEPDQLLAWQGLANLYEKYNHINAKDDLPGVYQKLLDLYESVDKQKWCDVCKKLVDLYYQEKKHLEVARTWHKLIKTRQEQGAENEELHQLWRKLTQFLAESTEDQNNETQQLLFTAFENALGLSDKIPSEDHQVLYRHFIQSLSKFPHESARLKKACEGMINIYPTVQYPLEVLCLHLIESGNLTDEGQQYCCRLVEMDSKSGPGLIGLGIKALQDKKYEDAVRNLTEGLKESPVCTSGWYHLAEAQVKMHRPKEAVLSCSQALKIVDNLGASGNSLYQRNLCLHLKAEALIKLSDYDSSEEAIRTLDQISDADNIPGLLVLKSLAYRNKGSFDEAAKIMEDLLSSYPDLAEVHALEALIHFTKKDYLQAEKCFQRALEKDTEVAEYHYQLGLTYWFMGEETRKDKTKALTHFLKAARLDTYMGKVFCYLGHYYRDVVGDKNRARGCYRKAFELDDTDAESGAAAVDLSVELEDMEMALAILTTVTQKASAGTAKWAWLRRGLYYLKAGQHSQAVADLQAALRADPKDFNCWESLGEAYLSRGGYTTALKSFTKASELNPESIYSVFKVAAIQQILGKYKEAVAQYQMIIKKKEDYVPALKGLGECHLMMAKAALVDYLDGKAVDYIEKALEYFTCALQHRADVSCLWKLAGDACTCLYAVAPSKVNVHVLGVLLGQKEGKQVLKKNELLHLGGRCYGRALKLMSTSNTWCDLGINYYRQAQHLAETGSNMNDLKELLEKSLHCLKKAVRLDSNNHLYWNALGVVACYSGIGNYALAQHCFIKSIQSEQINAVAWTNLGVLYLTNENIEQAHEAFKMAQSLDPSYLMCWIGQALIAEAVGSYDTMDLFRHTTELNMHTEGALGYAYWVCTTLQDKSNRETELYQYNILQMNAIPAAQVILNKYVERIQNYAPAFTMLGYLNEHLQLKKEAANAYQRAILLLQTAEDQDTYNVAIRNYGRLLCSTGEYDKAIQAFKSTPLEVLEDIIGFALALFMKGLYKESSKAYERALSIVESEQDKAHILTALAITEYKQGKTDVAKTLLFKCSILKEPTTESLQALCALGLAMQDATLSKAALNELLKHIKHKDSNYQRCLLTSAIYALQGRSVAVQKQISKAVHSNPGDPALWSLLSRVVAQYAQRNAKGGVVAGNVAHILDSNHGKKALLYTAVNQLAMGSSSAEDEKNTALKTIQKAALLSPGDPAIWAGLMAACHADDKLALVNNTQPKRIDLYLALLSAVSASIKDEKFFENYNQSLEKWSLSQAVTGLIDTGRISEAETLCTKNLKSNPDQPAVILLLRQVQCKPLLESQKPLPDAVLEELQKTVMSNSTSVPAWQWLAHVYQSQGMMRAAEMCYRKSLQLASQRGSWSGKLSSLLRLALLALKVCMANISNDHWPSLVQEATTEALKLCFCPLAVLLQALLQFKRKMGARETRRLLERVVYQPGYPKSIASTARWYLLRHLYAKDDYELIDVLVNNAKTHGDTRALELNQRLSSQ

SEQ ID NO: 9938 - protein, 1134 aa, Homo sapiens
MSEPHRVQFTSLPGSLNPAFLKKSRKEEAGAGEQHQDCEPAAAAVRITLTLFEPDHKRCPEFFYPELVKNIRGKVKGLQPGDKKKDLSDPFNDEEKERHKVEALARKFEEKYGGKKRRKDRIQDLIDMGYGYDESDSFIDNSEAYDELVPASLTTKYGGFYINSGTLQFRQASESEDDFIKEKKKKSPKKRKLKEGGEKIKKKKKDDTYDKEKKSKKSKFSKAGFTALNASKEKKKKKYSGALSVKEMLKKFQKEKEAQKKREEEHKPVAVPSAEAQGLRELEGASDPLLSLFGSTSDNDLLQAATAMDSLTDLDLEHLLSESPEGSPFRDMDDGSDSLGVGLDQEFRQPSSLPEGLPAPLEKRVKELAQAARAAEGESRQKFFTQDINGILLDIEAQTRELSSQVRSGVYAYLASFLPCSKDALLKRARKLHLYEQGGRLKEPLQKLKEAIGRAMPEQMAKYQDECQAHTQAKVAKMLEEEKDKEQRDRICSDEEEDEEKGGRRIMGPRKKFQWNDEIRELLCQVVKIKLESQDLERNNKAQAWEDCVKGFLDAEVKPLWPKGWMQARTLFKESRRGHGHLTSILAKKKVMAPSKIKVKESSTKPDKKVSVPSGQIGGPIALPSDHQTGGLSIGASSRELPSQASGGLANPPPVNLEDSLDEDLIRNPASSVEAVSKELAALNSRAAGNSEFTLPAPSKAPAEKVGGVLCTEEKRNFAKPSPSAPPPASSLQSPLNFLAEQALALGQSSQEKKPESSGYKELSCQAPLNKGLPEVHQSKAKHHSLPRTSHGPQVAVPVPGPQVKVFHAGTQQQKNFTPPSPFANKLQGPKASPTQCHRSLLQLVKTAAKGQGFHPSAPATSGGLSASSSSSHKTPASSSSALSHPAKPHSVSSAGSSYKNNPFASSISKHGVSSGSSSSGGTPVQSSVSGSLVPGIQPPSVGQATSRPVPSSAGKKMPVSQKLTLVAPPGGPNGDSSGGTQGVAKLLTSPSLKPSAVSSVTSSTSLSKGASGTVLLAGSSLMASPYKSSSPKLSGAMSSNSLGIITPVPIPVHVLSFSADSSAKAGVSKDAIVTGPAPGSFHHGLGHSLLAGLHSSPPHAAPLPHAAVPTHIPQSLPGASQLHGKGPAVPRKL

SEQ ID NO: 9939 - protein, 1104 aa, Homo sapiens
MSEPHRVQFTSLPGSLNPAFLKKSRKEEAGAGEQHQDCEPAAAAVRITLTLFEPDHKRCPEFFYPELVKNIRGKVKGLQPGDKKKDLSDPFNDEEKERHKVEALARKFEEKYGGKKRRKDRIQDLIDMGYGYDESDSFIDNSEAYDELVPASLTTKYGGFYINSGTLQFRQASESEDDFIKEKKKKSPKKRKLKEGGEKIKKKKKDDTYDKEKKSKKSKFSKAGFTALNASKEKKKKKYSGALSVKEMLKKFQKEKEAQKKREEEHKPVAVPSAEAQGLRELEGASDPLLSLFGSTSDNDLLQAATAMDSLTDLDLEHLLSESPEGSPFRDMDDGSDSLGVGLDQEFRQPSSLPEGLPAPLEKRVKELAQAARAAEGESRQKFFTQDINGILLDIEAQTRELSSQVRSGVYAYLASFLPCSKDALLKRARKLHLYEQGGRLKEPLQKLKEAIGRAMPEQMAKYQDECQAHTQAKVAKMLEEEKDKEQRDRICSDEEEDEEKGGRRIMGPRKKFQWNDEIRELLCQVVKIKLESQDLERNNKAQAWEDCVKGFLDAEVKPLWPKGWMQARTLFKESRRGHGHLTSILAKKKVMAPSKIKVKESSTKPDKKVSVPSGQIGGPIALPSDHQTGGLSIGASSRELPSQASGGLANPPPVNLEDSLDEDLIRNPASSVEAVSKELAALNSRAAGNSEFTLPAPSKAPAEKVGGVLCTEEKRNFAKPSPSAPPPASSLQSPLNFLAEQALALGQSSQEKKPESSGYKELSCQAPLNKGLPEVHQSKAKHHSLPRTSHGPQVAVPVPGPQVKVFHAGTQQQKNFTPPSPFANKLQGPKASPTQCHRSLLQLVKTAAKGQGFHPSAPATSGGLSASSSSSHKTPASSSSALSHPAKPHSVSSAGSSYKNNPFASSISKHGVSSGSSSSGGTPVQSSVSGSLVPGIQPPSVGQATSRPVPSSAGKKMPVSQKLTLVAPPGGPNGDSSGGTQGVAKLLTSPSLKPSAVSSVTSSTSLSKGASGTVLLAGSSLMASPYKSSSPKLSGAMSSNSLGIITPVPIPVHVLSFSADSSAKAGVSKDAIVTGPAPGSFHHGLGHSASQLHGKGPAVPRKL

SEQ ID NO: 9940 - protein, 475 aa, Homo sapiens
MSPEVTCPRRGHLPRFHPRTWVEPVVASSQVAASLYDAGLLLVVKASYGTGGSSNHSASPSPRGALEDQQQRAISNFYIIYNLVVGLSPLLSAYGLGWLSDRYHRKISICMSLLGFLLSRLGLLLKVLLDWPVEVLYGAAALNGLFGGFSAFWSGVMALGSLGSSEGRRSVRLILIDLMLGLAGFCGSMASGHLFKQMAGHSGQGLILTACSVSCASFALLYSLLVLKVPESVAKPSQELPAVDTVSGTVGTYRTLDPDQLDQQYAVGHPPSPGKAKPHKTTIALLFVGAIIYDLAVVGTVDVIPLFVLREPLGWNQVQVGYGMAAGYTIFITSFLGVLVFSRCFRDTTMIMIGMVSFGSGALLLAFVKETYMFYIARAVMLFALIPVTTIRSAMSKLIKGSSYGKVFVILQLSLALTGVVTSTLYNKIYQLTMDMFVGSCFALSSFLSFLAIIPISIVAYKQVPLSPYGDIIEK

SEQ ID NO: 9941 - protein, 142 aa, Homo sapiens
MGDKPPGFRGSRDWIGCVEASLCLAHFGGPQGRLCHVPRGVGLHGELERLYSHFAGGGGPVMVGGDADARSKALLGVCVGSGTEAYVLVLDPHYWGTPKSPSELQAAGWVGWQEVSAAFDPNSFYNLCLTSLSSQQQQRTLD

SEQ ID NO: 9942 - protein, 565 aa, Homo sapiens
MPQASEHRLGRTREPPVNIQPRVGSKLPFAPRARSKERRNPASGPNPMLRPLPPRPGLPDERLKKLELGRGRTSGPRPRGPLRADHGVPLPGSPPPTVALPLPSRTNLARSKSVSSGDLRPMGIALGGHRGTGELGAALSRLALRPEPPTLRRSTSLRRLGGFPGPPTLFSIRTEPPASHGSFHMISARSSEPFYSDDKMAHHTLLLGSGHVGLRNLGNTCFLNAVLQCLSSTRPLRDFCLRRDFRQEVPGGGRAQELTEAFADVIGALWHPDSCEAVNPTRFRAVFQKYVPSFSGYSQQDAQEFLKLLMERLHLEINRRGRRAPPILANGPVPSPPRRGGALLEEPELSDDDRANLMWKRYLEREDSKIVDLFVGQLKSCLKCQACGYRSTTFEVFCDLSLPIPKKGFAGGKVSLRDCFNLFTKEEELESENAPVCDRCRQKTRSTKKLTVQRFPRILVLHLNRFSASRGSIKKSSVGVDFPLQRLSLGDFASDKAGSPVYQLYALCNHSGSVHYGHYTALCRCQTGWHVYNDSRVSPVSENQVASSEGYVLFYQLMQEPPRCL

SEQ ID NO: 9943 - protein, 382 aa, Homo sapiens
MPQASEHRLGRTREPPVNIQPRVGSKLPFAPRARSKERRNPASGPNPMLRPLPPRPGLPDERLKKLELGRGRTSGPRPRGPLRADHGVPLPGSPPPTVALPLPSRTNLARSKSVSSGDLRPMGIALGGHRGTGELGAALSRLALRPEPPTLRRSTSLRRLGGFPGPPTLFSIRTEPPASHGSFHMISARSSEPFYSDDKMAHHTLLLGSGHVGLRNLGNTCFLNAVLQCLSSTRPLRDFCLRRDFRQEVPGGGRAQELTEAFADVIGALWHPDSCEAVNPTRFRAVFQKYVPSFSGYSQQDAQEFLKLLMERLHLEINRRGRRAPPILANGPVPSPPRRGGALLEEPELSDDDRANLMWKRYLEREDSKIVGMEWGKAMREN

SEQ ID NO: 9944 - protein, 551 aa, Homo sapiens
MPQASEHRLGRTREPPVNIQPRVGSKLPFAPRARSKERRNPASGPNPMLRPLPPRPGLPDERLKKLELGRGRTSGPRPRGPLRADHGVPLPGSPPPTVALPLPSRTNLARSKSVSSGDLRPMGIALGGHRGTGELGAALSRLALRPEPPTLRRSTSLRRLGGFPGPPTLFSIRTEPPASHGSFHMISARSSEPFYSDDKMAHHTLLLGSGHVGLRNLGNTCFLNAVLQCLSSTRPLRDFCLRRDFRQEVPGGGRAQELTEAFADVIGALWHPDSCEAVNPTRFRAVFQKYVPSFSGYSQQDAQEFLKLLMERLHLEINRRGRRAPPILANGPVPSPPRRGGALLEEPELSDDDRANLMWKRYLEREDSKIVDLFVGQLKSCLKCQACGYRSTTFEVFCDLSLPIPKKGFAGGKVSLRDCFNLFTKEEELESENAPVCDRCRQKTRSTKKLTVQRFPRILVLHLNRFSASRGSIKKSSVGVDFPLQRLSLGDFASDKAGSVHYGHYTALCRCQTGWHVYNDSRVSPVSENQVASSEGYVLFYQLMQEPPRCL

SEQ ID NO: 9945 - protein, 931 aa, Homo sapiens
MRKGLRATAARCGLGLGYLLQMLVLPALALLSASGTGSAAQDDDFFHELPETFPSDPPEPLPHFLIEPEEAYIVKNKPVNLYCKASPATQIYFKCNSEWVHQKDHIVDERVDETSGLIVREVSIEISRQQVEELFGPEDYWCQCVAWSSAGTTKSRKAYVRIAYLRKTFEQEPLGKEVSLEQEVLLQCRPPEGIPVAEVEWLKNEDIIDPVEDRNFYITIDHNLIIKQARLSDTANYTCVAKNIVAKRKSTTATVIVYVNGGWSTWTEWSVCNSRCGRGYQKRTRTCTNPAPLNGGAFCEGQSVQKIACTTLCPVDGRWTPWSKWSTCGTECTHWRRRECTAPAPKNGGKDCDGLVLQSKNCTDGLCMQTAPDSDDVALYVGIVIAVIVCLAISVVVALFVYRKNHRDFESDIIDSSALNGGFQPVNIKAARQDLLAVPPDLTSAAAMYRGPVYALHDVSDKIPMTNSPILDPLPNLKIKVYNTSGAVTPQDDLSEFTSKLSPQMTQSLLENEALSLKNQSLARQTDPSCTAFGSFNSLGGHLIVPNSGVSLLIPAGAIPQGRVYEMYVTVHRKETMRPPMDDSQTLLTPVVSCGPPGALLTRPVVLTMHHCADPNTEDWKILLKNQAAQGQWEDVVVVGEENFTTPCYIQLDAEACHILTENLSTYALVGHSTTKAAAKRLKLAIFGPLCCSSLEYSIRVYCLDDTQDALKEILHLERQMGGQLLEEPKALHFKGSTHNLRLSIHDIAHSLWKSKLLAKYQEIPFYHVWSGSQRNLHCTFTLERFSLNTVELVCKLCVRQVEGEGQIFQLNCTVSEEPTGIDLPLLDPANTITTVTGPSAFSIPLPIRQKLCSSLDAPQTRGHDWRMLAHKLNLDRYLNYFATKSSPTGVILDLWEAQNFPDGNLSMLAAVLEEMGRHETVVSLAAEGQY

SEQ ID NO: 9946 - protein, 597 aa, Homo sapiens
MRKGLRATAARCGLGLGYLLQMLVLPALALLSASGTGSAAQDDDFFHELPETFPSDPPEPLPHFLIEPEEAYIVKNKPVNLYCKASPATQIYFKCNSEWVHQKDHIVDERVDETSGLIVREVSIEISRQQVEELFGPEDYWCQCVAWSSAGTTKSRKAYVRIAYLRKTFEQEPLGKEVSLEQEVLLQCRPPEGIPVAEVEWLKNEDIIDPVEDRNFYITIDHNLIIKQARLSDTANYTCVAKNIVAKRKSTTATVIVYVNGGWSTWTEWSVCNSRCGRGYQKRTRTCTNPAPLNGGAFCEGQSVQKIACTTLCPVDGRWTPWSKWSTCGTECTHWRRRECTAPAPKNGGKDCDGLVLQSKNCTDGLCMQSFIYPISTEQRTQNEYGFSSAPDSDDVALYVGIVIAVIVCLAISVVVALFVYRKNHRDFESDIIDSSALNGGFQPVNIKAARQDLLAVPPDLTSAAAMYRGPVYALHDVSDKIPMTNSPILDPLPNLKIKVYNTSGAVTPQDDLSEFTSKLSPQMTQSLLENEALSLKNQSLARQTDPSCTAFGSFNSLGGHLIVPNSGVSLLIPAGAIPQGRVYEMYVTVHRKETMR

SEQ ID NO: 9947 - protein, 207 aa, Homo sapiens
MSSDRQRSDDESPSTSSGSSDADQRDPAAPEPEEQEERKPSATQQKKNTKLSSKTTAKLSTSAKRIQKELAEITLDPPPNCSAGPKGDNIYEWRSTILGPPGSVYEGGVFFLDITFSSDYPFKPPKVTFRTRIYHCNINSQGVICLDILKDNWSPALTISKVLLSICSLLTDCNPADPLVGSIATQYLTNRAEHDRIARQWTKRYAT

SEQ ID NO: 9948 - protein, 1102 aa, Homo sapiens
MNHQQQQQQQKAGEQQLSEPEDMEMEAGDTDDPPRITQNPVINGNVALSDGHNTAEEDMEDDTSWRSEATFQFTVERFSRLSESVLSPPCFVRNLPWKIMVMPRFYPDRPHQKSVGFFLQCNAESDSTSWSCHAQAVLKIINYRDDEKSFSRRISHLFFHKENDWGFSNFMAWSEVTDPEKGFIDDDKVTFEVFVQADAPHGVAWDSKKHTGYVGLKNQGATCYMNSLLQTLFFTNQLRKAVYMMPTEGDDSSKSVPLALQRVFYELQHSDKPVGTKKLTKSFGWETLDSFMQHDVQELCRVLLDNVENKMKGTCVEGTIPKLFRGKMVSYIQCKEVDYRSDRREDYYDIQLSIKGKKNIFESFVDYVAVEQLDGDNKYDAGEHGLQEAEKGVKFLTLPPVLHLQLMRFMYDPQTDQNIKINDRFEFPEQLPLDEFLQKTDPKDPANYILHAVLVHSGDNHGGHYVVYLNPKGDGKWCKFDDDVVSRCTKEEAIEHNYGGHDDDLSVRHCTNAYMLVYIRESKLSEVLQAVTDHDIPQQLVERLQEEKRIEAQKRKERQEAHLYMQVQIVAEDQFCGHQGNDMYDEEKVKYTVFKVLKNSSLAEFVQSLSQTMGFPQDQIRLWPMQARSNGTKRPAMLDNEADGNKTMIELSDNENPWTIFLETVDPELAASGATLPKFDKDHDVMLFLKMYDPKTRSLNYCGHIYTPISCKIRDLLPVMCDRAGFIQDTSLILYEEVKPNLTERIQDYDVSLDKALDELMDGDIIVFQKDDPENDNSELPTAKEYFRDLYHRVDVIFCDKTIPNDPGFVVTLSNRMNYFQVAKTVAQRLNTDPMLLQFFKSQGYRDGPGNPLRHNYEGTLRDLLQFFKPRQPKKLYYQQLKMKITDFENRRSFKCIWLNSQFREEEITLYPDKHGCVRDLLEECKKAVELGEKASGKLRLLEIVSYKIIGVHQEDELLECLSPATSRTFRIEEIPLDQVDIDKENEMLVTVAHFHKEVFGTFGIPFLLRIHQGEHFREVMKRIQSLLDIQEKEFEKFKFAIVMMGRHQYINEDEYEVNLKDFEPQPGNMSHPRPWLGLDHFNKAPKRSRYTYLEKAIKIHN

SEQ ID NO: 9949 - protein, 1086 aa, Homo sapiens
MAGNHRLGLEAGDTDDPPRITQNPVINGNVALSDGHNTAEEDMEDDTSWRSEATFQFTVERFSRLSESVLSPPCFVRNLPWKIMVMPRFYPDRPHQKSVGFFLQCNAESDSTSWSCHAQAVLKIINYRDDEKSFSRRISHLFFHKENDWGFSNFMAWSEVTDPEKGFIDDDKVTFEVFVQADAPHGVAWDSKKHTGYVGLKNQGATCYMNSLLQTLFFTNQLRKAVYMMPTEGDDSSKSVPLALQRVFYELQHSDKPVGTKKLTKSFGWETLDSFMQHDVQELCRVLLDNVENKMKGTCVEGTIPKLFRGKMVSYIQCKEVDYRSDRREDYYDIQLSIKGKKNIFESFVDYVAVEQLDGDNKYDAGEHGLQEAEKGVKFLTLPPVLHLQLMRFMYDPQTDQNIKINDRFEFPEQLPLDEFLQKTDPKDPANYILHAVLVHSGDNHGGHYVVYLNPKGDGKWCKFDDDVVSRCTKEEAIEHNYGGHDDDLSVRHCTNAYMLVYIRESKLSEVLQAVTDHDIPQQLVERLQEEKRIEAQKRKERQEAHLYMQVQIVAEDQFCGHQGNDMYDEEKVKYTVFKVLKNSSLAEFVQSLSQTMGFPQDQIRLWPMQARSNGTKRPAMLDNEADGNKTMIELSDNENPWTIFLETVDPELAASGATLPKFDKDHDVMLFLKMYDPKTRSLNYCGHIYTPISCKIRDLLPVMCDRAGFIQDTSLILYEEVKPNLTERIQDYDVSLDKALDELMDGDIIVFQKDDPENDNSELPTAKEYFRDLYHRVDVIFCDKTIPNDPGFVVTLSNRMNYFQVAKTVAQRLNTDPMLLQFFKSQGYRDGPGNPLRHNYEGTLRDLLQFFKPRQPKKLYYQQLKMKITDFENRRSFKCIWLNSQFREEEITLYPDKHGCVRDLLEECKKAVELGEKASGKLRLLEIVSYKIIGVHQEDELLECLSPATSRTFRIEEIPLDQVDIDKENEMLVTVAHFHKEVFGTFGIPFLLRIHQGEHFREVMKRIQSLLDIQEKEFEKFKFAIVMMGRHQYINEDEYEVNLKDFEPQPGNMSHPRPWLGLDHFNKAPKRSRYTYLEKAIKIHN

SEQ ID NO: 9950 - protein, 521 aa, Homo sapiens
MDTESQYSGYSYKSGHSRSSRKHRDRRDRHRSKSRDGGRGDKSVTIQAPGEPLLDNESTRGDERDDNWGETTTVVTGTSEHSISHDDLTRIAKDMEDSVPLDCSRHLGVAAGATLALLSFLTPLAFLLLPPLLWREELEPCGTACEGLFISVAFKLLILLLGSWALFFRRPKASLPRVFVLRALLMVLVFLLVVSYWLFYGVRILDARERSYQGVVQFAVSLVDALLFVHYLAVVLLELRQLQPQFTLKVVRSTDGASRFYNVGHLSIQRVAVWILEKYYHDFPVYNPALLNLPKSVLAKKVSGFKVYSLGEENSTNNSTGQSRAVIAAAARRRDNSHNEYYYEEAEHERRVRKRRARLVVAVEEAFTHIKRLQEEEQKNPREVMDPREAAQAIFASMARAMQKYLRTTKQQPYHTMESILQHLEFCITHDMTPKAFLERYLAAGPTIQYHKERWLAKQWTLVSEEPVTNGLKDGIVFLLKRQDFSLVVSTKKVPFFKLSEEFVDPKSHKFVMRLQSETSV

SEQ ID NO: 9951 - protein, 249 aa, Homo sapiens
MASASGAMAKHEQILVLDPPTDLKFKGPFTDVVTTNLKLRNPSDRKVCFKVKTTAPRRYCVRPNSGIIDPGSTVTVSVMLQPFDYDPNEKSKHKFMVQTIFAPPNTSDMEAVWKEAKPDELMDSKLRCVFEMPNENDKLNDMEPSKAVPLNASKQDGPMPKPHSVSLNDTETRKLMEECKRLQGEMMKLSEENRHLRDEGLRLRKVAHSDKPGSTSTASFRDNVTSPLPSLLVVIAAIFIGFFLGKFIL

SEQ ID NO: 9952 - protein, 294 aa, Homo sapiens
MASASGAMAKHEQILVLDPPTDLKFKGPFTDVVTTNLKLRNPSDRKVCFKVKTTAPRRYCVRPNSGIIDPGSTVTVSVMLQPFDYDPNEKSKHKFMVQTIFAPPNTSDMEAVWKEAKPDELMDSKLRCVFEMPNENDKLGITPPGNAPTVTSMSSINNTVATPASYHTKDDPRGLSVLKQEKQKNDMEPSKAVPLNASKQDGPMPKPHSVSLNDTETRKLMEECKRLQGEMMKLSEENRHLRDEGLRLRKVAHSDKPGSTSTASFRDNVTSPLPSLLVVIAAIFIGFFLGKFIL

SEQ ID NO: 9953 - protein, 232 aa, Homo sapiens
MNFLLSWVHWSLALLLYLHHAKWSQAAPMAEGGGQNHHEVVKFMDVYQRSYCHPIETLVDIFQEYPDEIEYIFKPSCVPLMRCGGCCNDEGLECVPTEESNITMQIMRIKPHQGQHIGEMSFLQHNKCECRPKKDRARQEKKSVRGKGKGQKRKRKKSRYKSWSVYVGARCCLMPWSLPGPHPCGPCSERRKHLFVQDPQTCKCSCKNTDSRCKARQLELNERTCRCDKPRR

SEQ ID NO: 9954 - protein, 215 aa, Homo sapiens
MNFLLSWVHWSLALLLYLHHAKWSQAAPMAEGGGQNHHEVVKFMDVYQRSYCHPIETLVDIFQEYPDEIEYIFKPSCVPLMRCGGCCNDEGLECVPTEESNITMQIMRIKPHQGQHIGEMSFLQHNKCECRPKKDRARQEKKSVRGKGKGQKRKRKKSRYKSWSVPCGPCSERRKHLFVQDPQTCKCSCKNTDSRCKARQLELNERTCRCDKPRR

SEQ ID NO: 9955 - protein, 209 aa, Homo sapiens
MNFLLSWVHWSLALLLYLHHAKWSQAAPMAEGGGQNHHEVVKFMDVYQRSYCHPIETLVDIFQEYPDEIEYIFKPSCVPLMRCGGCCNDEGLECVPTEESNITMQIMRIKPHQGQHIGEMSFLQHNKCECRPKKDRARQEKKSVRGKGKGQKRKRKKSRPCGPCSERRKHLFVQDPQTCKCSCKNTDSRCKARQLELNERTCRCDKPRR

SEQ ID NO: 9956 - protein, 191 aa, Homo sapiens
MNFLLSWVHWSLALLLYLHHAKWSQAAPMAEGGGQNHHEVVKFMDVYQRSYCHPIETLVDIFQEYPDEIEYIFKPSCVPLMRCGGCCNDEGLECVPTEESNITMQIMRIKPHQGQHIGEMSFLQHNKCECRPKKDRARQENPCGPCSERRKHLFVQDPQTCKCSCKNTDSRCKARQLELNERTCRCDKPRR

SEQ ID NO: 9957 - protein, 174 aa, Homo sapiens
MNFLLSWVHWSLALLLYLHHAKWSQAAPMAEGGGQNHHEVVKFMDVYQRSYCHPIETLVDIFQEYPDEIEYIFKPSCVPLMRCGGCCNDEGLECVPTEESNITMQIMRIKPHQGQHIGEMSFLQHNKCECRPKKDRARQENPCGPCSERRKHLFVQDPQTCKCSCKNTDSRCKM

SEQ ID NO: 9958 - protein, 171 aa, Homo sapiens
MNFLLSWVHWSLALLLYLHHAKWSQAAPMAEGGGQNHHEVVKFMDVYQRSYCHPIETLVDIFQEYPDEIEYIFKPSCVPLMRCGGCCNDEGLECVPTEESNITMQIMRIKPHQGQHIGEMSFLQHNKCECRPKKDRARQEKKSVRGKGKGQKRKRKKSRYKSWSVCDKPRR

SEQ ID NO: 9959 - protein, 191 aa, Homo sapiens
MNFLLSWVHWSLALLLYLHHAKWSQAAPMAEGGGQNHHEVVKFMDVYQRSYCHPIETLVDIFQEYPDEIEYIFKPSCVPLMRCGGCCNDEGLECVPTEESNITMQIMRIKPHQGQHIGEMSFLQHNKCECRPKKDRARQENPCGPCSERRKHLFVQDPQTCKCSCKNTDSRCKARQLELNERTCRSLTRKD

SEQ ID NO: 9960 - protein, 147 aa, Homo sapiens
MNFLLSWVHWSLALLLYLHHAKWSQAAPMAEGGGQNHHEVVKFMDVYQRSYCHPIETLVDIFQEYPDEIEYIFKPSCVPLMRCGGCCNDEGLECVPTEESNITMQIMRIKPHQGQHIGEMSFLQHNKCECRPKKDRARQEKCDKPRR

SEQ ID NO: 9961 - protein, 137 aa, Homo sapiens
MNFLLSWVHWSLALLLYLHHAKWSQAAPMAEGGGQNHHEVVKFMDVYQRSYCHPIETLVDIFQEYPDEIEYIFKPSCVPLMRCGGCCNDEGLECVPTEESNITMQIMRIKPHQGQHIGEMSFLQHNKCECRCDKPRR

SEQ ID NO: 9962 - protein, 371 aa, Homo sapiens
MTDRQTDTAPSPSYHLLPGRRRTVDAAASRGQGPEPAPGGGVEGVGARGVALKLFVQLLGCSRFGGAVVRAGEAEPSGAARSASSGREEPQPEEGEEEEEKEEERGPQWRLGARKPGSWTGEAAVCADSAPAARAPQALARASGRGGRVARRGAEESGPPHSPSRRGSASRAGPGRASETMNFLLSWVHWSLALLLYLHHAKWSQAAPMAEGGGQNHHEVVKFMDVYQRSYCHPIETLVDIFQEYPDEIEYIFKPSCVPLMRCGGCCNDEGLECVPTEESNITMQIMRIKPHQGQHIGEMSFLQHNKCECRPKKDRARQENPCGPCSERRKHLFVQDPQTCKCSCKNTDSRCKARQLELNERTCRCDKPRR

SEQ ID NO: 9963 - protein, 327 aa, Homo sapiens
MTDRQTDTAPSPSYHLLPGRRRTVDAAASRGQGPEPAPGGGVEGVGARGVALKLFVQLLGCSRFGGAVVRAGEAEPSGAARSASSGREEPQPEEGEEEEEKEEERGPQWRLGARKPGSWTGEAAVCADSAPAARAPQALARASGRGGRVARRGAEESGPPHSPSRRGSASRAGPGRASETMNFLLSWVHWSLALLLYLHHAKWSQAAPMAEGGGQNHHEVVKFMDVYQRSYCHPIETLVDIFQEYPDEIEYIFKPSCVPLMRCGGCCNDEGLECVPTEESNITMQIMRIKPHQGQHIGEMSFLQHNKCECRPKKDRARQEKCDKPRR

SEQ ID NO: 9964 - protein, 395 aa, Homo sapiens
MTDRQTDTAPSPSYHLLPGRRRTVDAAASRGQGPEPAPGGGVEGVGARGVALKLFVQLLGCSRFGGAVVRAGEAEPSGAARSASSGREEPQPEEGEEEEEKEEERGPQWRLGARKPGSWTGEAAVCADSAPAARAPQALARASGRGGRVARRGAEESGPPHSPSRRGSASRAGPGRASETMNFLLSWVHWSLALLLYLHHAKWSQAAPMAEGGGQNHHEVVKFMDVYQRSYCHPIETLVDIFQEYPDEIEYIFKPSCVPLMRCGGCCNDEGLECVPTEESNITMQIMRIKPHQGQHIGEMSFLQHNKCECRPKKDRARQEKKSVRGKGKGQKRKRKKSRYKSWSVPCGPCSERRKHLFVQDPQTCKCSCKNTDSRCKARQLELNERTCRCDKPRR

SEQ ID NO: 9965 - protein, 412 aa, Homo sapiens
MTDRQTDTAPSPSYHLLPGRRRTVDAAASRGQGPEPAPGGGVEGVGARGVALKLFVQLLGCSRFGGAVVRAGEAEPSGAARSASSGREEPQPEEGEEEEEKEEERGPQWRLGARKPGSWTGEAAVCADSAPAARAPQALARASGRGGRVARRGAEESGPPHSPSRRGSASRAGPGRASETMNFLLSWVHWSLALLLYLHHAKWSQAAPMAEGGGQNHHEVVKFMDVYQRSYCHPIETLVDIFQEYPDEIEYIFKPSCVPLMRCGGCCNDEGLECVPTEESNITMQIMRIKPHQGQHIGEMSFLQHNKCECRPKKDRARQEKKSVRGKGKGQKRKRKKSRYKSWSVYVGARCCLMPWSLPGPHPCGPCSERRKHLFVQDPQTCKCSCKNTDSRCKARQLELNERTCRCDKPRR

SEQ ID NO: 9966 - protein, 371 aa, Homo sapiens
MTDRQTDTAPSPSYHLLPGRRRTVDAAASRGQGPEPAPGGGVEGVGARGVALKLFVQLLGCSRFGGAVVRAGEAEPSGAARSASSGREEPQPEEGEEEEEKEEERGPQWRLGARKPGSWTGEAAVCADSAPAARAPQALARASGRGGRVARRGAEESGPPHSPSRRGSASRAGPGRASETMNFLLSWVHWSLALLLYLHHAKWSQAAPMAEGGGQNHHEVVKFMDVYQRSYCHPIETLVDIFQEYPDEIEYIFKPSCVPLMRCGGCCNDEGLECVPTEESNITMQIMRIKPHQGQHIGEMSFLQHNKCECRPKKDRARQENPCGPCSERRKHLFVQDPQTCKCSCKNTDSRCKARQLELNERTCRSLTRKD

SEQ ID NO: 9967 - protein, 389 aa, Homo sapiens
MTDRQTDTAPSPSYHLLPGRRRTVDAAASRGQGPEPAPGGGVEGVGARGVALKLFVQLLGCSRFGGAVVRAGEAEPSGAARSASSGREEPQPEEGEEEEEKEEERGPQWRLGARKPGSWTGEAAVCADSAPAARAPQALARASGRGGRVARRGAEESGPPHSPSRRGSASRAGPGRASETMNFLLSWVHWSLALLLYLHHAKWSQAAPMAEGGGQNHHEVVKFMDVYQRSYCHPIETLVDIFQEYPDEIEYIFKPSCVPLMRCGGCCNDEGLECVPTEESNITMQIMRIKPHQGQHIGEMSFLQHNKCECRPKKDRARQEKKSVRGKGKGQKRKRKKSRPCGPCSERRKHLFVQDPQTCKCSCKNTDSRCKARQLELNERTCRCDKPRR

SEQ ID NO: 9968 - protein, 354 aa, Homo sapiens
MTDRQTDTAPSPSYHLLPGRRRTVDAAASRGQGPEPAPGGGVEGVGARGVALKLFVQLLGCSRFGGAVVRAGEAEPSGAARSASSGREEPQPEEGEEEEEKEEERGPQWRLGARKPGSWTGEAAVCADSAPAARAPQALARASGRGGRVARRGAEESGPPHSPSRRGSASRAGPGRASETMNFLLSWVHWSLALLLYLHHAKWSQAAPMAEGGGQNHHEVVKFMDVYQRSYCHPIETLVDIFQEYPDEIEYIFKPSCVPLMRCGGCCNDEGLECVPTEESNITMQIMRIKPHQGQHIGEMSFLQHNKCECRPKKDRARQENPCGPCSERRKHLFVQDPQTCKCSCKNTDSRCKM

SEQ ID NO: 9969 - protein, 317 aa, Homo sapiens
MTDRQTDTAPSPSYHLLPGRRRTVDAAASRGQGPEPAPGGGVEGVGARGVALKLFVQLLGCSRFGGAVVRAGEAEPSGAARSASSGREEPQPEEGEEEEEKEEERGPQWRLGARKPGSWTGEAAVCADSAPAARAPQALARASGRGGRVARRGAEESGPPHSPSRRGSASRAGPGRASETMNFLLSWVHWSLALLLYLHHAKWSQAAPMAEGGGQNHHEVVKFMDVYQRSYCHPIETLVDIFQEYPDEIEYIFKPSCVPLMRCGGCCNDEGLECVPTEESNITMQIMRIKPHQGQHIGEMSFLQHNKCECRCDKPRR

SEQ ID NO: 9970 - protein, 294 aa, Homo sapiens
MATHGQTCARPMCIPPSYADLGKAARDIFNKGFGFGLVKLDVKTKSCSGVEFSTSGSSNTDTGKVTGTLETKYKWCEYGLTFTEKWNTDNTLGTEIAIEDQICQGLKLTFDTTFSPNTGKKSGKIKSSYKRECINLGCDVDFDFAGPAIHGSAVFGYEGWLAGYQMTFDSAKSKLTRNNFAVGYRTGDFQLHTNVNDGTEFGGSIYQKVCEDLDTSVNLAWTSGTNCTRFGIAAKYQLDPTASISAKVNNSSLIGVGYTQTLRPGVKLTLSALVDGKSINAGGHKVGLALELEA

SEQ ID NO: 9971 - protein, 309 aa, Homo sapiens
MSWCNELRLPALKQHSIGRGLESHITMCIPPSYADLGKAARDIFNKGFGFGLVKLDVKTKSCSGVEFSTSGSSNTDTGKVTGTLETKYKWCEYGLTFTEKWNTDNTLGTEIAIEDQICQGLKLTFDTTFSPNTGKKSGKIKSSYKRECINLGCDVDFDFAGPAIHGSAVFGYEGWLAGYQMTFDSAKSKLTRNNFAVGYRTGDFQLHTNVNDGTEFGGSIYQKVCEDLDTSVNLAWTSGTNCTRFGIAAKYQLDPTASISAKVNNSSLIGVGYTQTLRPGVKLTLSALVDGKSINAGGHKVGLALELEA

SEQ ID NO: 9972 - protein, 283 aa, Homo sapiens
MCIPPSYADLGKAARDIFNKGFGFGLVKLDVKTKSCSGVEFSTSGSSNTDTGKVTGTLETKYKWCEYGLTFTEKWNTDNTLGTEIAIEDQICQGLKLTFDTTFSPNTGKKSGKIKSSYKRECINLGCDVDFDFAGPAIHGSAVFGYEGWLAGYQMTFDSAKSKLTRNNFAVGYRTGDFQLHTNVNDGTEFGGSIYQKVCEDLDTSVNLAWTSGTNCTRFGIAAKYQLDPTASISAKVNNSSLIGVGYTQTLRPGVKLTLSALVDGKSINAGGHKVGLALELEA

SEQ ID NO: 9973 - protein, 890 aa, Homo sapiens
MDSNTAPLGPSCPQPPPAPQPQARSRLNATASLEQERSERPRAPGPQAGPGPGVRDAAAPAEPQAQHTRSRERADGTGPTKGDMEIPFEEVLERAKAGDPKAQTEVGKHYLQLAGDTDEELNSCTAVDWLVLAAKQGRREAVKLLRRCLADRRGITSENEREVRQLSSETDLERAVRKAALVMYWKLNPKKKKQVAVAELLENVGQVNEHDGGAQPGPVPKSLQKQRRMLERLVSSESKNYIALDDFVEITKKYAKGVIPSSLFLQDDEDDDELAGKSPEDLPLRLKVVKYPLHAIMEIKEYLIDMASRAGMHWLSTIIPTHHINALIFFFIVSNLTIDFFAFFIPLVIFYLSFISMVICTLKVFQDSKAWENFRTLTDLLLRFEPNLDVEQAEVNFGWNHLEPYAHFLLSVFFVIFSFPIASKDCIPCSELAVITGFFTVTSYLSLSTHAEPYTRRALATEVTAGLLSLLPSMPLNWPYLKVLGQTFITVPVGHLVVLNVSVPCLLYVYLLYLFFRMAQLRNFKGTYCYLVPYLVCFMWCELSVVILLESTGLGLLRASIGYFLFLFALPILVAGLALVGVLQFARWFTSLELTKIAVTVAVCSVPLLLRWWTKASFSVVGMVKSLTRSSMVKLILVWLTAIVLFCWFYVYRSEGMKVYNSTLTWQQYGALCGPRAWKETNMARTQILCSHLEGHRVTWTGRFKYVRVTDIDNSAESAINMLPFFIGDWMRCLYGEAYPACSPGNTSTAEEELCRLKLLAKHPCHIKKFDRYKFEITVGMPFSSGADGSRSREEDDVTKDIVLRASSEFKSVLLSLRQGSLIEFSTILEGRLGSKWPVFELKAISCLNCMAQLSPTRRHVKIEHDWRSTVHGAVKFAFDFFFFPFLSAA

SEQ ID NO: 9974 - protein, 1220 aa, Homo sapiens
MPGLLNWITGAALPLTASDVTSCVSGYALGLTASLTYGNLEAQPFQGLFVYPLDECTTVIGFEAVIADRVVTVQIKDKAKLESGHFDASHVRSPTVTGNILQDGVSIAPHSCTPGKVTLDEDLERILFVANLGTIAPMENVTIFISTSSELPTLPSGAVRVLLPAVCAPTVPQFCTKSTGTSNQQAQGKDRHCFGAWAPGSWNKLCLATLLNTEVSNPMEYEFNFQLEIRGPCLLAGVESPTHEIRADAAPSARSAKSIIITLANKHTFDRPVEILIHPSEPHMPHVLIEKGDMTLGEFDQHLKGRTDFIKGMKKKSRAERKTEIIRKRLHKDIPHHSVIMLNFCPDLQSVQPCLRKAHGEFIFLIDRSSSMSGISMHRVKDAMLVALKSLMPACLFNIIGFGSTFKSLFPSSQTYSEDSLAMACDDIQRMKADMGGTNILSPLKWVIRQPVHRGHPRLLFVITDGAVNNTGKVLELVRNHAFSTRCYSFGIGPNVCHRLVKGLASVSEGSAELLMEGERLQPKMVKSLKKAMAPVLSDVTVEWIFPETTEVLVSPVSASSLFPGERLVGYGIVCDASLHISNPRSDKRRRYSMLHSQESGSSVFYHSQDDGPGLEGGDCAKNSGAPFILGQAKNARLASGDSTTKHDLNLSQRRRAYSTNQITNHKPLPRATMASDPMPAAKRYPLRKARLQDLTNQTSLDVQRWQIDLQPLLNSGQDLNQGPKLRGPGARRPSLLPQGCQPFLPWGQETQAWSPVRERTSDSRSPGDLEPSHHPSAFETETSSDWDPPAESQERASPSRPATPAPVLGKALVKGLHDSQRLQWEVSFELGTPGPERGGAQDADLWSETFHHLAARAIIRDFEQLAEREGEIEQGSNRRYQVSALHTSKACNIISKYTAFVPVDVSKSRYLPTVVEYPNSAALRMLGSRALAQQWRGTSSGFGRPQTMLGEDSAPGNGKFQALNMEASPTALFSEARSPGREKHGASEGPQRSLATNTLSSMKASENLFGSWLNLNKSRLLTRAAKGFLSKPLIKAVESTSGNQSFDYIPLVSLQLASGAFLLNEAFCEATHIPMEKLKWTSPFTCHRVSLTTRPSESKTPSPQLCTSSPPRHPSCDSFSLEPLAKGKLGLEPRAVVEHTGKLWATVVGLAWLEHSSASYFTEWELVAAKANSWLEQQEVPEGRTQGTLKAAARQLFVLLRHWDENLEFNMLCYNPNYV

SEQ ID NO: 9975 - protein, 1215 aa, Homo sapiens
MPGLLNWITGAALPLTASDVTSCVSGYALGLTASLTYGNLEAQPFQGLFVYPLDECTTVIGFEAVIADRVVTVQIKDKAKLESGHFDASHVRSPTVTGNILQDGVSIAPHSCTPGKVTLDEDLERILFVANLGTIAPMENVTIFISTSSELPTLPSGAVRVLLPAVCAPTVPQFCTKSTGTSNQQAQGKDRHCFGAWAPGSWNKLCLATLLNTEVSNPMEYEFNFQLEIRGPCLLAGVESPTHEIRADAAPSARSAKSIIITLANKHTFDRPVEILIHPSEPHMPHVLIEKGDMTLGEFDQHLKGRTDFIKGMKKKSRAERKTEIIRKRLHKDIPHHSVIMLNFCPDLQSVQPCLRKAHGEFIFLIDRSSSMSGISMHRVKDAMLVALKSLMPACLFNIIGFGSTFKSLFPSSQTYSEDSLAMACDDIQRMKADMGGTNILSPLKWVIRQPVHRGHPRLLFVITDGAVNNTGKVLELVRNHAFSTRCYSFGIGPNVCHRLVKGLASVSEGSAELLMEGERLQPKMVKSLKKAMAPVLSDVTVEWIFPETTEVLVSPVSASSLFPGERLVGYGIVCDASLHISNPRSDKRRRYSMLHSQESGSSVFYHSQDDGPGLEGGDCAKNSGAPFILGQAKNARLASGDSTTKHDLNLSQRRRAYSTNQITNHKPLPRATMASDPMPAAKRYPLRKARLQDLTNQTSLDVQRWQIDLQPLLNSGQDLNQGPKLRGPGARRPSLLPQGCQPFLPWGQETQAWSPVRERTSDSRSPGDLEPSHHPSAFETETSSDWDPPAESQERASPSRPATPAPVLGKALVKGLHDSQRLQWEVSFELGTPGPERGGAQDADLWSETFHHLAARAIIRDFEQLAEREGEIEQGSNRRYQVSALHTSKACNIISKYTAFVPVDVSKSRYLPTVVEYPNSGAALRMLGSRALAQQWRGTSSGFGRPQTMLGEDSAPGNDMEASPTALFSEARSPGREKHGASEGPQRSLATNTLSSMKASENLFGSWLNLNKSRLLTRAAKGFLSKPLIKAVESTSGNQSFDYIPLVSLQLASGAFLLNEAFCEATHIPMEKLKWTSPFTCHRVSLTTRPSESKTPSPQLCTSSPPRHPSCDSFSLEPLAKGKLGLEPRAVVEHTGKLWATVVGLAWLEHSSASYFTEWELVAAKANSWLEQQEVPEGRTQGTLKAAARQLFVLLRHWDENLEFNMLCYNPNYV

SEQ ID NO: 9976 - protein, 447 aa, Homo sapiens
MPHVLIEKGDMTLGEFDQHLKGRTDFIKGMKKKSRAERKTEIIRKRLHKDIPHHSVIMLNFCPDLQSVQPCLRKAHGEFIFLIDRSSSMSGISMHRVKDAMLVALKSLMPACLFNIIGFGSTFKSLFPSSQTYSEDSLAMACDDIQRMKADMGGTNILSPLKWVIRQPVHRGHPRLLFVITDGAVNNTGKVLELVRNHAFSTRCYSFGIGPNVCHRLVKGLASVSEGSAELLMEGERLQPKMVKSLKKAMAPVLSDVTVEWIFPETTEVLVSPVSASSLFPGERLVGYGIVCDASLHISNPRSDKRRRYSMLHSQESGSSVFYHSQDDGPGLEGGDCAKNSGAPFILGQAKNARLASGDSTTKHDLNLSQRRRAYSTNQITNHKPLPRATMASDPMPAAKRYPLRKARLQDLTNQTSLDVQRWQIDLQAFICLTSEDTFQIRTPTGQ

SEQ ID NO: 9977 - protein, 1017 aa, Homo sapiens
MPGLLNWITGAALPLTASDVTSCVSGYALGLTASLTYGNLEAQPFQGLFVYPLDECTTVIGFEAVIADRVVTVQIKDKAKLESGHFDASHVRSPTVTGNILQDGVSIAPHSCTPGKVTLDEDLERILFVANLGTIAPMENVTIFISTSSELPTLPSGAVRVLLPAVCAPTVPQFCTKSTGTSNQQAQGKDRHCFGAWAPGSWNKLCLATLLNTEVSNPMEYEFNFQLEIRGPCLLAGVESPTHEIRADAAPSARSAKSIIITLANKHTFDRPVEILIHPSEPHMPHVLIEKGDMTLGEFDQHLKGRTDFIKGMKKKSRAERKTEIIRKRLHKDIPHHSVIMLNFCPDLQSVQPCLRKAHGEFIFLIDRSSSMSGISMHRVKDAMLVALKSLMPACLFNIIGFGSTFKSLFPSSQTYSEDSLAMACDDIQRMKADMGGTNILSPLKWVIRQPVHRGHPRLLFVITDGAVNNTGKVLELVRNHAFSTRCYSFGIGPNVCHRLVKGLASVSEGSAELLMEGERLQPKMVKSLKKAMAPVLSDVTVEWIFPETTEVLVSPVSASSLFPGERLVGYGIVCDASLHISNPRSDKRRRYSMLHSQESGSSVFYHSQDDGPGLEGGDCAKNSGAPFILGQAKNARLASGDSTTKHDLNLSQRRRAYSTNQITNHKPLPRATMASDPMPAAKRYPLRKARLQDLTNQTSLDVQRWQIDLQPLLNSGQDLNQGPKLRGPGARRPSLLPQGCQPFLPWGQETQAWSPVRERTSDSRSPGDLEPSHHPSAFETETSSDWDPPAESQERASPSRPATPAPVLGKALVKGLHDSQRLQWEVSFELGTPGPERGGAQDADLWSETFHHLAARAIIRDFEQLAEREGEIEQGSNRRYQVSALHTSKACNIISKYTAFVPVDVSKSRYLPTVVEYPNSGAALRMLGSRALAQQWRGTSSGFGRPQTMLGEDSAPGNGPRKCSQTLMGFKTKTETEHSVRGWKPRGALQNQSVLSTSWSHWPPKPRRTSSTPEPS

SEQ ID NO: 9978 - protein, 1190 aa, Homo sapiens
MPGLLNWITGAALPLTASDVTSCVSGYALGLTASLTYGNLEAQPFQGLFVYPLDECTTVIGFEAVIADRVVTVQIKDKAKLESGHFDASHVRSPTVTGNILQDGVSIAPHSCTPGKVTLDEDLERILFVANLGTIAPMENVTIFISTSSELPTLPSGAVRVLLPAVCAPTVPQFCTKSTGTSNQQAQGKDRHCFGAWAPGSWNKLCLATLLNTEVSNPMEYEFNFQLEIRGPCLLAGVESPTHEIRADAAPSARSAKSIIITLANKHTFDRPVEILIHPSEPHMPHVLIEKGDMTLGEFDQHLKGRTDFIKGMKKKSRAERKTEIIRKRLHKDIPHHSVIMLNFCPDLQSVQPCLRKAHGEFIFLIDRSSSMSGISMHRVKDAMLVALKSLMPACLFNIIGFGSTFKSLFPSSQTYSEDSLAMACDDIQRMKADMGGTNILSPLKWVIRQPVHRGHPRLLFVITDGAVNNTGKVLELVRNHAFSTRCYSFGIGPNVCHRLVKGLASVSEGSAELLMEGERLQPKMVKSLKKAMAPVLSDVTVEWIFPETTEVLVSPVSASSLFPGERLVGYGIVCDASLHISNPRSDKRRRYSMLHSQESGSSVFYHSQDDGPGLEGGDCAKNSGAPFILGQAKNARLASGDSTTKHDLNLSQRRRAYSTNQITNHKPLPRATMASDPMPAAKRYPLRKARLQDLTNQTSLDVQRWQIDLQPLLNSGQDLNQGPKLRGPGARRPSLLPQGCQPFLPWGQETQAWSPVRERTSDSRSPGDLEPSHHPSAFETETSSDWDPPAESQERASPSRPATPAPVLGKALVKGLHDSQRLQWEVSFELGTPGPERGGAQDADLWSETFHHLAARAIIRDFEQLAEREGEIEQGSNRRYQVSALHTSKACNIISKYTAFVPVDVSKSRYLPTVVEYPNSGAALRMLGSRALAQQWRGTSSGFGRPQTMLGEDSAPGNGPQRSLATNTLSSMKASENLFGSWLNLNKSRLLTRAAKGFLSKPLIKAVESTSGNQSFDYIPLVSLQLASGAFLLNEAFCEATHIPMEKLKWTSPFTCHRVSLTTRPSESKTPSPQLCTSSPPRHPSCDSFSLEPLAKGKLGLEPRAVVEHTGKLWATVVGLAWLEHSSASYFTEWELVAAKANSWLEQQEVPEGRTQGTLKAAARQLFVLLRHWDENLEFNMLCYNPNYV

SEQ ID NO: 9979 - protein, 845 aa, Homo sapiens
MELWRQCTHWLIQCRVLPPSHRVTWDGAQVCELAQALRDGVLLCQLLNNLLPHAINLREVNLRPQMSQFLCLKNIRTFLSTCCEKFGLKRSELFEAFDLFDVQDFGKVIYTLSALSWTPIAQNRGIMPFPTEEESVGDEDIYSGLSDQIDDTVEEDEDLYDCVENEEAEGDEIYEDLMRSEPVSMPPKMTEYDKRCCCLREIQQTEEKYTDTLGSIQQHFLKPLQRFLKPQDIEIIFINIEDLLRVHTHFLKEMKEALGTPGAANLYQVFIKYKERFLVYGRYCSQVESASKHLDRVAAAREDVQMKLEECSQRANNGRFTLRDLLMVPMQRVLKYHLLLQELVKHTQEAMEKENLRLALDAMRDLAQCVNEVKRDNETLRQITNFQLSIENLDQSLAHYGRPKIDGELKITSVERRSKMDRYAFLLDKALLICKRRGDSYDLKDFVNLHSFQVRDDSSGDRDNKKWSHMFLLIEDQGAQGYELFFKTRELKKKWMEQFEMAISNIYPENATANGHDFQMFSFEETTSCKACQMLLRGTFYQGYRCHRCRASAHKECLGRVPPCGRHGQDFPGTMKKDKLHRRAQDKKRNELGLPKMEVFQEYYGLPPPPGAIGPFLRLNPGDIVELTKAEAEQNWWEGRNTSTNEIGWFPCNRVKPYVHGPPQDLSVHLWYAGPMERAGAESILANRSDGTFLVRQRVKDAAEFAISIKYNVEVKHIKIMTAEGLYRITEKKAFRGLTELVEFYQQNSLKDCFKSLDTTLQFPFKEPEKRTISRPAVGSTKYFGTAKARYDFCARDRSELSLKEGDIIKILNKKGQQGWWRGEIYGRVGWFPANYVEEDYSEYC

SEQ ID NO: 9980 - protein, 813 aa, Homo sapiens
MELWRQCTHWLIQCRVLPPSHRVTWDGAQVCELAQALRDGVLLCQLLNNLLPHAINLREVNLRPQMSQFLCLKNIRTFLSTCCEKFGLKRSELFEAFDLFDVQDFGKVIYTLSALSWTPIAQNRGIMPFPTEEESVGDEDIYSGLSDQIDDTVEEDEDLYDCVENEEAEGDEIYEDLMRSEPVSMPHFLKPLQRFLKPQDIEIIFINIEDLLRVHTHFLKEMKEALGTPGAANLYQVFIKYKERFLVYGRYCSQVESASKHLDRVAAAREDVQMKLEECSQRANNGRFTLRDLLMVPMQRVLKYHLLLQELVKHTQEAMEKENLRLALDAMRDLAQCVNEVKRDNETLRQITNFQLSIENLDQSLAHYGRPKIDGELKITSVERRSKMDRYAFLLDKALLICKRRGDSYDLKDFVNLHSFQVRDDSSGDRDNKKWSHMFLLIEDQGAQGYELFFKTRELKKKWMEQFEMAISNIYPENATANGHDFQMFSFEETTSCKACQMLLRGTFYQGYRCHRCRASAHKECLGRVPPCGRHGQDFPGTMKKDKLHRRAQDKKRNELGLPKMEVFQEYYGLPPPPGAIGPFLRLNPGDIVELTKAEAEQNWWEGRNTSTNEIGWFPCNRVKPYVHGPPQDLSVHLWYAGPMERAGAESILANRSDGTFLVRQRVKDAAEFAISIKYNVEVKHIKIMTAEGLYRITEKKAFRGLTELVEFYQQNSLKDCFKSLDTTLQFPFKEPEKRTISRPAVGSTKYFGTAKARYDFCARDRSELSLKEGDIIKILNKKGQQGWWRGEIYGRVGWFPANYVEEDYSEYC

SEQ ID NO: 9981 - protein, 232 aa, Homo sapiens
MASSAASSEHFEKLHEIFRGLHEDLQGVPERLLGTAGTEEKKKLIRDFDEKQQEANETLAEMEEELRYAPLSFRNPMMSKLRNYRKDLAKLHREVRSTPLTATPGGRGDMKYGIYAVENEHMNRLQSQRAMLLQGTESLNRATQSIERSHRIATETDQIGSEIIEELGEQRDQLERTKSRLVNTSENLSKSRKILRSMSRKVTTNKLLLSIIILLELAILGGLVYYKFFRSH

SEQ ID NO: 9982 - protein, 171 aa, Homo sapiens
MEEELRYAPLSFRNPMMSKLRNYRKDLAKLHREVRSTPLTATPGGRGDMKYGIYAVENEHMNRLQSQRAMLLQGTESLNRATQSIERSHRIATETDQIGSEIIEELGEQRDQLERTKSRLVNTSENLSKSRKILRSMSRKVTTNKLLLSIIILLELAILGGLVYYKFFRSH

SEQ ID NO: 9983 - protein, 200 aa, Homo sapiens
MRPLPSGRRKTRGISLGLFALCLAAARCLQSQGVSLYIPQATINATVKEDILLSVEYSCHGVPTIEWTYSSNWGTQKIVEWKPGTQANISQSHKDRVCTFDNGSIQLFSVGVRDSGYYVITVTERLGSSQFGTIVLHVSEILYEDLHFVAVILAFLAAVAAVLISLMWVCNKCAYKFQRKRRHKLKESTTEEIELEDVEC

SEQ ID NO: 9984 - protein, 840 aa, Homo sapiens
MVSVFRSEEMCLSQLFLQVEAAYCCVAELGELGLVQFKDLNMNVNSFQRKFVNEVRRCESLERILRFLEDEMQNEIVVQLLEKSPLTPLPREMITLETVLEKLEGELQEANQNQQALKQSFLELTELKYLLKKTQDFFETETNLADDFFTEDTSGLLELKAVPAYMTGKLGFIAGVINRERMASFERLLWRICRGNVYLKFSEMDAPLEDPVTKEEIQKNIFIIFYQGEQLRQKIKKICDGFRATVYPCPEPAVERREMLESVNVRLEDLITVITQTESHRQRLLQEAAANWHSWLIKVQKMKAVYHILNMCNIDVTQQCVIAEIWFPVADATRIKRALEQGMELSGSSMAPIMTTVQSKTAPPTFNRTNKFTAGFQNIVDAYGVGSYREINPAPYTIITFPFLFAVMFGDCGHGTVMLLAALWMILNERRLLSQKTDNEIWNTFFHGRYLILLMGIFSIYTGLIYNDCFSKSLNIFGSSWSVQPMFRNGTWNTHVMEESLYLQLDPAIPGVYFGNPYPFGIDPIWNLASNKLTFLNSYKMKMSVILGIVQMVFGVILSLFNHIYFRRTLNIILQFIPEMIFILCLFGYLVFMIIFKWCCFDVHVSQHAPSILIHFINMFLFNYSDSSNAPLYKHQQEVQSFFVVMALISVPWMLLIKPFILRASHRKSQLQASRIQEDATENIEGDSSSPSSRSGQRTSADTHGALDDHGEEFNFGDVFVHQAIHTIEYCLGCISNTASYLRLWALSLAHAQLSEVLWTMVMNSGLQTRGWGGIVGVFIIFAVFAVLTVAILLIMEGLSAFLHALRLHWVEFQNKFYVGDGYKFSPFSFKHILDGTAEE

SEQ ID NO: 9985 - protein, 2297 aa, Homo sapiens
MDGDGGRRDVPGTLMEPGRGAGPAGMAEPRAKAARPGPQRFLRRSVVESDQEEPPGLEAAEAPGPQPPQPLQRRVLLLCKTRRLIAERARGRPAAPAPAALVAQPGAPGAPADAGPEPVGTQEPGPDPIAAAVETAPAPDGGPREEAAATVRKEDEGAAEAKPEPGRTRRDEPEEEEDDEDDLKAVATSLDGRFLKFDIELGRGSFKTVYKGLDTETWVEVAWCELQDRKLTKLERQRFKEEAEMLKGLQHPNIVRFYDFWESSAKGKRCIVLVTELMTSGTLKTYLKRFKVMKPKVLRSWCRQILKGLLFLHTRTPPIIHRDLKCDNIFITGPTGSVKIGDLGLATLKRASFAKSVIGTPEFMAPEMYEEHYDESVDVYAFGMCMLEMATSEYPYSECQNAAQIYRKVTCGIKPASFEKVHDPEIKEIIGECICKNKEERYEIKDLLSHAFFAEDTGVRVELAEEDHGRKSTIALRLWVEDPKKLKGKPKDNGAIEFTFDLEKETPDEVAQEMIESGFFHESDVKIVAKSIRDRVALIQWRRERIWPALQPKEQQDVGSPDKARGPPVPLQVQVTYHAQAGQPGPPEPEEPEADQHLLPPTLPTSATSLASDSTFDSGQGSTVYSDSQSSQQSVMLGSLADAAPSPAQCVCSPPVSEGPVLPQSLPSLGAYQQPTAAPGLPVGSVPAPACPPSLQQHFPDPAMSFAPVLPPPSTPMPTGPGQPAPPGQQPPPLAQPTPLPQVLAPQPVVPLQPVPPHLPPYLAPASQVGAPAQLKPLQMPQAPLQPLAQVPPQMPPIPVVPPITPLAGIDGLPPALPDLPTATVPPVPPPQYFSPAVILPSLAAPLPPASPALPLQAVKLPHPPGAPLAMPCRTIVPNAPATIPLLAVAPPGVAALSIHSAVAQLPGQPVYPAAFPQMAPTDVPPSPHHTVQNMRATPPQPALPPQPTLPPQPVLPPQPTLPPQPVLPPQPTRPPQPVLPPQPMLPPQPVLPPQPALPVRPEPLQPHLPEQAAPAATPGSQILLGHPAPYAVDVAAQVPTVPVPPAAVLSPPLPEVLLPAAPELLPQFPSSLATVSASVQSVPTQTATLLPPANPPLPGGPGIASPCPTVQLTVEPVQEEQASQDKPPGLPQSCESYGGSDVTSGKELSDSCEGAFGGGRLEGRAARKHHRRSTRARSRQERASRPRLTILNVCNTGDKMVECQLETHNHKMVTFKFDLDGDAPDEIATYMVEHDFILQAERETFIEQMKDVMDKAEDMLSEDTDADRGSDPGTSPPHLSTCGLGTGEESRQSQANAPVYQQNVLHTGKRWFIICPVAEHPAPEAPESSPPLPLSSLPPEASQGPCRGLTLPCLPWRRAACGAVFLSLFSAESAQSKQPPDSAPYKDQLSSKEQPSFLASQQLLSQAGPSNPPGAPPAPLAPSSPPVTALPQDGAAPATSTMPEPASGTASQAGGPGTPQGLTSELETSQPLAETHEAPLAVQPLVVGLAPCTPAPEAASTRDASAPREPLPPPAPEPSPHSGTPQPALGQPAPLLPAAVGAVSLATSQLPSPPLGPTVPPQPPSALESDGEGPPPRVGFVDSTIKSLDEKLRTLLYQEHVPTSSASAGTPVEVGDRDFTLEPLRGDQPRSEVCGGDLALPPVPKEAVSGRVQLPQPLVEKSELAPTRGAVMEQGTSSSMTAESSPRSMLGYDRDGRQVASDSHVVPSVPQDVPAFVRPARVEPTDRDGGEAGESSAEPPPSDMGTVGGQASHPQTLGARALGSPRKRPEQQDVSSPAKTVGRFSVVSTQDEWTLASPHSLRYSAPPDVYLDEAPSSPDVKLAVRRAQTASSIEVGVGEPVSSDSGDEGPRARPPVQKQASLPVSGSVAGDFVKKATAFLQRPSRAGSLGPETPSRVGMKVPTISVTSFHSQSSYISSDNDSELEDADIKKELQSLREKHLKEISELQSQQKQEIEALYRRLGKPLPPNVGFFHTAPPTGRRRKTSKSKLKAGKLLNPLVRQLKVVASSTGHLADSSRGPPAKDPAQASVGLTADSTGLSGKAVQTQQPCSVRASLSSDICSGLASDGGGARGQGWTVYHPTSERVTYKSSSKPRARFLSGPVSVSIWSALKRLCLGKEHSSRSSTSSLAPGPEPGPQPALHVQAQVNNSNNKKGTFTDDLHKLVDEWTSKTVGAAQLKPTLNQLKQTQKLQDMEAQAGWAAPGEARAMTAPRAGVGMPRLPPAPGPLSTTVIPGAAPTLSVPTPDGALGTARRNQVWFGLRVPPTACCGHSTQPRGGQRVGSKTASFAASDPVRS

SEQ ID NO: 9986 - protein, 2224 aa, Homo sapiens
MDGDGGRRDVPGTLMEPGRGAGPAGMAEPRAKAARPGPQRFLRRSVVESDQEEPPGLEAAEAPGPQPPQPLQRRVLLLCKTRRLIAERARGRPAAPAPAALVAQPGAPGAPADAGPEPVGTQEPGPDPIAAAVETAPAPDGGPREEAAATVRKEDEGAAEAKPEPGRTRRDEPEEEEDDEDDLKAVATSLDGRFLKFDIELGRGSFKTVYKGLDTETWVEVAWCELQDRKLTKLERQRFKEEAEMLKGLQHPNIVRFYDFWESSAKGKRCIVLVTELMTSGTLKTYLKRFKVMKPKVLRSWCRQILKGLLFLHTRTPPIIHRDLKCDNIFITGPTGSVKIGDLGLATLKRASFAKSVIGTPEFMAPEMYEEHYDESVDVYAFGMCMLEMATSEYPYSECQNAAQIYRKVTCGIKPASFEKVHDPEIKEIIGECICKNKEERYEIKDLLSHAFFAEDTGVRVELAEEDHGRKSTIALRLWVEDPKKLKGKPKDNGAIEFTFDLEKETPDEVAQEMIESGFFHESDVKIVAKSIRDRVALIQWRRERIWPALQPKEQQDVGSPDKARGPPVPLQVQVTYHAQAGQPGPPEPEEPEADQHLLPPTLPTSATSLASDSTFDSGQGSTVYSDSQSSQQSVMLGSLADAAPSPAQCVCSPPVSEGPVLPQSLPSLGAYQQPTAAPGLPVGSVPAPACPPSLQQHFPDPAMSFAPVLPPPSTPMPTGPGQPAPPGQQPPPLAQPTPLPQVLAPQPVVPLQPVPPHLPPYLAPASQVGAPAQLKPLQMPQAPLQPLAQVPPQMPPIPVVPPITPLAGIDGLPPALPDLPTATVPPVPPPQYFSPAVILPSLAAPLPPASPALPLQAVKLPHPPGAPLAMPCRTIVPNAPATIPLLAVAPPGVAALSIHSAVAQLPGQPVYPAAFPQMAPTDVPPSPHHTVQNMRATPPQPALPPQPTLPPQPVLPPQPTLPPQPVLPPQPTRPPQPVLPPQPMLPPQPVLPPQPALPVRPEPLQPHLPEQAAPAATPGSQILLGHPAPYAVDVAAQVPTVPVPPAAVLSPPLPEVLLPAAPELLPQFPSSLATVSASVQSVPTQTATLLPPANPPLPGGPGIASPCPTVQLTVEPVQEEQASQDKPPGLPQSCESYGGSDVTSGKELSDSCEGAFGGGRLEGRAARKHHRRSTRARSRQERASRPRLTILNVCNTGDKMVECQLETHNHKMVTFKFDLDGDAPDEIATYMVEHDFILQAERETFIEQMKDVMDKAEDMLSEDTDADRGSDPGTSPPHLSTCGLGTGEESRQSQANAPVYQQNVLHTGKRWFIICPVAEHPAPEAPESSPPLPLSSLPPEASQDSAPYKDQLSSKEQPSFLASQQLLSQAGPSNPPGAPPAPLAPSSPPVTALPQDGAAPATSTMPEPASGTASQAGGPGTPQGLTSELETSQPLAETHEAPLAVQPLVVGLAPCTPAPEAASTRDASAPREPLPPPAPEPSPHSGTPQPALGQPAPLLPAAVGAVSLATSQLPSPPLGPTVPPQPPSALESDGEGPPPRVGFVDSTIKSLDEKLRTLLYQEHVPTSSASAGTPVEVGDRDFTLEPLRGDQPRSEVCGGDLALPPVPKEAVSGRVQLPQPLVEKSELAPTRGAVMEQGTSSSMTAESSPRSMLGYDRDGRQVASDSHVVPSVPQDVPAFVRPARVEPTDRDGGEAGESSAEPPPSDMGTVGGQASHPQTLGARALGSPRKRPEQQDVSSPAKTVGRFSVVSTQDEWTLASPHSLRYSAPPDVYLDEAPSSPDVKLAVRRAQTASSIEVGVGEPVSSDSGDEGPRARPPVQKQASLPVSGSVAGDFVKKATAFLQRPSRAGSLGPETPSRVGMKVPTISVTSFHSQSSYISSDNDSELEDADIKKELQSLREKHLKEISELQSQQKQEIEALYRRLGKPLPPNVGFFHTAPPTGRRRKTSKSKLKAGKLLNPLVRQLKVVASSTGHLADSSRGPPAKDPAQASVGLTADSTGLSGKAVQTQQPCSVRASLSSDICSGLASDGGGARGQGWTVYHPTSERVTYKSSSKPRARFLSGPVSVSIWSALKRLCLGKEHSSRSSTSSLAPGPEPGPQPALHVQAQVNNSNNKKGTFTDDLHKLVDEWTSKTVGAAQLKPTLNQLKQTQKLQDMEAQAGWAAPGEARAMTAPRAGVGMPRLPPAPGPLSTTVIPGAAPTLSVPTPGSCGPRAVSTPTSYT

SEQ ID NO: 9987 - protein, 779 aa, Homo sapiens
MEPGRGAGPAGMAEPRAKAARPGPQRFLRRSVVESDQEEPPGLEAAEAPGPQPPQPLQRRVLLLCKTRRLIAERARGRPAAPAPAALVAQPGAPGAPADAGPEPVGTQEPGPDPIAAAVETAPAPDGGPREEAAATVRKEDEGAAEAKPEPGRTRRDEPEEEEDDEDDLKAVATSLDGRFLKFDIELGRGSFKTVYKGLDTETWVEVAWCELQDRKLTKLERQRFKEEAEMLKGLQHPNIVRFYDFWESSAKGKRCIVLVTELMTSGTLKTYLKRFKVMKPKVLRSWCRQILKGLLFLHTRTPPIIHRDLKCDNIFITGPTGSVKIGDLGLATLKRASFAKSVIGTPEFMAPEMYEEHYDESVDVYAFGMCMLEMATSEYPYSECQNAAQIYRKVTCGIKPASFEKVHDPEIKEIIGECICKNKEERYEIKDLLSHAFFAEDTGVRVELAEEDHGRKSTIALRLWVEDPKKLKGKPKDNGAIEFTFDLEKETPDEVAQEMIESGFFHESDVKIVAKSIRDRVALIQWRRERIWPALQPKEQQDVGSPDKARGPPVPLQVQVTYHAQAGQPGPPEPEEPEADQHLLPPTLPTSATSLASDSTFDSGQGSTVYSDSQSSQQSVMLGSLADAAPSPAQCVCSPPVSEGPVLPQSLPSLGAYQQPTAAPPPLAQPTPLPQVLAPQPVVPLQPVPPHLPPYLAPASQVGAPAQLKPLQMPQAPLQPLAQVPPQMPPIPVVPPITPLAGIDGLPPALPDLPTATVPPVPPPQYFSPAVILPSRTR

SEQ ID NO: 9988 - protein, 2254 aa, Homo sapiens
MDGDGGRRDVPGTLMEPGRGAGPAGMAEPRAKAARPGPQRFLRRSVVESDQEEPPGLEAAEAPGPQPPQPLQRRVLLLCKTRRLIAERARGRPAAPAPAALVAQPGAPGAPADAGPEPVGTQEPGPDPIAAAVETAPAPDGGPREEAAATVRKEDEGAAEAKPEPGRTRRDEPEEEEDDEDDLKAVATSLDGRFLKFDIELGRGSFKTVYKGLDTETWVEVAWCELQDRKLTKLERQRFKEEAEMLKGLQHPNIVRFYDFWESSAKGKRCIVLVTELMTSGTLKTYLKRFKVMKPKVLRSWCRQILKGLLFLHTRTPPIIHRDLKCDNIFITGPTGSVKIGDLGLATLKRASFAKSVIGTPEFMAPEMYEEHYDESVDVYAFGMCMLEMATSEYPYSECQNAAQIYRKVTCGIKPASFEKVHDPEIKEIIGECICKNKEERYEIKDLLSHAFFAEDTGVRVELAEEDHGRKSTIALRLWVEDPKKLKGKPKDNGAIEFTFDLEKETPDEVAQEMIESGFFHESDVKIVAKSIRDRVALIQWRRERIWPALQPKEQQDVGSPDKARGPPVPLQVQVTYHAQAGQPGPPEPEEPEADQHLLPPTLPTSATSLASDSTFDSGQGSTVYSDSQSSQQSVMLGSLADAAPSPAQCVCSPPVSEGPVLPQSLPSLGAYQQPTAAPGLPVGSVPAPACPPSLQQHFPDPAMSFAPVLPPPSTPMPTGPGQPAPPGQQPPPLAQPTPLPQVLAPQPVVPLQPVPPHLPPYLAPASQVGAPAQLKPLQMPQAPLQPLAQVPPQMPPIPVVPPITPLAGIDGLPPALPDLPTATVPPVPPPQYFSPAVILPSLAAPLPPASPALPLQAVKLPHPPGAPLAMPCRTIVPNAPATIPLLAVAPPGVAALSIHSAVAQLPGQPVYPAAFPQMAPTDVPPSPHHTVQNMRATPPQPALPPQPTLPPQPVLPPQPTLPPQPVLPPQPTRPPQPVLPPQPMLPPQPVLPPQPALPVRPEPLQPHLPEQAAPAATPGSQILLGHPAPYAVDVAAQVPTVPVPPAAVLSPPLPEVLLPAAPELLPQFPSSLATVSASVQSVPTQTATLLPPANPPLPGGPGIASPCPTVQLTVEPVQEEQASQDKPPGLPQSCESYGGSDVTSGKELSDSCEGAFGGGRLEGRAARKHHRRSTRARSRQERASRPRLTILNVCNTGDKMVECQLETHNHKMVTFKFDLDGDAPDEIATYMVEHDFILQAERETFIEQMKDVMDKAEDMLSEDTDADRGSDPGTSPPHLSTCGLGTGEESRQSQANAPVYQQNVLHTGKRWFIICPVAEHPAPEAPESSPPLPLSSLPPEASQGPCRGLTLPCLPWRRAACGAVFLSLFSAESAQSKQPPDSAPYKDQLSSKEQPSFLASQQLLSQAGPSNPPGAPPAPLAPSSPPVTALPQDGAAPATSTMPEPASGTASQAGGPGTPQGLTSELETSQPLAETHEAPLAVQPLVVGLAPCTPAPEAASTRDASAPREPLPPPAPEPSPHSGTPQPALGQPAPLLPAAVGAVSLATSQLPSPPLGPTVPPQPPSALESDGEGPPPRVGFVDSTIKSLDEKLRTLLYQEHVPTSSASAGTPVEVGDRDFTLEPLRGDQPRSEVCGGDLALPPVPKEAVSGRVQLPQPLVEKSELAPTRGAVMEQGTSSSMTAESSPRSMLGYDRDGRQVASDSHVVPSVPQDVPAFVRPARVEPTDRDGGEAGESSAEPPPSDMGTVGGQASHPQTLGARALGSPRKRPEQQDVSSPAKTVGRFSVVSTQDEWTLASPHSLRYSAPPDVYLDEAPSSPDVKLAVRRAQTASSIEVGVGEPVSSDSGDEGPRARPPVQKQASLPVSGSVAGDFVKKATAFLQRPSRAGSLGPETPSRVGMKVPTISVTSFHSQSSYISSDNDSELEDADIKKELQSLREKHLKEISELQSQQKQEIEALYRRLGKPLPPNVGFFHTAPPTGRRRKTSKSKLKAGKLLNPLVRQLKVVASSTGHLADSSRGPPAKDPAQASVGLTADSTGLSGKAVQTQQPCSVRASLSSDICSGLASDGGGARGQGWTVYHPTSERVTYKSSSKPRARFLSGPVSVSIWSALKRLCLGKEHSSRSSTSSLAPGPEPGPQPALHVQAQVNNSNNKKGTFTDDLHKLVDEWTSKTVGAAQLKPTLNQLKQTQKLQDMEAQAGWAAPGEARAMTAPRAGVGMPRLPPAPGPLSTTVIPGAAPTLSVPTPDPESEKPD

SEQ ID NO: 9989 - protein, 1706 aa, Homo sapiens
MGVPKFYRWISERYPCLSEVVKEHQIPEFDNLYLDMNGIIHQCSHPNDDDVHFRISDDKIFTDIFHYLEVLFRIIKPRKVFFMAVDGVAPRAKMNQQRGRRFRSAKEAEDKIKKAIEKGETLPTEARFDSNCITPGTEFMARLHEHLKYFVNMKISTDKSWQGVTIYFSGHETPGEGEHKIMEFIRSEKAKPDHDPNTRHCLYGLDADLIMLGLTSHEAHFSLLREEVRFGGKKTQRVCAPEETTFHLLHLSLMREYIDYEFSVLKEKITFKYDIERIIDDWILMGFLVGNDFIPHLPHLHINHDALPLLYGTYVTILPELGGYINESGHLNLPRFEKYLVKLSDFDREHFSEVFVDLKWFESKVGNKYLNEAAGVAAEEARNYKEKKKLKGQENSLCWTALDKNEGEMITSKDNLEDETEDDDLFETEFRQYKRTYYMTKMGVDVVSDDFLADQAACYVQAIQWILHYYYHGVQSWSWYYPYHYAPFLSDIHNISTLKIHFELGKPFKPFEQLLAVLPAASKNLLPACYQHLMTNEDSPIIEYYPPDFKTDLNGKQQEWEAVVLIPFIDEKRLLEAMETCNHSLKKEERKRNQHSECLMCWYDRDTEFIYPSPWPEKFPAIERCCTRYKIISLDAWRVDINKNKITRIDQKALYFCGFPTLKHIRHKFFLKKSGVQVFQQSSRGENMMLEILVDAESDELTVENVASSVLGKSVFVNWPHLEEARVVAVSDGETKFYLEEPPGTQKLYSGRTAPPSKVVHLGDKEQSNWAKEVQGISEHYLRRKGIIINETSAVVYAQLLTGRKYQINQNGEVRLEKQWSKQVVPFVYQTIVKDIRAFDSRFSNIKTLDDLFPLRSMVFMLGTPYYGCTGEVQDSGDVITEGRIRVIFSIPCEPNLDALIQNQHKYSIKYNPGYVLASRLGVSGYLVSRFTGSIFIGRGSRRNPHGDHKANVGLNLKFNKKNEEVPGYTKKVGSEWMYSSAAEQLLAEYLERAPELFSYIAKNSQEDVFYEDDIWPGENENGAEKVQEIITWLKGHPVSTLSRSSCDLQILDAAIVEKIEEEVEKCKQRKNNKKVRVTVKPHLLYRPLEQQHGVIPDRDAEFCLFDRVVNVRENFSVPVGLRGTIIGIKGANREADVLFEVLFDEEFPGGLTIRCSPGRGYRLPTSALVNLSHGSRSETGNQKLTAIVKPQPAVHQHSSSSSVSSGHLGALNHSPQSLFVPTQVPTKDDDEFCNIWQSLQGSGKMQYFQPTIQEKGAVLPQEISQVNQHHKSGFNDNSVKYQQRKHDPHRKFKEECKSPKAECWSQKMSNKQPNSGIENFLASLNISKENEVQSSHHGEPPSEEHLSPQSFAMGTRMLKEILKIDGSNTVDHKNEIKQIANEIPVSSNRRDEYGLPSQPKQNKKLASYMNKPHSANEYHNVQSMDNMCWPAPSQIPPVSTPVTELSRICSLVGMPQPDFSFLRMPQTMTVCQVKLSNGLLVHGPQCHSENEAKEKAALFALQQLGSLGMNFPLPSQVFANYPSAVPPGTIPPAFPPPTGWDHYGSNYALGAANIMPSSSHLFGSMPWGPSVPVPGKPFHHTLYSGTMPMAGGIPGGVHNQFIPLQVTKKRVANKKNFENKEAQSSQATPVQTSQPDSSNIVKVSPRESSSASLKSSPIAQPASSFQVETASQGHSISHHKSTPISSSRRKSRKLAVNFGVSKPSE

SEQ ID NO: 9990 - protein, 1694 aa, Homo sapiens
MGVPKFYRWISERYPCLSEVVKEHQIPEFDNLYLDMNGIIHQCSHPNDDDVHFRISDDKIFTDIFHYLEVLFRIIKPRKVFFMAVDGVAPRAKMNQQRGRRFRSAKEAEDKIKKAIEKGETLPTEARFDSNCITPGTEFMARLHEHLKYFVNMKISTDKSWQGVTIYFSGHETPGEGEHKIMEFIRSEKAKPDHDPNTRHCLYGLDADLIMLGLTSHEAHFSLLREEVRFGGKKTQRVCAPEETTFHLLHLSLMREYIDYEFSVLKEKITFKYDIERIIDDWILMGFLVGNDFIPHLPHLHINHDALPLLYGTYVTILPELGGYINESGHLNLPRFEKYLVKLSDFDREHFSEVFVDLKWFESKVGNKYLNEAAGVAAEEARNYKEKKKLKGQENSLCWTALDKNEGEMITSKDNLEDETEDDDLFETEFRQYKRTYYMTKMGVDVVSDDFLADQAACYVQAIQWILHYYYHGVQSWSWYYPYHYAPFLSDIHNISTLKIHFELGKPFKPFEQLLAVLPAASKNLLPACYQHLMTNEDSPIIEYYPPDFKTDLNGKQQEWEAVVLIPFIDEKRLLEAMETCNHSLKKEERKRNQHSECLMCWYDRDTEFIYPSPWPEKFPAIERCCTRYKIISLDAWRVDINKNKITRIDQKALYFCGFPTLKHIRHKFFLKKSGVQVFQQSSRGENMMLEILVDAESDELTVENVASSVLGKSVFVNWPHLEEARVVAVSDGETKFYLEEPPGTQKLYSGRTAPPSKVVHLGDKEQSNWAKEVQGISEHYLRRKGIIINETSAVVYAQLLTGRKYQINQNGEVRLEKQWSKQVVPFVYQTIVKDIRAFDSRFSNIKTLDDLFPLRSMVFMLGTPYYGCTGEVQDSGDVITEGRIRVIFSIPCEPNLDALIQNQHKYSIKYNPGYVLASRLGVSGYLVSRFTGSIFIGRGSRRNPHGDHKANVGLNLKFNKKNEEVPGYTKKVGSEWMYSSAAEQLLAEYLERAPELFSYIAKNSQEDVFYEDDIWPGENENGAEKVQEIITWLKGHPVSTLSRSSCDLQILDAAIVEKIEEEVEKCKQRKNNKKVRVTVKPHLLYRPLEQQHGVIPDRDAEFCLFDRVVNVRENFSVPVGLRGTIIGIKGANREADVLFEVLFDEEFPGGLTIRCSPGRGYRLPTSALVNLSHGSRSETGNQKLTAIVKPQPAVHQHSSSSSVSSGHLGALNHSPQSLFVPTQVPTKDDDEFCNIWQSLQGSGKMQYFQPTIQEKGAVLPQEISQVNQHHKSGFNDNSVKYQQRKHDPHRKFKEECKSPKAECWSQKMSNKQPNSGIENFLASLNISKENEVQSSHHGEPPSEEHLSPQSFAMKGTRMLKEILKIDGSNTVDHKNEIKQIANEIPVSSNRRDEYGLPSQPKQNKKLASYMNKPHSANEYHNVQSMDNMCWPAPSQIPPVSTPVTELSRICSLVGMPQPDFSFLRMPQTMTVCQVKLSNGLLVHGPQCHSENEAKEKAALFALQQLGSLGMNFPLPSQVFANYPSAVPPGTIPPAFPPPTANIMPSSSHLFGSMPWGPSVPVPGKPFHHTLYSGTMPMAGGIPGGVHNQFIPLQVTKKRVANKKNFENKEAQSSQATPVQTSQPDSSNIVKVSPRESSSASLKSSPIAQPASSFQVETASQGHSISHHKSTPISSSRRKSRKLAVNFGVSKPSE

SEQ ID NO: 9991 - protein, 459 aa, Homo sapiens
MGVPKFYRWISERYPCLSEVVKEHQIPEFDNLYLDMNGIIHQCSHPNDDDVHFRISDDKIFTDIFHYLEVLFRIIKPRKVFFMAVDGVAPRAKMNQQRGRRFRSAKEAEDKIKKAIEKGETLPTEARFDSNCITPGTEFMARLHEHLKYFVNMKISTDKSWQGVTIYFSGHETPGEGEHKIMEFIRSEKAKPDHDPNTRHCLYGLDADLIMLGLTSHEAHFSLLREEVRFGGKKTQRVCAPEETTFHLLHLSLMREYIDYEFSVLKEKITFKYDIERIIDDWILMGFLVGNDFIPHLPHLHINHDALPLLYGTYVTILPELGGYINESGHLNLPRFEKYLVKLSDFDREHFSEVFVDLKWFESKVGNKYLNEAAGVAAEEARNYKEKKKLKGQENSLCWTALDKNEGEMITSKDNLEDETEDDDLFETEFRQYKRTYYMTKMGVDVVSEYVFANAFILK

SEQ ID NO: 9992 - protein, 231 aa, Homo sapiens
MMLSCLFLLKALLALGSLESWITAGEHAKEGECPPHKNPCKELCQGDELCPAEQKCCTTGCGRICRDIPKGRKRDCPRVIRKQSCLKRCITDETCPGVKKCCTLGCNKSCVVPISKQKLAEFGGECPADPLPCEELCDGDASCPQGHKCCSTGCGRTCLGDIEGGRGGDCPKVLVGLCIVGCVMDENCQAGEKCCKSGCGRFCVPPVLPPKLTMNPNWTVRSDSELEIPVP

SEQ ID NO: 9993 - protein, 449 aa, Homo sapiens
MGSDVRDLNALLPAVPSLGGGGGCALPVSGAAQWAPVLDFAPPGASAYGSLGGPAPPPAPPPPPPPPPHSFIKQEPSWGGAEPHEEQCLSAFTVHFSGQFTGTAGACRYGPFGPPPPSQASSGQARMFPNAPYLPSCLESQPAIRNQGYSTVTFDGTPSYGHTPSHHAAQFPNHSFKHEDPMGQQGSLGEQQYSVPPPVYGCHTPTDSCTGSQALLLRTPYSSDNLYQMTSQLECMTWNQMNLGATLKGVAAGSSSSVKWTEGQSNHSTGYESDNHTTPILCGAQYRIHTHGVFRGIQDVRRVPGVAPTLVRSASETSEKRPFMCAYPGCNKRYFKLSHLQMHSRKHTGEKPYQCDFKDCERRFSRSDQLKRHQRRHTGVKPFQCKTCQRKFSRSDHLKTHTRTHTGKTSEKPFSCRWPSCQKKFARSDELVRHHNMHQRNMTKLQLAL

SEQ ID NO: 9994 - protein, 429 aa, Homo sapiens
MGSDVRDLNALLPAVPSLGGGGGCALPVSGAAQWAPVLDFAPPGASAYGSLGGPAPPPAPPPPPPPPPHSFIKQEPSWGGAEPHEEQCLSAFTVHFSGQFTGTAGACRYGPFGPPPPSQASSGQARMFPNAPYLPSCLESQPAIRNQGYSTVTFDGTPSYGHTPSHHAAQFPNHSFKHEDPMGQQGSLGEQQYSVPPPVYGCHTPTDSCTGSQALLLRTPYSSDNLYQMTSQLECMTWNQMNLGATLKGHSTGYESDNHTTPILCGAQYRIHTHGVFRGIQDVRRVPGVAPTLVRSASETSEKRPFMCAYPGCNKRYFKLSHLQMHSRKHTGEKPYQCDFKDCERRFSRSDQLKRHQRRHTGVKPFQCKTCQRKFSRSDHLKTHTRTHTGEKPFSCRWPSCQKKFARSDELVRHHNMHQRNMTKLQLAL

SEQ ID NO: 9995 - protein, 432 aa, Homo sapiens
MGSDVRDLNALLPAVPSLGGGGGCALPVSGAAQWAPVLDFAPPGASAYGSLGGPAPPPAPPPPPPPPPHSFIKQEPSWGGAEPHEEQCLSAFTVHFSGQFTGTAGACRYGPFGPPPPSQASSGQARMFPNAPYLPSCLESQPAIRNQGYSTVTFDGTPSYGHTPSHHAAQFPNHSFKHEDPMGQQGSLGEQQYSVPPPVYGCHTPTDSCTGSQALLLRTPYSSDNLYQMTSQLECMTWNQMNLGATLKGHSTGYESDNHTTPILCGAQYRIHTHGVFRGIQDVRRVPGVAPTLVRSASETSEKRPFMCAYPGCNKRYFKLSHLQMHSRKHTGEKPYQCDFKDCERRFSRSDQLKRHQRRHTGVKPFQCKTCQRKFSRSDHLKTHTRTHTGKTSEKPFSCRWPSCQKKFARSDELVRHHNMHQRNMTKLQLAL

SEQ ID NO: 9996 - protein, 446 aa, Homo sapiens
MGSDVRDLNALLPAVPSLGGGGGCALPVSGAAQWAPVLDFAPPGASAYGSLGGPAPPPAPPPPPPPPPHSFIKQEPSWGGAEPHEEQCLSAFTVHFSGQFTGTAGACRYGPFGPPPPSQASSGQARMFPNAPYLPSCLESQPAIRNQGYSTVTFDGTPSYGHTPSHHAAQFPNHSFKHEDPMGQQGSLGEQQYSVPPPVYGCHTPTDSCTGSQALLLRTPYSSDNLYQMTSQLECMTWNQMNLGATLKGVAAGSSSSVKWTEGQSNHSTGYESDNHTTPILCGAQYRIHTHGVFRGIQDVRRVPGVAPTLVRSASETSEKRPFMCAYPGCNKRYFKLSHLQMHSRKHTGEKPYQCDFKDCERRFSRSDQLKRHQRRHTGVKPFQCKTCQRKFSRSDHLKTHTRTHTGEKPFSCRWPSCQKKFARSDELVRHHNMHQRNMTKLQLAL

SEQ ID NO: 9997 - protein, 302 aa, Homo sapiens
MEKGYSTVTFDGTPSYGHTPSHHAAQFPNHSFKHEDPMGQQGSLGEQQYSVPPPVYGCHTPTDSCTGSQALLLRTPYSSDNLYQMTSQLECMTWNQMNLGATLKGVAAGSSSSVKWTEGQSNHSTGYESDNHTTPILCGAQYRIHTHGVFRGIQDVRRVPGVAPTLVRSASETSEKRPFMCAYPGCNKRYFKLSHLQMHSRKHTGEKPYQCDFKDCERRFSRSDQLKRHQRRHTGVKPFQCKTCQRKFSRSDHLKTHTRTHTGEKPFSCRWPSCQKKFARSDELVRHHNMHQRNMTKLQLAL

SEQ ID NO: 9998 - protein, 522 aa, Homo sapiens
MDFLLLQDPASTCVPEPASQHTLRSGPGCLQQPEQQGVRDPGGIWAKLGAAEASAERLQGRRSRGASGSEPQQMGSDVRDLNALLPAVPSLGGGGGCALPVSGAAQWAPVLDFAPPGASAYGSLGGPAPPPAPPPPPPPPPHSFIKQEPSWGGAEPHEEQCLSAFTVHFSGQFTGTAGACRYGPFGPPPPSQASSGQARMFPNAPYLPSCLESQPAIRNQGYSTVTFDGTPSYGHTPSHHAAQFPNHSFKHEDPMGQQGSLGEQQYSVPPPVYGCHTPTDSCTGSQALLLRTPYSSDNLYQMTSQLECMTWNQMNLGATLKGVAAGSSSSVKWTEGQSNHSTGYESDNHTTPILCGAQYRIHTHGVFRGIQDVRRVPGVAPTLVRSASETSEKRPFMCAYPGCNKRYFKLSHLQMHSRKHTGEKPYQCDFKDCERRFSRSDQLKRHQRRHTGVKPFQCKTCQRKFSRSDHLKTHTRTHTGKTSEKPFSCRWPSCQKKFARSDELVRHHNMHQRNMTKLQLAL

SEQ ID NO: 9999 - protein, 505 aa, Homo sapiens
MDFLLLQDPASTCVPEPASQHTLRSGPGCLQQPEQQGVRDPGGIWAKLGAAEASAERLQGRRSRGASGSEPQQMGSDVRDLNALLPAVPSLGGGGGCALPVSGAAQWAPVLDFAPPGASAYGSLGGPAPPPAPPPPPPPPPHSFIKQEPSWGGAEPHEEQCLSAFTVHFSGQFTGTAGACRYGPFGPPPPSQASSGQARMFPNAPYLPSCLESQPAIRNQGYSTVTFDGTPSYGHTPSHHAAQFPNHSFKHEDPMGQQGSLGEQQYSVPPPVYGCHTPTDSCTGSQALLLRTPYSSDNLYQMTSQLECMTWNQMNLGATLKGHSTGYESDNHTTPILCGAQYRIHTHGVFRGIQDVRRVPGVAPTLVRSASETSEKRPFMCAYPGCNKRYFKLSHLQMHSRKHTGEKPYQCDFKDCERRFSRSDQLKRHQRRHTGVKPFQCKTCQRKFSRSDHLKTHTRTHTGKTSEKPFSCRWPSCQKKFARSDELVRHHNMHQRNMTKLQLAL

SEQ ID NO: 10000 - protein, 288 aa, Homo sapiens
MEKGYSTVTFDGTPSYGHTPSHHAAQFPNHSFKHEDPMGQQGSLGEQQYSVPPPVYGCHTPTDSCTGSQALLLRTPYSSDNLYQMTSQLECMTWNQMNLGATLKGHSTGYESDNHTTPILCGAQYRIHTHGVFRGIQDVRRVPGVAPTLVRSASETSEKRPFMCAYPGCNKRYFKLSHLQMHSRKHTGEKPYQCDFKDCERRFSRSDQLKRHQRRHTGVKPFQCKTCQRKFSRSDHLKTHTRTHTGKTSEKPFSCRWPSCQKKFARSDELVRHHNMHQRNMTKLQLAL

SEQ ID NO: 10001 - protein, 163 aa, Homo sapiens
MAFGEPPSGHSTRHRTLHGLSFHTAMGMAWSLHYQGQGGTLCLVGVSTPSHDKAVLQGLPHFSVNLGVQPSALAGRRGDASCPSSWRSADPTVSPNLGAPGGPNAIDALHGEQLGLFLRTKMGRDPKDVHGLTPALCGPCLAGLPSSHSPQFSCNTAPLKMLS

SEQ ID NO: 10002 - protein, 711 aa, Homo sapiens
MPADVNLSQKPQVLGPEKQDGSCEASVSFEDVTVDFSREEWQQLDPAQRCLYRDVMLELYSHLFAVGYHIPNPEVIFRMLKEKEPRVEEAEVSHQRCQEREFGLEIPQKEISKKASFQKDMVGEFTRDGSWCSILEELRLDADRTKKDEQNQIQPMSHSAFFNKKTLNTESNCEYKDPGKMIRTRPHLASSQKQPQKCCLFTESLKLNLEVNGQNESNDTEQLDDVVGSGQLFSHSSSDACSKNIHTGETFCKGNQCRKVCGHKQSLKQHQIHTQKKPDGCSECGGSFTQKSHLFAQQRIHSVGNLHECGKCGKAFMPQLKLSVYLTDHTGDIPCICKECGKVFIQRSELLTHQKTHTRKKPYKCHDCGKAFFQMLSLFRHQRTHSREKLYECSECGKGFSQNSTLIIHQKIHTGERQYACSECGKAFTQKSTLSLHQRIHSGQKSYVCIECGQAFIQKAHLIVHQRSHTGEKPYQCHNCGKSFISKSQLDIHHRIHTGEKPYECSDCGKTFTQKSHLNIHQKIHTGERHHVCSECGKAFNQKSILSMHQRIHTGEKPYKCSECGKAFTSKSQFKEHQRIHTGEKPYVCTECGKAFNGRSNFHKHQITHTRERPFVCYKCGKAFVQKSELITHQRTHMGEKPYECLDCGKSFSKKPQLKVHQRIHTGERPYVCSECGKAFNNRSNFNKHQTTHTRDKSYKCSYSVKGFTKQ

SEQ ID NO: 10003 - protein, 499 aa, Homo sapiens
MGPLQFRDVAIEFSLEEWHCLDTAQRNLYRDVMLENYRNLVFLGIVVSKPDLVTCLEQGKKPLTMERHEMIAKPPVMSSHFAQDLWPENIQNSFQIGMLRRYEECRHDNLQLKKGCKSVGEHKVHKGGYNGLNQCLTTTQKEIFQCDKYGKVFHKFSNSNTYKTRHTGINLFKCIICGKAFKRSSTLTTHKKIHTGEKPYRCEECGKAFNQSANLTTHKRIHTGEKPYRCEECGKAFKQSSNLTTHKKIHTGEKPYKCEECGKAFNRSTDLTTHKIVHTGEKPYKCEECGKAFKHPSHVTTHKKIHTRGKPYNCEECGKSFKHCSNLTIHKRIHTGEKPYKCEECGKAFHLSSHLTTHKILHTGEKPYRCRECGKAFNHSTTLFSHEKIHTGEKPYKCDECGKTFTWPSILSKHKRTHTGEKPYKCEECGKSFTASSTLTTHKRIHTGEKPYKCEECGKAFNWSSDLNKHKKIHIERKPYIVKNVTDLLNVPPLLISIR

SEQ ID NO: 10004 - protein, 423 aa, Homo sapiens
MSSHFAQDLWPENIQNSFQIGMLRRYEECRHDNLQLKKGCKSVGEHKVHKGGYNGLNQCLTTTQKEIFQCDKYGKVFHKFSNSNTYKTRHTGINLFKCIICGKAFKRSSTLTTHKKIHTGEKPYRCEECGKAFNQSANLTTHKRIHTGEKPYRCEECGKAFKQSSNLTTHKKIHTGEKPYKCEECGKAFNRSTDLTTHKIVHTGEKPYKCEECGKAFKHPSHVTTHKKIHTRGKPYNCEECGKSFKHCSNLTIHKRIHTGEKPYKCEECGKAFHLSSHLTTHKILHTGEKPYRCRECGKAFNHSTTLFSHEKIHTGEKPYKCDECGKTFTWPSILSKHKRTHTGEKPYKCEECGKSFTASSTLTTHKRIHTGEKPYKCEECGKAFNWSSDLNKHKKIHIERKPYIVKNVTDLLNVPPLLISIR

SEQ ID NO: 10005 - protein, 1989 aa, Homo sapiens
MATADTPAPASSGLSPKEEGELEDGEISDDDNNSQIRSRSSSSSSGGGLLPYPRRRPPHSARGGGSGGGGGSSSSSSSSQQQLRNFSRSRHASERGHLRGPSSYRPKEPFRSHPPSVRMPSSSLSESSPRPSFWERSHLALDRFRFRGRPYRGGSRWSRGRGVGERGGKPGCRPPLGGGAGSGFSSSQSWREPSPPRKSSKSFGRSPSRKQNYSSKNENCVEETFEDLLLKYKQIQLELECINKDEKLALSSKEENVQEDPKTLNFEDQTSTDNVSITKDSSKEVAPEEKTQVKTFQAFELKPLRQKLTLPGDKNRLKKVKDGAKPLSLKSDTTDSSQGLQDKEQNLTRRISTSDILSEKKLGEDEEELSELQLRLLALQSASKKWQQKEQQVMKESKEKLTKTKTVQQKVKTSTKTHSAKKVSTTAKQALRKQQTKAWKKLQQQKEQERQKEEDQRKQAEEEERRKREEEIRKIRDLSNQEEQYNRFMKLVGGKRRSRSKSSDPDLRRSLDKQPTDSGGGIYQYDNYEEVAMDTDSETSSPAPSPVQPPFFSECSLGYFSPAPSLSLPPPPQVSSLPPLSQPYVEGLCVSLEPLPPLPPLPPLPPEDPEQPPKPPFADEEEEEEMLLREELLKSLANKRAFKPEETSSNSDPPSPPVLNNSHPVPRSNLSIVSINTVSQPRIQNPKFHRGPRLPRTVISLPKHKSVVVTLNDSDDSESDGEASKSTNSVFGGLESMIKEARRTAEQASKPKVPPKSEKENDPLRTPEALPEEKKIEYRLLKEEIANREKQRLIKSDQLKTSSSSPANSDVEIDGIGRIAMVTKQVTDAESKLKKHRILLMKDESVLKNLVQQEAKKKESVRNAEAKITKLTEQLQATEKILNVNRMFLKKLQEQIHRVQQRVTIKKALTLKYGEELARAKAVASKEIGKRKLEQDRFGPNKMMRLDSSPVSSPRKHSAELIAMEKRRLQKLEYEYALKIQKLKEARALKAKEQQNISPVVEEEPEFSLPQPSLHDLTQDKLTLDTEENDVDDEILSGSSRERRRSFLESNYFTKPNLKHTDTANKECINKLNKNTVEKPELFLGLKIGELQKLYSKADSLKQLILKTTTGITEKVLHGQEISVDVDFVTAQSKTMEVKPCPFRPYHSPLLVFKSYRFSPYYRTKEKLPLSSVSYSNMIEPDQCFCRFDLTGTCNDDDCQWQHIQDYTLSRKQLFQDILSYNLSLIGCAETSTNEEITASAEKYVEKLFGVNKDRMSMDQMAVLLVSNINESKGHTPPFTTYKDKRKWKPKFWRKPISDNSFSSDEEQSTGPIKYAFQPENQINVPALDTVVTPDDVRYFTNETDDIANLEASVLENPSHVQLWLKLAYKYLNQNEGECSESLDSALNVLARALENNKDNPEIWCHYLRLFSKRGTKDEVQEMCETAVEYAPDYQSFWTFLHLESTFEEKDYVCERMLEFLMGAAKQETSNILSFQLLEALLFRVQLHIFTGRCQSALAILQNALKSANDGIVAEYLKTSDRCLAWLAYIHLIEFNILPSKFYDPSNDNPSRIVNTESFVMPWQAVQDVKTNPDMLLAVFEDAVKACTDESLAVEERIEACLPLYTNMIALHQLLERYEAAMELCKSLLESCPINCQLLEALVALYLQTNQHDKARAVWLTAFEKNPQNAEVFYHMCKFFILQNRGDNLLPFLRKFIASFFKPGFEKYNNLDLFRYLLNIPGPIDIPSRLCKGNFDDDMFNHQVPYLWLIYCLCHPLQSSIKETVEAYEAALGVAMRCDIVQKIWMDYLVFANNRAAGSRNKVQEFKFFTDLVNRCLVTVPARYPIPFSSADYWSNYEFHNRVIFFYLSCVPKTQHSKTLERFCSVMPANSGLALRLLQHEWEESNVQILKLQAKMFTYNIPTCLATWKIAIAAEIVLKGQREVHRLYQRALQKLPLCASLWKDQLLFEASEGGKTDNLRKLVSKCQEIGVSLNELLNLNSNKTESKNH

SEQ ID NO: 10006 - protein, 1910 aa, Homo sapiens
MATADTPAPASSGLSPKEEGELEDGEISDDDNNSQIRSRSSSSSSGGGLLPYPRRRPPHSARGGGSGGGGGSSSSSSSSQQQLRNFSRSRHASERGHLRGPSSYRPKEPFRSHPPSVRMPSSSLSESSPRPSFWERSHLALDRFRFRGRPYRGGSRWSRGRGVGERGGKPGCRPPLGGGAGSGFSSSQSWREPSPPRKSSKSFGRSPSRKQNYSSKNENCVEETFEDLLLKYKQIQLELECINKDEKLALSSKEENVQEDPKTLNFEDQTSTDNVSITKDSSKEVAPEEKTQVKTFQAFELKPLRQKLTLPGDKNRLKKVKDGAKPLSLKSDTTDSSQGLQDKEQNLTRRISTSDILSEKKLGEDEEELSELQLRLLALQSASKKWQQKEQQVMKESKEKLTKTKTVQQKVKTSTKTHSAKKVSTTAKQALRKQQTKAWKKLQQQKEQERQKEEDQRKQAEEEERRKREEEIRKIRDLSNQEEQYNRFMKLVGGKRRSRSKSSDPDLRRSLDKQPTDSGGGIYQYDNYEEVAMDTDSETSSPAPSPVQPPFFSECSLGYFSPAPSLSLPPPPQVSSLPPLSQPYVEGLCVSLEPLPPLPPLPPLPPEDPEQPPKPPFADEEEEEEMLLREELLKSLANKRAFKPEETSSNSDPPSPPVLNNSHPVPRSNLSIVSINTVSQPRIQNPKFHRGPRLPRTVISLPKHKSVVVTLNDSDDSESDGEASKSTNSVFGGLESMIKEARRTAEQASKPKVPPKSEKENDPLRTPEALPEEKKIEYRLLKEEIANREKQRLIKSDQLKTSSSSPANSDVEIDGIGRIAMVTKQVTDAESKLKKHRILLMKDESVLKNLVQQEAKKKESVRNAEAKITKLTEQLQATEKILNVNRMFLKKLQEQIHRVQQRVTIKKALTLKYGEELARAKAVASKEIGKRKLEQDRFGPNKMMRLDSSPVSSPRKHSAELIAMEKRRLQKLEYEYALKIQKLKEARALKAKEQQNISPVVEEEPEFSLPQPSLHDLTQDKLTLDTEENDVDDEILSGSSRERRRSFLESNYFTKPNLKHTDTANKECINKLNKNTVEKPELFLGLKIGELQKLYSKADSLKQLILKTTTGITEKVLHGQEISVDVDFVTAQSKTMEVKPCPFRPYHSPLLVFKSYRFSPYYRTKEKLPLSSVSYSNMIEPDQCFCRFDLTGTCNDDDCQWQHIQDYTLSRKQLFQDILSYNLSLIGCAETSTNEEITASAEKYVEKLFGVNKDRMSMDQMAVLLVSNINESKGHTPPFTTYKDKRKWKPKFWRKPISDNSFSSDEEQSTGPIKYAFQPENQINVPALDTVVTPDDVRYFTNETDDIANLEASVLENPSHVQLWLKLAYKYLNQNEGECSESLDSALNVLARALENNKDNPEIWCHYLRLFSKRGTKDEVQEMCETAVEYAPDYQSFWTFLHLESTFEEKDYVCERMLEFLMGAAKQETSNILSFQLLEALLFRVQLHIFTGRCQSALAILQNALKSANDGIVAEYLKTSDRCLAWLAYIHLIEFNILPSKFYDPSNDNPSRIVNTESFVMPWQAVQDVKTNPDMLLAVFEDAVKACTDESLAVEERIEACLPLYTNMIALHQLLERYEAAMELCKSLLESCPINCQLLEALVALYLQTNQHDKARAVWLTAFEKNPQNAEVFYHMCKFFILQNRGDNLLPFLRKFIASFFKPGFEKYNNLDLFRYLLNIPGPIDIPSRLCKGNFDDDMFNHQVPYLWLIYCLCHPLQSSIKETVEAYEAALGVAMRCDIVQKIWMDYLVFANNRAAGSRNKVQEFKFFTDLVNRCLVTVPARYPIPFSSADYWSNYEFHNRVIFFYLSCVPKTQHSKTLERFCSVMPANSGLALRLLQHEWEESNVQILKLQAKMFTYNIPTCLATWKM

SEQ ID NO: 10007 - protein, 346 aa, Homo sapiens
MATADTPAPASSGLSPKEEGELEDGEISDDDNNSQIRSRSSSSSSGGGLLPYPRRRPPHSARGGGSGGGGGSSSSSSSSQQQLRNFSRSRHASERGHLRGPSSYRPKEPFRSHPPSVRMPSSSLSESSPRPSFWERSHLALDRFRFRGRPYRGGSRWSRGRGVGERGGKPGCRPPLGGGAGSGFSSSQSWREPSPPRKSSKSFGRSPSRKQNYSSKNENCVEETFEDLLLKYKQIQLELECINKDEKLALSSKEENVQEDPKTLNFEDQTSTDNVSITKDSSKEVAPEEKTQVKTFQAFELKPLRQKLTLPGDKNRLKKVKDGAKPLSLKSDTTDSSQGNGIKYFS

SEQ ID NO: 10008 - protein, 537 aa, Homo sapiens
MEGLLSVALQGAELEGNWKHEGQVEDLQENQESCPEPEAVACKGDPAGDSMQERDEFSRIPRTISSPAATQASVPDDSSSRRCSAPGESPKERHPDSRQRERGGGPKKPWKCGDCGKAFSYCSAFILHQRIHTGEKPFACPECGKAFSQSVHLTLHQRTHTGEKPYACHECGKAFSQGSYLASHWRTHTGEKPHRCADCGKAFTRVTHLTQHRRVHTGERPYACAQCAKAFRNRSSLIEHQRIHTGEKPYECSACAKAFRFSSALIRHQRIHTEEKPYRCGQCAKAFAQIAHLTQHRRVHTGEKPYTCQDCGALFSQSASLAEHRRIHTGEKPYACGQCAKAFTQVSHLTQHQRTHTGERPYPCHDCGKRFSNRSHLLQHRLVHTGERPYRCLQCGAAFSHVSSLIEHQKIHTGERPYKCGECGKAFSQGSSLALHQRTHTGERPYTCPECGKAFSNRSYLIQHHIVHTGEKPYECSGCGKAFSFSSALIRHQRTHADSSGRLCPAPTPDSTPGLSQGGETCQQGCPGRNPRGPAED

SEQ ID NO: 10009 - protein, 632 aa, Homo sapiens
MLREEAAQKRKEKEPGMALPQGHLTFRDVAIEFSLEEWKCLDPTQRALYRAMMLENYRNLHSVDISSKCMMKKFSSTAQGNTEVDTGTLERHESHHIGDFCFQKIGKDIHDFEFQWQEDKRNSHEATMTQIKKLTGSTDRYDRRHPGNKPIKDQLGLSFHSHLPELHIFQTKGKVGNQVEKSINDASSVLTSQRISSRPKIHISNNYENNFFHSSLLTLKQEVHIREKSFQCNESGKAFNCSSLLRKHQIIYLGGKQYKCDVCGKVFNQKRYLACHHRCHTGEKPYKCNECGKVFNQQSNLASHHRLHTGEKPYKCEECDKVFSRKSNLERHRRIHTGEKPYKCKVCEKAFRRDSHLTQHTRIHTGEKPYKCNECGKAFSGQSTLIHHQAIHGIGKLYKCNDCHKVFSNATTIANHWRIHNEERSYKCNKCGKFFRRRSYLVVHWRTHTGEKPYKCNECGKTFHHNSALVIHKAIHTGEKPYKCNECGKTFRHNSALVIHKAIHTGEKPYKCNECGKVFNQQATLARHHRLHTGEKPYKCEECDTVFSRKSHHETHKRIHTGEKPYKCDDFDEAFSQASSYAKQRRIHMGEKHHKCDDCGKAFTSHSHRIRHQRIHTGQKSYKCHKRGKVFS

SEQ ID NO: 10010 - protein, 492 aa, Homo sapiens
MAMALPMPGPQEAVVFEDVAVYFTRIEWSCLAPDQQALYRDVMLENYGNLASLGFLVAKPALISLLEQGEEPGALILQVAEQSVAKASLCTDSRMEAGIMESPLQRKLSRQAGLPGTVWGCLPWGHPVGGHPAPPHPHGGPEDGSDKPTHPRAREHSASPRVLQEDLGRPVGSSAPRYRCVCGKAFRYNSLLLRHQIIHTGAKPFQCTECGKAFKQSSILLRHQLIHTEEKPFQCGECGKAFRQSTQLAAHHRVHTRERPYACGECGKAFSRSSRLLQHQKFHTGEKPFACTECGKAFCRRFTLNEHGRIHSGERPYRCLRCGQRFIRGSSLLKHHRLHAQEGAQDGGVGQGALLGAAQRPQAGDPPHECPVCGRPFRHNSLLLLHLRLHTGEKPFECAECGKAFGRKSNLTLHQKIHTKEKPFACTECGKAFRRSYTLNEHYRLHSGERPYRCRACGRACSRLSTLIQHQKVHGREPGEDTEGRRAPCWAS

SEQ ID NO: 10011 - protein, 1171 aa, Homo sapiens
MENNLKTCPKEDGDFVSDKIKFKIEEEDDDGIPPDSLERMDFKSEQEDMKQTDSGGERAGLGGTGCSCKPPGKYLSAESEDDYGALFSQYSSTLYDVAMEAVTQSLLSSRNMSSRKKSPAWKHFFISPRDSTKAICMYCVKEFSRGKNEKDLSTSCLMRHVRRAHPTVLIQENGSVSAVSSFPSPSLLLPPQPADAGDLSTILSPIKLVQKVASKIPSPDRITEESVSVVSSEEISSDMSVSEKCGREEALVGSSPHLPALHYDEPAENLAEKSLPLPKSTSGSRRRSAVWKHFYLSPLDNSKAVCIHCMNEFSRGKNGKDLGTSCLIRHMWRAHRAIVLQENGGTGIPPLYSTPPTLLPSLLPPEGELSSVSSSPVKPVRESPSASSSPDRLTEDLQSHLNPGDGLMEDVAAFSSSDDIGEASASSPEKQQADGLSPRLFESGAIFQQNKKVMKRLKSEVWHHFSLAPMDSLKAECRYCGCAISRGKKGDVGTSCLMRHLYRRHPEVVGSQKGFLGASLANSPYATLASAESSSSKLTDLPTVVTKNNQVMFPVNSKKTSKLWNHFSICSADSTKVVCLHCGRTISRGKKPTNLGTSCLLRHLQRFHSNVLKTEVSETARPSSPDTRVPRGTELSGASSFDDTNEKFYDSHPVAKKITSLIAEMIALDLQPYSFVDNVGFNRLLEYLKPQYSLPAPSYFSRTAIPGMYDNVKQIIMSHLKEAESGVIHFTSGIWMSNQTREYLTLTAHWVSFESPARPRCDDHHCSALLDVSQVDCDYSGNSIQKQLECWWEAWVTSTGLQVGITVTDNASIGKTLNEGEHSSVQCFSHTVNLIVSEAIKSQRMVQNLLSLARKICERVHRSPKAKEKLAELQREYALPQHHLIQDVPSKWSTSFHMLERLIEQKRAINEMSVECNFRELISCDQWEVMQSVCRALKPFEAASREMSTQMSTLSQVIPMVHILNRKVEMLFEETMGIDTMLRSLKEAMVSRLSATLHDPRYVFATLLDPRYKASLFTEEEAEQYKQDLIRELELMNSTSEDVAASHRCDAGSPSKDSAAEENLWSLVAKVKKKDPREKLPEAMVLAYLEEEVLEHSCDPLTYWNLKKASWPGLSALAVRFLGCPPSIVPSEKLFNTPTENGSLGQSRLMMEHFEKLIFLKVNLPLIYFQY

SEQ ID NO: 10012 - protein, 590 aa, Homo sapiens
MLHEEAAQKRKGKEPGMALPQGRLTFRDVAIEFSLAEWKFLNPAQRALYREVMLENYRNLEAVDISSKRMMKEVLSTGQGNTEVIHTGMLQRHESYHTGDFCFQEIEKDIHDFEFQSQKDERNGHEASMPKIKELMGSTDRHDQRHAGNKPIKDQLGLSFHLHLPELHIFQPEEKIANQVEKSVNDASSISTSQRISCRPETHTPNNYGNNFFHSSLLTQKQEVHMREKSFQCNETGEAFNCSSFVRKHQIIHLGEKQYKFDICGKVFNEKRYLARHRRCHTSEKPYKCNECGKSFSYKSSLTCHRRCHTGEKPYKCNECGKSFSYKSSLTCHHRCHTGEKPYKCNECGKSFSYKSSLRCHRRLHTGIKPYKCNECGKMFGQNSTLVIHKAIHTGEKPYKCNECGKAFNQQSHLSRHHRLHTGEKPYKCNDCGKAFIHQSSLARHHRLHTGEKSYKCEECDRVFSQKSNLERHKIIHTGEKPYKCNECHKTFSHRSSLPCHRRLHSGEKPYKCNECGKTFNVQSHLSRHHRLHTGEKPYKCKVCDKAFMCHSYLANHTRIHSGEKPYKCNECGKAHNHLIDSSIKPCMSS

SEQ ID NO: 10013 - protein, 486 aa, Homo sapiens
MAAIYLSRGFFSREPICPFEEKTKVERMVEDYLASGYQDSVTFDDVAVDFTPEEWALLDTTEKYLYRDVMLENYMNLASVEWEIQPRTKRSSLQQGFLKNQIFSGIQMTRGYSGWKLCDCKNCGEVFREQFCLKTHMRVQNGGNTSEGNCYGKDTLSVHKEASTGQELSKFNPCGKVFTLTPGLAVHLEVLNARQPYKCKECGKGFKYFASLDNHMGIHTDEKLCEFQEYGRAVTASSHLKQCVAVHTGKKSKKTKKCGKSFTNFSQLYAPVKTHKGEKSFECKECGRSFRNSSCLNDHIQIHTGIKPHKCTYCGKAFTRSTQLTEHVRTHTGIKPYECKECGQAFAQYSGLSIHIRSHSGKKPYQCKECGKAFTTSTSLIQHTRIHTGEKPYECVECGKTFITSSRRSKHLKTHSGEKPFVCKICGKAFLYSSRLNVHLRTHTGEKPFVCKECGKAFAVSSRLSRHERIHTGEKPYECKDMSVTI

SEQ ID NO: 10014 - protein, 350 aa, Homo sapiens
MRVQNGGNTSEGNCYGKDTLSVHKEASTGQELSKFNPCGKVFTLTPGLAVHLEVLNARQPYKCKECGKGFKYFASLDNHMGIHTDEKLCEFQEYGRAVTASSHLKQCVAVHTGKKSKKTKKCGKSFTNFSQLYAPVKTHKGEKSFECKECGRSFRNSSCLNDHIQIHTGIKPHKCTYCGKAFTRSTQLTEHVRTHTGIKPYECKECGQAFAQYSGLSIHIRSHSGKKPYQCKECGKAFTTSTSLIQHTRIHTGEKPYECVECGKTFITSSRRSKHLKTHSGEKPFVCKICGKAFLYSSRLNVHLRTHTGEKPFVCKECGKAFAVSSRLSRHERIHTGEKPYECKDMSVTI

SEQ ID NO: 10015 - protein, 193 aa, Homo sapiens
MLSHKTQHKSIYTREKSYKCKKCGKTFNWSSILTNNKKIHTEQKPYKCEECGKAFKQHSTLTTHKIICAEEKLYRCEECGKAFCQPSTLTRYKRMHRRKKLYKCEECGKAFTQFSTLTKHKRIHTRGKHYKCEESGKAFIWSSGLTEHRRVHTRQKPYKCEECGKALIQFSTLTRHKRIHTGEKPNKSMWQTF

SEQ ID NO: 10016 - protein, 119 aa, Homo sapiens
MVKMTKSKTFQAYLPNCHRTYSCIHCRAHLANHDELISKSFQGSQGRAYLFNSVVNVGCGPAEERVLLTGLHAVADIYCENCKTTLGWKYEHAFESSQKYKEGKFIIELAHMIKDNGWE

SEQ ID NO: 10017 - protein, 589 aa, Homo sapiens
MIKFQERVTFKDIAVIFTKEELAVLDKAQINLYQDVMLENFRNFISVDGIKNNILNLQGKGLIYLSQEELHCWKIWKQRIRDLSVSQDYIMNLQEQCSPHLEDVSLCEEWAGMSLQISENENYVVNAIIKNQDITAWQSLTQVLTPESWRKANIMTEPQKSQGRYKGIYVEEKLYRHARHDESLNWTSRDHHESQECKGEDPGRHPNCGKNLGMKSTVEQHHAVHVLPQPFTCNNCGVAFADDTDPRVHHSTHLGEKSYKCDQYGKNLSQSQYLIVHCKTHSGETPYEFHEWPTGCKQSSDLPRCQKVPSGDNPYKCKECGKGFRCNSSLHNHHRVHTGEMPYKCHVCGKAFGFRSLPCIHQGVHTGKKPYKCEDCGKGFEQSSNLLIHQRVHTGEKPYKSSECGKCFSSSSVLQVHWRFHTGEKPYRCGECGKGFSQSTHLHIHQRVHTGEKQYNAMCVERILGIVLFFTLIREFTLQKNHINAKCVESALVTVHIFTSIKAITQERNHINVMSVVKASVGIQIFNVHLRVHRGQRPCKCKACGKGFSRNSHLLAQQRVRIDKTQYTHCEHGKDLLTHQRLHEQRETL

SEQ ID NO: 10018 - protein, 1121 aa, Homo sapiens
MDALEDYVWPRATSELILLPVTGLECVGDRLLAGEGPDVLVYSLDFGGHLRMIKRVQNLLGHYLIHGFRVRPEPNGDLDLEAMVAVFGSKGLRVVKISWGQGHFWELWRSGLWNMSDWIWDARWLEGNIALALGHNSVVLYDPVVGCILQEVPCTDRCTLSSACLIGDAWKELTIVAGAVSNQLLVWYPATALADNKPVAPDRRISGHVGIIFSMSYLESKGLLATASEDRSVRIWKVGDLRVPGGRVQNIGHCFGHSARVWQVKLLENYLISAGEDCVCLVWSHEGEILQAFRGHQGRGIRAIAAHERQAWVITGGDDSGIRLWHLVGRGYRGLGVSALCFKSRSRPGTLKAVTLAGSWRLLAVTDTGALYLYDVEVKCWEQLLEDKHFQSYCLLEAAPGPEGFGLCAMANGEGRVKVVPINTPTAAVDQTLFPGKVHSLSWALRGYEELLLLASGPGGVVACLEISAAPSGKAIFVKERCRYLLPPSKQRWHTCSAFLPPGDFLVCGDRRGSVLLFPSRPGLLKDPGVGGKARAGAGAPVVGSGSSGGGNAFTGLGPVSTLPSLHGKQGVTSVTCHGGYVYTTGRDGAYYQLFVRDGQLQPVLRQKSCRGMNWLAGLRIVPDGSMVILGFHANEFVVWNPRSHEKLHIVNCGGGHRSWAFSDTEAAMAFAYLKDGDVMLYRALGGCTRPHVILREGLHGREITCVKRVGTITLGPEYGVPSFMQPDDLEPGSEGPDLTDIVITCSEDTTVCVLALPTTTGSAHALTAVCNHISSVRAVAVWGIGTPGGPQDPQPGLTAHVVSAGGRAEMHCFSIMVTPDPSTPSRLACHVMHLSSHRLDEYWDRQRNRHRMVKVDPETRYMSLAVCELDQPGLGPLVAAACSDGAVRLFLLQDSGRILQLLAETFHHKRCVLKVHSFTHEAPNQRRRLLLCSAATDGSLAFWDLTTMLDHDSTVLEPPVDPGLPYRLGTPSLTLQAHSCGINSLHTLPTREGHHLVASGSEDGSLHVFVLAVEMLQLEEAVGEAGLVPQLRVLEEYSVPCAHAAHVTGLKILSPSIMVSASIDQRLTFWRLGHGEPTFMNSTVFHVPDVADMDCWPVSPEFGHRCALGGQGLEVYNWYD

SEQ ID NO: 10019 - protein, 387 aa, Homo sapiens
MEKIEEQFANLHIVKCSLGTKEPTYLLGIDTSKTVQAGKENLVAVLCSNGSIRIYDKERLNVLREFSGYPGLLNGVRFANSCDSVYSACTDGTVKCWDARVAREKPVQLFKGYPSNIFISFDINCNDHIICAGTEKVDDDALLVFWDARMNSQNLSTTKDSLGAYSETHSDDVTQVRFHPSNPNMVVSGSSDGLVNVFDINIDNEEDALVTTCNSISSVSCIGWSGKGYKQIYCMTHDEGFYWWDLNHLDTDEPVTRLNIQDVREVVNMKEDALDYLIGGLYHEKTDTLHVIGGTNKGRIHLMNCSMSGLTHVTSLQGGHAATVRSFCWNVQDDSLLTGGEDAQLLLWKPGAIEKTFTKKESMKIASSVHQRVRVHSNDSYKRRKKQ

SEQ ID NO: 10020 - protein, 508 aa, Homo sapiens
MPPKRNEKYKLPIPFPEGKVLDDMEGNQWVLGKKIGSGGFGLIYLAFPTNKPEKDARHVVKVEYQENGPLFSELKFYQRVAKKDCIKKWIERKQLDYLGIPLFYGSGLTEFKGRSYRFMVMERLGIDLQKISGQNGTFKKSTVLQLGIRMLDVLEYIHENEYVHGDIKAANLLLGYKNPDQVYLADYGLSYRYCPNGNHKQYQENPRKGHNGTIEFTSLDAHKGVALSRRSDVEILGYCMLRWLCGKLPWEQNLKDPVAVQTAKTNLLDELPQSVLKWAPSGSSCCEIAQFLVCAHSLAYDEKPNYQALKKILNPHGIPLGPLDFSTKGQSINVHTPNSQKVDSQKAATKQVNKAHNRLIEKKVHSERSAESCATWKVQKEEKLIGLMNNEAAQESTRRRQKYQESQEPLNEVNSFPQKISYTQFPNSFYEPHQDFTSPDIFKKSRSPSWYKYTSTVSTGITDLESSTGLWPTISQFTLSEETNADVYYYRIIIPVLLMLVFLALFFL

SEQ ID NO: 10021 - protein, 397 aa, Homo sapiens
MPPKRNEKYKLPIPFPEGKVLDDMEGNQWVLGKKIGSGGFGLIYLAFPTNKPEKDARHVVKVEYQENGPLFSELKFYQRVAKKDCIKKWIERKQLDYLGIPLFYGSGLTEFKGRSYRFMVMERLGIDLQKISGQNGTFKKSTVLQLGIRMLDVLEYIHENEYVHGDIKAANLLLGYKNPDQVYLADYGLSYRYCPNGNHKQYQENPRKGHNGTIEFTSLDAHKGVALSRRSDVEILGYCMLRWLCGKLPWEQNLKDPVAVQTAKTNLLDELPQSVLKWAPSGSSCCEIAQFLVCAHSLAYDEKPNYQALKKILNPHGIPLGPLDFSTKGQSINVHTPNSQKVDSQKAATKQVNKAHNRLIEKKVHSERSAESCATWKVQKEEKLIGLMNNEAAQVEA

SEQ ID NO: 10022 - protein, 485 aa, Homo sapiens
MEGNQWVLGKKIGSGGFGLIYLAFPTNKPEKDARHVVKVEYQENGPLFSELKFYQRVAKKDCIKKWIERKQLDYLGIPLFYGSGLTEFKGRSYRFMVMERLGIDLQKISGQNGTFKKSTVLQLGIRMLDVLEYIHENEYVHGDIKAANLLLGYKNPDQVYLADYGLSYRYCPNGNHKQYQENPRKGHNGTIEFTSLDAHKGVALSRRSDVEILGYCMLRWLCGKLPWEQNLKDPVAVQTAKTNLLDELPQSVLKWAPSGSSCCEIAQFLVCAHSLAYDEKPNYQALKKILNPHGIPLGPLDFSTKGQSINVHTPNSQKVDSQKAATKQVNKAHNRLIEKKVHSERSAESCATWKVQKEEKLIGLMNNEAAQESTRRRQKYQESQEPLNEVNSFPQKISYTQFPNSFYEPHQDFTSPDIFKKSRSPSWYKYTSTVSTGITDLESSTGLWPTISQFTLSEETNADVYYYRIIIPVLLMLVFLALFFL

SEQ ID NO: 10023 - protein, 390 aa, Homo sapiens
MVMERLGIDLQKISGQNGTFKKSTVLQLGIRMLDVLEYIHENEYVHGDIKAANLLLGYKNPDQVYLADYGLSYRYCPNGNHKQYQENPRKGHNGTIEFTSLDAHKGVALSRRSDVEILGYCMLRWLCGKLPWEQNLKDPVAVQTAKTNLLDELPQSVLKWAPSGSSCCEIAQFLVCAHSLAYDEKPNYQALKKILNPHGIPLGPLDFSTKGQSINVHTPNSQKVDSQKAATKQVNKAHNRLIEKKVHSERSAESCATWKVQKEEKLIGLMNNEAAQESTRRRQKYQESQEPLNEVNSFPQKISYTQFPNSFYEPHQDFTSPDIFKKSRSPSWYKYTSTVSTGITDLESSTGLWPTISQFTLSEETNADVYYYRIIIPVLLMLVFLALFFL

SEQ ID NO: 10024 - protein, 396 aa, Homo sapiens
MPPKRNEKYKLPIPFPEGKVLDDMEGNQWVLGKKIGSGGFGLIYLAFPTNKPEKDARHVVKVEYQENGPLFSELKFYQRVAKKDCIKKWIERKQLDYLGIPLFYGSGLTEFKGRSYRFMVMERLGIDLQKISGQNGTFKKSTVLQLGIRMLDVLEYIHENEYVHGDIKAANLLLGYKNPDQVYLADYGLSYRYCPNGNHKQYQENPRKGHNGTIEFTSLDAHKGVALSRRSDVEILGYCMLRWLCGKLPWEQNLKDPVAVQTAKTNLLDELPQSVLKWAPSGSSCCEIAQFLVCAHSLAYDEKPNYQALKKILNPHGIPLGPLDFSTKGQSINVHTPNSQKVDSQKAATKQVNKAHNRLIEKKVHSERSAESCATWKVQKEEKLIGLMNNEAAQFR

SEQ ID NO: 10025 - protein, 963 aa, Homo sapiens
MAVFPWHSRNRNYKAEFASCRLEAVPLEFGDYHPLKPITVTESKTKKVNRKGSTSSTSSSSSSSVVDPLSSVLDGTDPLSMFAATADPAALAAAMDSSRRKRDRDDNSVVGSDFEPWTNKRGEILARYTTTEKLSINLFMGSEKGKAGTATLAMSEKVRTRLEELDDFEEGSQKELLNLTQQDYVNRIEELNQSLKDAWASDQKVKALKIVIQCSKLLSDTSVIQFYPSKFVLITDILDTFGKLVYERIFSMCVDSRSVLPDHFSPENANDTAKETCLNWFFKIASIRELIPRFYVEASILKCNKFLSKTGISECLPRLTCMIRGIGDPLVSVYARAYLCRVGMEVAPHLKETLNKNFFDFLLTFKQIHGDTVQNQLVVQGVELPSYLPLYPPAMDWIFQCISYHAPEALLTEMMERCKKLGNNALLLNSVMSAFRAEFIATRSMDFIGMIKECDESGFPKHLLFRSLGLNLALADPPESDRLQILNEAWKVITKLKNPQDYINCAEVWVEYTCKHFTKREVNTVLADVIKHMTPDRAFEDSYPQLQLIIKKVIAHFHDFSVLFSVEKFLPFLDMFQKESVRVEVCKCIMDAFIKHQQEPTKDPVILNALLHVCKTMHDSVNALTLEDEKRMLSYLINGFIKMVSFGRDFEQQLSFYVESRSMFCNLEPVLVQLIHSVNRLAMETRKVMKGNHSRKTAAFVRACVAYCFITIPSLAGIFTRLNLYLHSGQVALANQCLSQADAFFKAAISLVPEVPKMINIDGKMRPSESFLLEFLCNFFSTLLIVPDHPEHGVLFLVRELLNVIQDYTWEDNSDEKIRIYTCVLHLLSAMSQETYLYHIDKVDSNDSLYGGDSKFLAENNKLCETVMAQILEHLKTLAKDEALKRQSSLGLSFFNSILAHGDLRNNKLNQLSVNLWHLAQRHGCADTRTMVKTLEYIKKQSKQPDMTHLTELALRLPLQTRT

SEQ ID NO: 10026 - protein, 813 aa, Homo sapiens
MPPLGVLVHEKSHLCDVNSFCLGKAGTATLAMSEKVRTRLEELDDFEEGSQKELLNLTQQDYVNRIEELNQSLKDAWASDQKVKALKIVIQEELVYERIFSMCVDSRSVLPDHFSPENANDTAKETCLNWFFKIASIRELIPRFYVEASILKCNKFLSKTGISECLPRLTCMIRGIGDPLVSVYARAYLCRVGMEVAPHLKETLNKNFFDFLLTFKQIHGDTVQNQLVVQGVELPSYLPLYPPAMDWIFQCISYHAPEALLTEMMERCKKLGNNALLLNSVMSAFRAEFIATRSMDFIGMIKECDESGFPKHLLFRSLGLNLALADPPESDRLQILNEAWKVITKLKNPQDYINCAEVWVEYTCKHFTKREVNTVLADVIKHMTPDRAFEDSYPQLQLIIKKVIAHFHDFSVLFSVEKFLPFLDMFQKESVRVEVCKCIMDAFIKHQQEPTKDPVILNALLHVCKTMHDSVNALTLEDEKRMLSYLINGFIKMVSFGRDFEQQLSFYVESRSMFCNLEPVLVQLIHSVNRLAMETRKVMKGNHSRKTAAFVRACVAYCFITIPSLAGIFTRLNLYLHSGQVALANQCLSQADAFFKAAISLVPEVPKMINIDGKMRPSESFLLEFLCNFFSTLLIVPDHPEHGVLFLVRELLNVIQDYTWEDNSDEKIRIYTCVLHLLSAMSQETYLYHIDKVDSNDSLYGGDSKFLAENNKLCETVMAQILEHLKTLAKDEALKRQSSLGLSFFNSILAHGDLRNNKLNQLSVNLWHLAQRHGCADTRTMVKTLEYIKKQSKQPDMTHLTELALRLPLQTRT

SEQ ID NO: 10027 - protein, 198 aa, Homo sapiens
MKLYSLSVLYKGEAKVVLLKAAYDVSSFSFFQRSSVQEFMTFTSQLIVERSSKGTRASVKEQDYLCHVYVRNDSLAGVVIADNEYPSRVAFTLLEKVLDEFSKQVDRIDWPVGSPATIHYPALDGHLSRYQNPREADPMTKVQAELDETKIILHNTMESLLERGEKLDDLVSKSEVLGTQSKAFYKTARKQNSCCAIM

SEQ ID NO: 10028 - protein, 164 aa, Homo sapiens
MKLYSLSVLYKGEAKVVLLKAAYDVSSFSFFQRSSVQEFMTFTSQLIVERSSKGTRASVKEQDYLCHVYVRNDSLAGVVIADNEYPSRVAFTLLEKVLDEFSKQVDRIDWPVGSPATIHYPALDGHLSRYQNPREADPMTKVQAELDETKIILARKQNSCCAIM

SEQ ID NO: 10029 - protein, 69 aa, Homo sapiens
MGMALELYWLCGFRSYWPLGTNAENEGNRKENRRQMQSRNERGCNVRQTKTYRDREADRHIHGIACLLF

SEQ ID NO: 10030 - protein, 154 aa, Homo sapiens
MQLLQVRTTNTLRRLPGTPLMPSAGAVRVVASVQSGHSWWRMWDGPTGAAEAGSCAEMLRTSAPGTSRPNLSFLLGQVIPLAHTGSVETLPSEESWGCRQRASPLPPSTAPMAVSASHRGGTGTRTWLVDPTLSRDTSPLGGQSWGSPQPSRGA

SEQ ID NO: 10031 - protein, 1425 aa, Homo sapiens
MENYFQAEAYNLDKVLDEFEQNEDETVSSTLLDTKWNKILDPPSHRLSFNPTLASVNESAVSNESQPQLKVFSLAHSAPLTTEEEDHCANGQDCNLNPEIATMWIDENAVAEDQLIKRNYSWDDQCSAVEVGEKKCGNLACLPDEKNVLVVAVMHNCDKRTLQNDLQDCNNYNSQSLMDAFSCSLDNENRQTDQFSFSINESTEKDMNSEKQMDPLNRPKTEGRSVNHLCPTSSDSLASVCSPSQLKDDGSIGRDPSMSAITSLTVDSVISSQGTDGCPAVKKQENYIPDEDLTGKISSPRTDLGSPNSFSHMSEGILMKKEPAEESTTEESLRSGLPLLLKPDMPNGSGRNNDCERCSDCLVPNEVRADENEGYEHEETLGTTEFLNMTEHFSESQDMTNWKLTKLNEMNDSQVNEEKEKFLQISQPEDTNGDSGGQCVGLADAGLDLKGTCISESEECDFSTVIDTPAANYLSNGCDSYGMQDPGVSFVPKTLPSKEDSVTEEKEIEESKSECYSNIYEQRGNEATEGSGLLLNSTGDLMKKNYLHNFCSQVPSVLGQSSPKVVASLPSISVPFGGARPKQPSNLKLQIPKPLSDHLQNDFPANSGNNTKNKNDILGKAKLGENSATNVCSPSLGNISNVDTNGEHLESYEAEISTRPCLALAPDSPDNDLRAGQFGISARKPFTTLGEVAPVWVPDSQAPNCMKCEARFTFTKRRHHCRACGKVFCASCCSLKCKLLYMDRKEARVCVICHSVLMNAQAWENMMSASSQSPNPNNPAEYCSTIPPLQQAQASGALSSPPPTVMVPVGVLKHPGAEVAQPREQRRVWFADGILPNGEVADAAKLTMNGTSSAGTLAVSHDPVKPVTTSPLPAETDICLFSGSITQVGSPVGSAMNLIPEDGLPPILISTGVKGDYAVEEKPSQISVMQQLEDGGPDPLVFVLNANLLSMVKIVNYVNRKCWCFTTKGMHAVGQSEIVILLQCLPDEKCLPKDIFNHFVQLYRDALAGNVVSNLGHSFFSQSFLGSKEHGGFLYVTSTYQSLQDLVLPTPPYLFGILIQKWETPWAKVFPIRLMLRLGAEYRLYPCPLFSVRFRKPLFGETGHTIMNLLADFRNYQYTLPVVQGLVVDMEVRKTSIKIPSNRYNEMMKAMNKSNEHVLAGGACFNEKADSHLVCVQNDDGNYQTQAISIHNQPRKVTGASFFVFSGALKSSSGYLAKSSIVEDGVMVQITAENMDSLRQALREMKDFTITCGKADAEEPQEHIHIQWVDDDKNVSKGVVSPIDGKSMETITNVKIFHGSEYKANGKVIRWTEVFFLENDDQHNCLSDPADHSRLTEHVAKAFCLALCPHLKLLKEDGMTKLGLRVTLDSDQVGYQAGSNGQPLPSQYMNDLDSALVPVIHGGACQLSEGPVVMELIFYILENIV

SEQ ID NO: 10032 - protein, 1366 aa, Homo sapiens
MENYFQAEAYNLDKVLDEFEQNEDETVSSTLLDTKWNKILDPPSHRLSFNPTLASVNESAVSNESQPQLKVFSLAHSAPLTTEEEDHCANGQDCNLNPEIATMWIDENAVAEDQLIKRNYSWDDQCSAVEVGEKKCGNLACLPDEKNVLVVAVMHNCDKRTLQNDLQDCNNYNSQSLMDAFSCSLDNENRQTDQFSFSINESTEKDMNSEKQMDPLNRPKTEGRSVNHLCPTSSDSLASVCSPSQLKDDGSIGRDPSMSAITSLTVDSVISSQGTDGCPAVKKQENYIPDEDLTGKISSPRTDLGSPNSFSHMSEGILMKKEPAEESTTEESLRSGLPLLLKPDMPNGSGRNNDCERCSDCLVPNEVRADENEGYEHEETLGTTEFLNMTEHFSESQDMTNWKLTKLNEMNDSQVNEEKEKFLQISQPEDTNGDSGGQCVGLADAGLDLKGTCISESEECDFSTVIDTPAANYLSNGCDSYGMQDPGVSFVPKTLPSKEDSVTEEKEIEESKSECYSNIYEQRGNEATEGSGLLLNSTGDLMKKNYLHNFCSQVPSVLGQSSPKVVASLPSISVPFGGARPKQPSNLKLQIPKPLSDHLQNDFPANSGNNTKNKNDILGKAKLGENSATNVCSPSLGNISNVDTNGEHLESYEAEISTRPCLALAPDSPDNDLRAGQFGISARKPFTTLGEVAPVWVPDSQAPNCMKCEARFTFTKRRHHCRACGKVFCASCCSLKCKLLYMDRKEARVCVICHSVLMNVAQPREQRRVWFADGILPNGEVADAAKLTMNGTSSAGTLAVSHDPVKPVTTSPLPAETDICLFSGSITQVGSPVGSAMNLIPEDGLPPILISTGVKGDYAVEEKPSQISVMQQLEDGGPDPLVFVLNANLLSMVKIVNYVNRKCWCFTTKGMHAVGQSEIVILLQCLPDEKCLPKDIFNHFVQLYRDALAGNVVSNLGHSFFSQSFLGSKEHGGFLYVTSTYQSLQDLVLPTPPYLFGILIQKWETPWAKVFPIRLMLRLGAEYRLYPCPLFSVRFRKPLFGETGHTIMNLLADFRNYQYTLPVVQGLVVDMEVRKTSIKIPSNRYNEMMKAMNKSNEHVLAGGACFNEKADSHLVCVQNDDGNYQTQAISIHNQPRKVTGASFFVFSGALKSSSGYLAKSSIVEDGVMVQITAENMDSLRQALREMKDFTITCGKADAEEPQEHIHIQWVDDDKNVSKGVVSPIDGKSMETITNVKIFHGSEYKANGKVIRWTEVFFLENDDQHNCLSDPADHSRLTEHVAKAFCLALCPHLKLLKEDGMTKLGLRVTLDSDQVGYQAGSNGQPLPSQYMNDLDSALVPVIHGGACQLSEGPVVMELIFYILENIV

SEQ ID NO: 10033 - protein, 762 aa, Homo sapiens
MENYFQAEAYNLDKVLDEFEQNEDETVSSTLLDTKWNKILDPPSHRLSFNPTLASVNESAVSNESQPQLKVFSLAHSAPLTTEEEDHCANGQDCNLNPEIATMWIDENAVAEDQLIKRNYSWDDQCSAVEVGEKKCGNLACLPDEKNVLVVAVMHNCDKRTLQNDLQDCNNYNSQSLMDAFSCSLDNENRQTDQFSFSINESTEKDMNSEKQMDPLNRPKTEGRSVNHLCPTSSDSLASVCSPSQLKDDGSIGRDPSMSAITSLTVDSVISSQGTDGCPAVKKQENYIPDEDLTGKISSPRTDLGSPNSFSHMSEGILMKKEPAEESTTEESLRSGLPLLLKPDMPNGSGRNNDCERCSDCLVPNEVRADENEGYEHEETLGTTEFLNMTEHFSESQDMTNWKLTKLNEMNDSQVNEEKEKFLQISQPEDTNGDSGGQCVGLADAGLDLKGTCISESEECDFSTVIDTPAANYLSNGCDSYGMQDPGVSFVPKTLPSKEDSVTEEKEIEESKSECYSNIYEQRGNEATEGSGLLLNSTGDLMKKNYLHNFCSQVPSVLGQSSPKVVASLPSISVPFGGARPKQPSNLKLQIPKPLSDHLQNDFPANSGNNTKNKNDILGKAKLGENSATNVCSPSLGNISNVDTNGEHLESYEAEISTRPCLALAPDSPDNDLRAGQFGISARKPFTTLGEVAPVWVPDSQAPNCMKCEARFTFTKRRHHCRACGKVFCASCCSLKCKLLYMDRKEARVCVICHSVLMNGKY

SEQ ID NO: 10034 - protein, 135 aa, Homo sapiens
MKPDWPRRGAAGTRVRSRGEGDGTYFARRGAGRRRREIKAPIRAAWSPPSAAMSGLQSGRRWRPQGTGTGARAAGALAALRLGPRLRAAPLLAPLWLLAPTPDSHMTPAPLALRASRGWRENNLSDYQYSWMQKC

SEQ ID NO: 10035 - protein, 1239 aa, Homo sapiens
MELPNYSRQLLQQLYTLCKEQQFCDCTISIGTIYFRAHKLVLAAASLLFKTLLDNTDTISIDASVVSPEEFALLLEMMYTGKLPVGKHNFSKIISLADSLQMFDVAVSCKNLLTSLVNCSVQGQVVRDVSAPSSETFRKEPEKPQVEILSSEGAGEPHSSPELAATPGGPVKAETEEAAHSVSQEMSVNSPTAQESQRNAETPAETPTTAEACSPSPAVQTFSEAKKTSTEPGCERKHYQLNFLLENEGVFSDALMVTQDVLKKLEMCSEIKGPQKEMIVKCFEGEGGHSAFQRILGKVREESLDVQTVVSLLRLYQYSNPAVKTALLDRKPEDVDTVQPKGSTEEGKTLSVLLLEHKEDLIQCVTQLRPIMESLETAKEEFLTGTEKRVILNCCEGRTPKETIENLLHRMTEEKTLTAEGLVKLLQAVKTTFPNLGLLLEKLQKSATLPSTTVQPSPDDYGTELLRRYHENLSEIFTDNQILLKMISHMTSLAPGEREVMEKLVKRDSGSGGFNSLISAVLEKQTLSATAIWQLLLVVQETKTCPLDLLMEEIRREPGADAFFRAVTTPEHATLETILRHNQLILEAIQQKIEYKLFTSEEEHLAETVKEILSIPSETASPEASLRAVLSRAMEKSVPAIEICHLLCSVHKSFPGLQPVMQELAYIGVLTKEDGEKETWKVSNKFHLEANNKEDEKAAKEDSQPGEQNDQGETGSLPGQQEKEASASPDPAKKSFICKACDKSFHFYCRLKVHMKRCRVAKSKQVQCKECSETKDSKKELDKHQLEAHGAGGEPDAPKKKKKRLPVTCDLCGREFAHASGMQYHKLTEHFDEKPFSCEECGAKFAANSTLKNHLRLHTGDRPFMCKHCLMTFTQASALAYHTKKKHSEGKMYACQYCDAVFAQSIELSRHVRTHTGDKPYVCRDCGKGFRQANGLSIHLHTFHNIEDPYDCKKCRMSFPTLQDHRKHIHEVHSKEYHPCPTCGKIFSAPSMLERHVVTHVGGKPFSCGICNKAYQQLSGLWYHNRTHHPDVFAAQNHRSSKFSSLQCSSCDKTFPNTIEHKKHIKAEHADMKFHECDQCKELFPTPALLQVHVKCQHSGSQPFRCLYCAATFRFPGALQHHVTTEHFKQSETTFPCELCGELFTSQAQLDSHLESEHPKVMSTETQAAASQMAQVIQTPEPVAPTEQVITLEETQLAGSQVFVTLPDSQASQASSELVAVTVEDLLDGTVTLICGEAK

SEQ ID NO: 10036 - protein, 234 aa, Homo sapiens
MELPNYSRQLLQQLYTLCKEQQFCDCTISIGTIYFRAHKLVLAAASLLFKTLLDNTDTISIDASVVSPEEFALLLEMMYTGKLPVGKHNFSKIISLADSLQMFDVAVSCKNLLTSLAATPGGPVKAETEEAAHSVSQEMSVNSPTAQESQRNAETPAETPTTAEACSPSPAVQTFSEAKKTSTEPGCERKHYQLNFLLENEGVFSDALMVTQDVLKKLEMCSNCCVPVEAVPIF

SEQ ID NO: 10037 - protein, 482 aa, Homo sapiens
MTMSKEAVTFKDVAVVFTEEELGLLDLAQRKLYRDVMLENFRNLLSVGHQPFHRDTFHFLREEKFWMMDIATQREGNSGGKIQPEMKTFPEAGPHEGWSCQQIWEEIASDLTRPQDSTIKSSQFFEQGDAHSQVEEGLSIMHTGQKPSNCGKCKQSFSDMSIFDLPQQIRSAEKSHSCDECGKSFCYISALHIHQRVHLGEKLFKCDVCGKEFSQSLHLQTHQRVHTGEKPFKCEQCGRGFRCRSALTVHCKLHMGEKHYNCEACGRAFIHDFQLQKHQRIHTGEKPFKCEICSVSFRLRSSLNRHCVVHTGKKPNSTGEYGKGFIRRLDLCKHQTIHTGEKPYNCKECGKSFRRSSYLLIHQRVHTGEKPYKCDKCGKSYITKSGLDLHHRAHTGERPYNCDDCGKSFRQASSILNHKRLHCRKKPFKCEDCGKKLVYRSYRKDQQKNHSGENPSKCEDCGKRYKRRLNLDIILSLFLNDT

SEQ ID NO: 10038 - protein, 883 aa, Homo sapiens
MPGGGSQEYGVLCIQEYRKNSKVESSTRNNFMGLKDHLGHDLGHLYVESTDPQLSPAVPWSTVENPSMDTVNVGKDEKEASEENASSGDSEENTNSDHESEQLGSISVEPGLITKTHRQLCRSPCLEPHILKRNEILQDFKPEESQTTSKEAKKPPDVVREYQTKLEFALKLGYSEEQVQLVLNKLGTDALINDILGELVKLGNKSEADQTVSTINTITRETSSLESQRSESPMQEIVTDDGENLRPIVIDGSNVAMSHGNKEVFSCRGIKLAVDWFLERGHKDITVFVPAWRKEQSRPDALITDQEILRKLEKEKILVFTPSRRVQGRRVVCYDDRFIVKLAFESDGIIVSNDNYRDLANEKPEWKKFIDERLLMYSFVNDKFMPPDDPLGRHGPSLDNFLRKKPIVPEHKKQPCPYGKKCTYGHKCKYYHPERGSQPQRSVADELRAMSRNTAAKTANEGGLVKSNSVPCSTKADSTSDVKRGAPKRQSDPSIRTQVYQDLEEKLPTKNKLETRSVPSLVSIPATSTAKPQSTTSLSNGLPSGVHFPPQDQRPQGQYPSMMMATKNHGTPMPYEQYPKCDSPVDIGYYSMLNAYSNLSLSGPRSPERRFSLDTDYRISSVASDCSSEGSMSCGSSDSYVGYNDRSYVSSPDPQLEENLKCQHMHPHSRLNPQPFLQNFHDPLTRGQSYSHEEPKFHHKPPLPHLALHLPHSAVGARSSCPGDYPSPPSSAHSKAPHLGRSLVATRIDSISDSRLYDSSPSRQRKPYSRQEGLGSWERPGYGIDAYGYRQTYSLPDNSTQPCYEQFTFQSLPEQQEPAWRIPYCGMPQDPPRYQDNREKIYINLCNIFPPDLVRIVMKRNPHMTDAQQLAAAILVEKSQLGY

SEQ ID NO: 10039 - protein, 884 aa, Homo sapiens
MSLYFPANEYGVLCIQEYRKNSKVESSTRNNFMGLKDHLGHDLGHLYVESTDPQLSPAVPWSTVENPSMDTVNVGKDEKEASEENASSGDSEENTNSDHESEQLGSISVEPGLITKTHRQLCRSPCLEPHILKRNEILQDFKPEESQTTSKEAKKPPDVVREYQTKLEFALKLGYSEEQVQLVLNKLGTDALINDILGELVKLGNKSEADQTVSTINTITRETSSLESQRSESPMQEIVTDDGENLRPIVIDGSNVAMSHGNKEVFSCRGIKLAVDWFLERGHKDITVFVPAWRKEQSRPDALITDQEILRKLEKEKILVFTPSRRVQGRRVVCYDDRFIVKLAFESDGIIVSNDNYRDLANEKPEWKKFIDERLLMYSFVNDKFMPPDDPLGRHGPSLDNFLRKKPIVPEHKKQPCPYGKKCTYGHKCKYYHPERGSQPQRSVADELRAMSRNTAAKTANEGGLVKSNSVPCSTKADSTSDVKRGAPKRQSDPSIRTQVYQDLEEKLPTKNKLETRSVPSLVSIPATSTAKPQSTTSLSNGLPSGVHFPPQDQRPQGQYPSMMMATKNHGTPMPYEQYPKCDSPVDIGYYSMLNAYSNLSLSGPRSPERRFSLDTDYRISSVASDCSSEGSMSCGSSDSYVGYNDRSYVSSPDPQLEENLKCQHMHPHSRLNPQPFLQNFHDPLTRGQSYSHEEPKFHHKPPLPHLALHLPHSAVGARSSCPGDYPSPPSSAHSKAPHLGRSLVATRIDSISDSRLYDSSPSRQRKPYSRQEGLGSWERPGYGIDAYGYRQTYSLPDNSTQPCYEQFTFQSLPEQQEPAWRIPYCGMPQDPPRYQDNREKIYINLCNIFPPDLVRIVMKRNPHMTDAQQLAAAILVEKSQLGY

SEQ ID NO: 10040 - protein, 794 aa, Homo sapiens
MNIDDKLEGLFLKCGGIDEMQSSRTMVVMGGVSGQSTVSGELQDSVLQDRSMPHQEILAADEVLQESEMRQQDMISHDELMVHEETVKNDEEQMETHERLPQGLQYALNVPISVKQEITFTDVSEQLMRDKKQIREPVDLQKKKKRKQRSPAKILTINEDGSLGLKTPKSHVCEHCNAAFRTNYHLQRHVFIHTGEKPFQCSQCDMRFIQKYLLQRHEKIHTGEKPFRCDECGMRFIQKYHMERHKRTHSGEKPYQCEYCLQYFSRTDRVLKHKRMCHENHDKKLNRCAIKGGLLTSEEDSGFSTSPKDNSLPKKKRQKTEKKSSGMDKESALDKSDLKKDKNDYLPLYSSSTKVKDEYMVAEYAVEMPHSSVGGSHLEDASGEIHPPKLVLKKINSKRSLKQPLEQNQTISPLSTYEESKVSKYAFELVDKQALLDSEGNADIDQVDNLQEGPSKPVHSSTNYDDAMQFLKKKRYLQAASNNSREYALNVGTIASQPSVTQAAVASVIDESTTASILESQALNVEIKSNHDKNVIPDEVLQTLLDHYSHKANGQHEISFSVADTEVTSSISINSSEVPEVTPSENVGSSSQASSSDKANMLQEYSKFLQQALDRTSQNDAYLNSPSLNFVTDNQTLPNQPAFSSIDKQVYATMPINSFRSGMNSPLRTTPDKSHFGLIVGDSQHSFPFSGDETNHASATSTQDFLDQVTSQKKAEAQPVHQAYQMSSFEQPFRAPYHGSRAGIATQFSTANGQVNLRGPGTSAEFSEFPLVNVNDNRAGMTSSPDATTGQTFG

SEQ ID NO: 10041 - protein, 131 aa, Homo sapiens
MRFIQKYLLQRHEKIHTGEKPFRCDECGDETNHASATSTQDFLDQVTSQKKAEAQPVHQAYQMSSFEQPFRAPYHGSRAGIATQFSTANGQVNLRGPGTSAEFSEFPLVNVNDNRAGMTSSPDATTGQTFG

SEQ ID NO: 10042 - protein, 495 aa, Homo sapiens
MAESAPARHRRKRRSTPLTSSTLPSQATEKSSYFQTTEISLWTVVAAIQAVEKKMESQAARLQSLEGRTGTAEKKLADCEKMAVEFGNQLEGKWAVLGTLLQEYGLLQRRLENVENLLRNRNFWILRLPPGSKGEAPKVSRSLENDGVCFTEQEWENLEDWQKELYRNVMESNYETLVSLKVLGQTEGEAELGTEMLGDLEEEGPGGAHPAGGVMIKQELQYTQEGPADLPGEFSCIAEEQAFLSPEQTELWGGQGSSVLLETGPGDSTLEEPVGSRVPSSSRTVGCPKQKSHRQVQLDQECGQGLKLKKDTSRPYECSECEITFRYKQQLATHLRSHSGWGSCTPEEPEESLRPRPRLKPQTKKAKLHQCDVCLRSFSCKVSLVTHQRCHLQEGPSAGQHVQERFSPNSLVALPGHIPWRKSRSSLICGYCGKSFSHPSDLVRHQRIHTGERPYSCTECEKSFVQKQHLLQHQKIHQRERGGLALEPGRPNGLL

SEQ ID NO: 10043 - protein, 666 aa, Homo sapiens
MQEVVLLDESSGPPSQLLWTRQDTQLPQESALLPAPYPAFTKDGSQGNLPQADITLMSQAQESVTFEDVAVNFTNREWQCLTYAQRHLYKDVMLENYGNMVSLGFPFPKPPLISHLEREVDPCVQDPQDRESLSCSYPVSADKMWPENEKASSQQEIFENGEAYWMKFNSLLKVDSRDPKVREVCVQDVKLENQWETSIREKLREEKEGSEEVTCKKGKNQKVLSKNLNPNSKHSQCNKVLIAQKLHECARCGKNFSWHSDLILHEQIHSGEKPHVCNECGKAFKTRNQLSMHRIIHTGEKPFNCTQCGKAFNSRSALCRHKKTHSGEKPHECRDCGKAFKTRNRLCMHQLIHTGEKPYKCNCCGKAFQFKHSLTIHGRIHTGEKPYECEECGKAFSGSSDLTKHIRIHTGERPYECSKCGRAFSRSSDLSKHKRIHTREKHYGCPQCGKDFSIKAELTKHRRIHTEEKRYRCEECGKAFRHNCKRRAHEREHTGEKPYQCRDCGKTFQDKHCLTIHQRIHTGEKPYKCLECGKAFSGKSNLTNHRRIHTGEKPHKCEVCGMAFHHSSVLRQHKRIHTGEKPYTCSECGTSFRQGSALIGHKRVHTGEKPYECEECGKAFRVSSNLTGHKKRKHQVWSTHELDGSRKSLSPVTVSQTSVVSILTSA

SEQ ID NO: 10044 - protein, 437 aa, Homo sapiens
MGERLFESAEGSQCGETFTQVPEDMLNKKTLPGVKSCESGTCGEIFMGYSSFNRNIRTDTGHQPHKCQKFLEKPYKHKQRRKALSHSHCFRTHERPHTREKPFDCKECEKSFISPASIRRYMVTHSGDGPYKCKFCGKALDCLSLYLTHERTHTGEKRYECKQCGKAFSWHSSVRIHERTHTGEKPYECKECGKSFNFSSSFRRHERTHTGEKPYKCKECGKAFNCPSSFHRHERTHTGEKPYECKLYGKALSRLISFRRHMRMHTGERPHKCKICGKAFYSPSSFQRHERSHTGEKPYKCKQCGKAFTCSTSFQYHERTHTGEKPDGCKQCGKAFRSAKYIRIHGRTHTGEKPYECKQCGKAFHCVSSFHRHERTHAGEKPYECKHCGKAFTCSIYIRIHERIHTGEKPYQCKECGKAFIRSSYCRKHERTHTINI

SEQ ID NO: 10045 - protein, 642 aa, Homo sapiens
MAEAAPAPTSEWDSECLTSLQPLPLPTPPAANEAHLQTAAISLWTVVAAVQAIERKVEIHSRRLLHLEGRTGTAEKKLASCEKTVTELGNQLEGKWAVLGTLLQEYGLLQRRLENLENLLRNRNFWILRLPPGIKGDIPKVPVAFDDVSIYFSTPEWEKLEEWQKELYKNIMKGNYESLISMDYAINQPDVLSQIQPEGEHNTEDQAGPEESEIPTDPSEEPGISTSDILSWIKQEEEPQVGAPPESKESDVYKSTYADEELVIKAEGLARSSLCPEVPVPFSSPPAAAKDAFSDVAFKSQQSTSMTPFGRPATDLPEASEGQVTFTQLGSYPLPPPVGEQVFSCHHCGKNLSQDMLLTHQCSHATEHPLPCAQCPKHFTPQADLSSTSQDHASETPPTCPHCARTFTHPSRLTYHLRVHNSTERPFPCPDCPKRFADQARLTSHRRAHASERPFRCAQCGRSFSLKISLLLHQRGHAQERPFSCPQCGIDFNGHSALIRHQMIHTGERPYPCTDCSKSFMRKEHLLNHRRLHTGERPFSCPHCGKSFIRKHHLMKHQRIHTGERPYPCSYCGRSFRYKQTLKDHLRSGHNGGCGGDSDPSGQPPNPPGPLITGLETSGLGVNTEGLETNQWYGEGSGGGVL

SEQ ID NO: 10046 - protein, 471 aa, Homo sapiens
MKGNYESLISMDYAINQPDVLSQIQPEGEHNTEDQAGPEESEIPTDPSEEPGISTSDILSWIKQEEEPQVGAPPESKESDVYKSTYADEELVIKAEGLARSSLCPEVPVPFSSPPAAAKDAFSDVAFKSQQSTSMTPFGRPATDLPEASEGQVTFTQLGSYPLPPPVGEQVFSCHHCGKNLSQDMLLTHQCSHATEHPLPCAQCPKHFTPQADLSSTSQDHASETPPTCPHCARTFTHPSRLTYHLRVHNSTERPFPCPDCPKRFADQARLTSHRRAHASERPFRCAQCGRSFSLKISLLLHQRGHAQERPFSCPQCGIDFNGHSALIRHQMIHTGERPYPCTDCSKSFMRKEHLLNHRRLHTGERPFSCPHCGKSFIRKHHLMKHQRIHTGERPYPCSYCGRSFRYKQTLKDHLRSGHNGGCGGDSDPSGQPPNPPGPLITGLETSGLGVNTEGLETNQWYGEGSGGGVL

SEQ ID NO: 10047 - protein, 461 aa, Homo sapiens
MEREGIWHSTLGETWEPNNWLEGQQDSHLSQVGVTHKETFTEMRVCGGNEFERCSSQDSILDTQQSIPMVKRPHNCNSHGEDATQNSELIKTQRMFVGKKIYECNQCSKTFSQSSSLLKHQRIHTGEKPYKCNVCGKHFIERSSLTVHQRIHTGEKPYKCNECGKAFSQSMNLTVHQRTHTGEKPYQCKECGKAFHKNSSLIQHERIHTGEKPYKCNECGKAFTQSMNLTVHQRTHTGEKPYECNECGKAFSQSMHLIVHQRSHTGEKPYECSQCGKAFSKSSTLTLHQRNHTGEKPYKCNKCGKSFSQSTYLIEHQRLHSGVKPFECNECGKAFSKNSSLTQHRRIHTGEKPYECMVCGKHFTGRSSLTVHQVIHTGEKPYECNECGKAFSQSAYLIEHQRIHTGEKPYECDQCGKAFIKNSSLTVHQRTHTGEKPYQCNECGKAFSRSTNLTRHQRTHT

SEQ ID NO: 10048 - protein, 485 aa, Homo sapiens
MKNATIVMSVRREQGSSSGEGSLSFEDVAVGFTREEWQFLDQSQKVLYKEVMLENYINLVSIGYRGTKPDSLFKLEQGEPPGIAEGAAHSQICPGFVIQSRRYAGKDSDAFGGYGRSCLHIKRDKTLTGVKYHRCVKPSSPKSQLNDLQKICAGGKPHECSVCGRAFSRKAQLIQHQRTERGEKPHGCGECGKTFMRKIQLTEHQRTHTGEKPHECSECGKAFSRKSQLMVHQRTHTGEKPYRCSKCGKAFSRKCRLNRHQRSHTGEKLYGCSVCGKAFSQKAYLTAHQRLHTGDKPYKCSDCGRTFYFKSDLTRHQRIHTGEKPYECSECEKAFRSKSKLIQHQRTHTGERPYSCRECGKAFAHMSVLIKHEKTHIRETAINSLTVEKPSSRSHTSLYMSELIQEQKTVNTVPIEMPSSGTPPLLNKSERLVGRNVVIVEQPFPRNQAFVVNQEFEQRISLTNEVNVAPSVINYILYLTDIVSE

SEQ ID NO: 10049 - protein, 426 aa, Homo sapiens
MKNATIVMSVRREQGSSSGEGSLSFEDVAVGFTREEWQFLDQSQKVLYKEVMLENYINLVSIGYRGTKPDSLFKLEQGEPPGIAEGAAHSQICPGGKPHECSVCGRAFSRKAQLIQHQRTERGEKPHGCGECGKTFMRKIQLTEHQRTHTGEKPHECSECGKAFSRKSQLMVHQRTHTGEKPYRCSKCGKAFSRKCRLNRHQRSHTGEKLYGCSVCGKAFSQKAYLTAHQRLHTGDKPYKCSDCGRTFYFKSDLTRHQRIHTGEKPYECSECEKAFRSKSKLIQHQRTHTGERPYSCRECGKAFAHMSVLIKHEKTHIRETAINSLTVEKPSSRSHTSLYMSELIQEQKTVNTVPIEMPSSGTPPLLNKSERLVGRNVVIVEQPFPRNQAFVVNQEFEQRISLTNEVNVAPSVINYILYLTDIVSE

SEQ ID NO: 10050 - protein, 337 aa, Homo sapiens
MRRGWKMALSGGLRCCRRVLSWVPVLVIVLVVLWSYYAYVFELCLVTVLSPAEKVIYLILYHAIFVFFTWTYWKSIFTLPQQPNQKFHLSYTDKERYENEERPEVQKQMLVDMAKKLPVYTRTGSGAVRFCDRCHLIKPDRCHHCSVCAMCVLKMDHHCPWVNNCIGFSNYKFFLQFLAYSVLYCLYIATTVFSYFIKYWRGELPSVRSKFHVLFLLFVACMFFVSLVILFGYHCWLVSRNKTTLEAFCTPVFTSGPEKNGFNLGFIKNIQQVFGDKKKFWLIPIGSSPGDGHSFPMRSMNESQNPLLANEETWEDNEDDNQDYPEGSSSLAVETET

SEQ ID NO: 10051 - protein, 143 aa, Homo sapiens
MRRGWKMALSGGLRCCRRVLSWVPVLVIVLVVLWSYYAYVFELCLVIYLILYHAIFVFFTWTYWKSIFTLPQQPNQKFHLSYTDKERYENEERPEVQKQMLVDMAKKLPVYTRTGSGGQFIQRQLERQLSKYLRKAKSYMFSN

SEQ ID NO: 10052 - protein, 328 aa, Homo sapiens
MRRGWKMALSGGLRCCRRVLSWVPVLVIVLVVLWSYYAYVFELCLVIYLILYHAIFVFFTWTYWKSIFTLPQQPNQKFHLSYTDKERYENEERPEVQKQMLVDMAKKLPVYTRTGSGAVRFCDRCHLIKPDRCHHCSVCAMCVLKMDHHCPWVNNCIGFSNYKFFLQFLAYSVLYCLYIATTVFSYFIKYWRGELPSVRSKFHVLFLLFVACMFFVSLVILFGYHCWLVSRNKTTLEAFCTPVFTSGPEKNGFNLGFIKNIQQVFGDKKKFWLIPIGSSPGDGHSFPMRSMNESQNPLLANEETWEDNEDDNQDYPEGSSSLAVETET

SEQ ID NO: 10053 - protein, 2785 aa, Homo sapiens
MKTKPVSHKTENTYRFLTFAERLGNVNIDIIHRIDRTASYEEEVETYFFEGLLKWRELNLTEHFGKFYKEVIDKCQSFNQLVYHQNEIVQSLKTHLQVKNSFAYQPLLDLVVQLARDLQMDFYPHFPEFFLTITSILETQDTELLEWAFTSLSYLYKYLWRLMVKDMSSIYSMYSTLLAHKKLHIRNFAAESFTFLMRKVSDKNALFNLMFLDLDKHPEKVEGVGQLLFEMCKGVRNMFHSCTGQAVKLILRKLGPVTETETQLPWMLIGETLKNMVKSTVSYISKEHFGTFFECLQESLLDLHTKVTKTNCCESSEQIKRLLETYLILVKHGSGTKIPTPADVCKVLSQTLQVASLSTSCWETLLDVISALILGENVSLPETLIKETIEKIFESRFEKRLIFSFSEVMFAMKQFEQLFLPSFLSYIVNCFLIDDAVVKDEALAILAKLILNKAAPPTAGSMAIEKYPLVFSPQMVGFYIKQKKTRSKGRNEQFPVLDHLLSIIKLPPNKDTTYLSQSWAALVVLPHIRPLEKEKVIPLVTGFIEALFMTVDKGSFGKGNLFVLCQAVNTLLSLEESSELLHLVPVERVKNLVLTFPLEPSVLLLTDLYYQRLALCGCKGPLSQEALMELFPKLQANISTGVSKIRLLTIRILNHFDVQLPESMEDDGLSERQSVFAILRQAELVPATVNDYREKLLHLRKLRHDVVQTAVPDGPLQEVPLRYLLGMLYINFSALWDPVIELISSHAHEMENKQFWKVYYEHLEKAATHAEKELQNDMTDEKSVGDESWEQTQEGDVGALYHEQLALKTDCQERLDHTNFRFLLWRALTKFPERVEPRSRELSPLFLRFINNEYYPADLQVAPTQDLRRKGKGMVAEEIEEEPAAGDDEELEEEAVPQDESSQKKKTRRAAAKQLIAHLQVFSKFSNPRALYLESKLYELYLQLLLHQDQMVQKITLDCIMTYKHPHVLPYRENLQRLLEDRSFKEEIVHFSISEDNAVVKTAHRADLFPILMRILYGRMKNKTGSKTQGKSASGTRMAIVLRFLAGTQPEEIQIFLDLLFEPVRHFKNGECHSAVIQAVEDLDLSKVLPLGRQHGILNSLEIVLKNISHLISAYLPKILQILLCMTATVSHILDQREKIQLRFINPLKNLRRLGIKMVTDIFLDWESYQFRTEEIDAVFHGAVWPQISRLGSESQYSPTPLLKLISIWSRNARYFPLLAKQKPGHPECDILTNVFAILSAKNLSDATASIVMDIVDDLLNLPDFEPTETVLNLLVTGCVYPGIAENIGESITIGGRLILPHVPAILQYLSKTTISAEKVKKKKNRAQVSKELGILSKISKFMKDKEQSSVLITLLLPFLHRGNIAEDTEVDILVTVQNLLKHCVDPTSFLKPIAKLFSVIKNKLSRKLLCTVFETLSDFESGLKYITDVVKLNAFDQRHLDDINFDVRFETFQTITSYIKEMQIVDVNYLIPVMHNCFYNLELGDMSLSDNASMCLMSIIKKLAALNVTEKDYREIIHRSLLEKLRKGLKSQTESIQQDYTTILSCLIQTFPNQLEFKDLVQLTHYHDPEMDFFENMKHIQIHRRARALKKLAKQLMEGKVVLSSKSLQNYIMPYAMTPIFDEKMLKHENITTAATEIIGAICKHLSWSAYMYYLKHFIHVLQTGQINQKLGVSLLVIVLEAFHFDHKTLEEQMGKIENEENAIEAIELPEPEAMELERVDEEEKEYTCKSLSDNGQPGTPDPADSGGTSAKESECITKPVSFLPQNKEEIERTIKNIQGTITGDILPRLHKCLASTTKREEEHKLVKSKVVNDEEVVRVPLAFAMVKLMQSLPQEVMEANLPSILLKVCALLKNRAQEIRDIARSTLAKIIEDLGVHFLLYVLKELQTTLVRGYQVHVLTFTVHMLLQGLTNKLQVGDLDSCLDIMIEIFNHELFGAVAEEKEVKQILSKVMEARRSKSYDSYEILGKFVGKDQVTKLILPLKEILQNTTSLKLARKVHETLRRITVGLIVNQEMTAESILLLSYGLISENLPLLTEKEKNPVAPAPDPRLPPQSCLLLPPTPVRGGQKAVVSRKTNMHIFIESGLRLLHLSLKTSKIKSSGECVLEMLDPFVSLLIDCLGSMDVKVITGALQCLIWVLRFPLPSIETKAEQLTKHLFLLLKDYAKLGAARGQNFHLVVNCFKCVTILVKKVKSYQITEKQLQVLLAYAEEDIYDTSRQATAFGLLKAILSRKLLVPEIDEVMRKVSKLAVSAQSEPARVQCRQVFLKYILDYPLGDKLRPNLEFMLAQLNYEHETGRESTLEMIAYLFDTFPQGLLHENCGMFFIPLCLMTINDDSATCKKMASMTIKSLLGKISLEKKDWLFDMVTTWFGAKKRLNRQLAALICGLFVESEGVDFEKRLGTVLPVIEKEIDPENFKDIMEETEEKAADRLLFSFLTLITKLIKECNIIQFTKPAETLSKIWSHVHSHLRHPHNWVWLTAAQIFGLLFASCQPEELIQKWNTKKTKKHLPEPVAIKFLASDLDQKMKSISLASCHQLHSKFLDQSLGEQVVKNLLFAAKVLYLLELYCEDKQSKIKEDLEEQEALEDGVACADEKAESDGEEKEEVKEELGRPATLLWLIQKLSRIAKLEAAYSPRNPLKRTCIFKFLGAVAMDLGIDKVKPYLPMIIAPLFRELNSTYSEQDPLLKNLSQEIIELLKKLVGLESFSLAFASVQKQANEKRALRKKRKALEFVTNPDIAAKKKMKKHKNKSEAKKRKIEFLRPGYKAKRQKSHSLKDLAMVE

SEQ ID NO: 10054 - protein, 614 aa, Homo sapiens
MKRDRLGRFLSPGSSRQCGASDGGGGVSRTRGRPSLSGGPRVDGATARRAWGPVGSCGDAGEDGADEAGAGRALAMGHCRLCHGKFSSRSLRSISERAPGASMERPSAEERVLVRDFQRLLGVAVRQDPTLSPFVCKSCHAQFYQCHSLLKSFLQRVNASPAGRRKPCAKVGAQPPTGAEEGACLVDLITSSPQCLHGLVGWVHGHAASCGALPHLQRTLSSEYCGVIQVVWGCDQGHDYTMDTSSSCKAFLLDSALAVKWPWDKETAPRLPQHRGWNPGDAPQTSQGRGTGTPVGAETKTLPSTDVAQPPSDSDAVGPRSGFPPQPSLPLCRAPGQLGEKQLPSSTSDDRVKDEFSDLSEGDVLSEDENDKKQNAQSSDESFEPYPERKVSGKKSESKEAKKSEEPRIRKKPGPKPGWKKKLRCEREELPTIYKCPYQGCTAVYRGADGMKKHIKEHHEEVRERPCPHPGCNKVFMIDRYLQRHVKLIHTEVRNYICDECGQTFKQRKHLLVHQMRHSGAKPLQCEVCGFQCRQRASLKYHMTKHKAETELDFACDQCGRRFEKAHNLNVHMSMVHPLTQTQDKALPLEAEPPPGPPSPSVTTEGQAVKPEPT

SEQ ID NO: 10055 - protein, 539 aa, Homo sapiens
MGHCRLCHGKFSSRSLRSISERAPGASMERPSAEERVLVRDFQRLLGVAVRQDPTLSPFVCKSCHAQFYQCHSLLKSFLQRVNASPAGRRKPCAKVGAQPPTGAEEGACLVDLITSSPQCLHGLVGWVHGHAASCGALPHLQRTLSSEYCGVIQVVWGCDQGHDYTMDTSSSCKAFLLDSALAVKWPWDKETAPRLPQHRGWNPGDAPQTSQGRGTGTPVGAETKTLPSTDVAQPPSDSDAVGPRSGFPPQPSLPLCRAPGQLGEKQLPSSTSDDRVKDEFSDLSEGDVLSEDENDKKQNAQSSDESFEPYPERKVSGKKSESKEAKKSEEPRIRKKPGPKPGWKKKLRCEREELPTIYKCPYQGCTAVYRGADGMKKHIKEHHEEVRERPCPHPGCNKVFMIDRYLQRHVKLIHTEVRNYICDECGQTFKQRKHLLVHQMRHSGAKPLQCEVCGFQCRQRASLKYHMTKHKAETELDFACDQCGRRFEKAHNLNVHMSMVHPLTQTQDKALPLEAEPPPGPPSPSVTTEGQAVKPEPT

SEQ ID NO: 10056 - protein, 156 aa, Homo sapiens
WASQVSENRPVCKAIIQGKQFEGLVDTGADVSIIALNQWPKNWPKQKAVTGLVGIGTASEVYQSTEILHCLGPDNQESTVQPMITSIPLNLWGRDLLQQWGAEITMPAPLYSPTSQKIMTKMGYIPGKGLGKNEDGIKIPFEAKINQKREGIGYPF

SEQ ID NO: 10057 - protein, 111 aa, Homo sapiens
MGSSSFLVLMVSLVLVTLVAVEGVKEGIEKAGVCPADNVRCFKSDPPQCHTDQDCLGERKCCYLHCGFKCVIPVKELEEGGNKDEDVSRPYPEPGWEAKCPGSSSTRCPQK

SEQ ID NO: 10058 - protein, 460 aa, Homo sapiens
MNFSEVFKLSSLLCKFSPDGKYLASCVQYRLVVRDVNTLQILQLYTCLDQIQHIEWSADSLFILCAMYKRGLVQVWSLEQPEWHCKIDEGSAGLVASCWSPDGRHILNTTEFHLRITVWSLCTKSVSYIKYPKACLQGITFTRDGRYMALAERRDCKDYVSIFVCSDWQLLRHFDTDTQDLTGIEWAPNGCVLAVWDTCLEYKILLYSLDGRLLSTYSAYEWSLGIKSVAWSPSSQFLAVGSYDGKVRILNHVTWKMITEFGHPAAINDPKIVVYKEAEKSPQLGLGCLSFPPPRAGAGPLPSSESKYEIASVPVSLQTLKPVTDRANPKIGIGMLAFSPDSYFLATRNDNIPNAVWVWDIQKLRLFAVLEQLSPVRAFQWDPQQPRLAICTGGSRLYLWSPAGCMSVQVPGEGDFAVLSLCWHLSGDSMALLSKDHFCLCFLETEAVVGTACRQLGGHT

SEQ ID NO: 10059 - protein, 224 aa, Homo sapiens
MSRKIEGFLLLLLFGYEATLGLSSTEDEGEDPWYQKACKCDCQGGPNALWSAGATSLDCIPECPYHKPLGFESGEVTPDQITCSNPEQYVGWYSSWTANKARLNSQGFGCAWLSKFQDSSQWLQIDLKEIKVISGILTQGRCDIDEWMTKYSVQYRTDERLNWIYYKDQTGNNRVFYGNSDRTSTVQNLLRPPIISRFIRLIPLGWHVRIAIRMELLECVSKCA

SEQ ID NO: 10060 - protein, 867 aa, Homo sapiens
MDNPQALPLFLLLASLVGILTLRASSGLQQTNFSSAFSSDSKSSSQGLGVEVPSIKPPSWKVPDQFLDSKASAGISDSSWFPEALSSNMSGSFWSNVSAEGQDLSPVSPFSETPGSEVFPDISDPQVPAKDPKPSFTVKTPASNISTQVSHTKLSVEAPDSKFSPDDMDLKLSAQSPESKFSAETHSAASFPQQVGGPLAVLVGTTIRLPLVPIPNPGPPTSLVVWRRGSKVLAAGGLGPGAPLISLDPAHRDHLRFDQARGVLELASAQLDDAGVYTAEVIRAGVSQQTHEFTVGVYEPLPQLSVQPKAPETEEGAAELRLRCLGWGPGRGELSWSRDGRALEAAESEGAETPRMRSEGDQLLIVRPVRSDHARYTCRVRSPFGHREAAADVSVFYGPDPPTITVSSDRDAAPARFVTAGSNVTLRCAAASRPPADITWSLADPAEAAVPAGSRLLLPAVGPGHAGTYACLAANPRTGRRRRSLLNLTVADLPPGAPQCSVEGGPGDRSLRFRCSWPGGAPAASLQFQGLPEGIRAGPVSSVLLAAVPAHPRLSGVPITCLARHLVATRTCTVTPEAPREVLLHPLVAETRLGEAEVALEASGCPPPSRASWAREGRPLAPGGGSRLRLSQDGRKLHIGNFSLDWDLGNYSVLCSGALGAGGDQITLIGPSISSWRLQRARDAAVLTWDVERGALISSFEIQAWPDGPALGRTSTYRDWVSLLILGPQERSAVVPLPPRNPGTWTFRILPILGGQPGTPSQSRVYRAGPTLSHGAIAGIVLGSLLGLALLAVLLLLCICCLCRFRGKTPEKKKHPSTLVPVVTPSEKKMHSVTPVEISWPLDLKVPLEDHSSTRAYQAQTPVQLSL

SEQ ID NO: 10061 - protein, 881 aa, Homo sapiens
MDNPQALPLFLLLASLVGILTLRASSGLQQTNFSSAFSSDSKSSSQGLGVEVPSIKPPSWKVPDQFLDSKASAGISDSSWFPEALSSNMSGSFWSNVSAEGQDLSPVSPFSETPGSEVFPDISDPQVPAKDPKPSFTVKTPASNISTQVSHTKLSVEAPDSKFSPDDMDLKLSAQSPESKFSAETHSAASFPQQVGGPLAVLVGTTIRLPLVPIPNPGPPTSLVVWRRGSKVLAAGGLGPGAPLISLDPAHRDHLRFDQARGVLELASAQLDDAGVYTAEVIRAGVSQQTHEFTVGVYEPLPQLSVQPKAPETEEGAAELRLRCLGWGPGRGELSWSRDGRALEAAESEGAETPRMRSEGDQLLIVRPVRSDHARYTCRVRSPFGHREAAADVSVFYGPDPPTITVSSDRDAAPARFVTAGSNVTLRCAAASRPPADITWSLADPAEAAVPAGSRLLLPAVGPGHAGTYACLAANPRTGRRRRSLLNLTVADLPPGAPQCSVEGGPGDRSLRFRCSWPGGAPAASLQFQGLPEGIRAGPVSSVLLAAVPAHPRLSGVPITCLARHLVATRTCTVTPEAPREVLLHPLVAETRLGEAEVALEASGCPPPSRASWAREGRPLAPGGGSRLRLSQDGRKLHIGNFSLDWDLGNYSVLCSGALGAGGDQITLIGPSISSWRLQRARDAAVLTWDVERGALISSFEIQAWPDGPALGRTSTYRDWVSLLILGPQERSAVVPLPPRNPGTWTFRILPILGGQPGTPSQSRVYRAGPTLSHGAIAGIVLGSLLGLALLAVLLLLCICCLCRFRGKTPEKKKHPSTLVPVVTPSEKKMHSVTPVEISWPLDLKVPLEDHSSTRAYQATDPSSVVSVGGGSKTVRAATQV

SEQ ID NO: 10062 - protein, 4022 aa, Homo sapiens
MLESYVTPILMSYVNRYIKNLKPSDLQLSLWGGDVVLSKLELKLDVLEQELKLPFTFLSGHIHELRIHVPWTKLGSEPVVITINTMECILKLKDGIQDDHESCGSNSTNRSTAESTKSSIKPRRMQQAAPTDPDLPPGYVQSLIRRVVNNVNIVINNLILKYVEDDIVLSVNITSAECYTVGELWDRAFMDISATDLVLRKVINFSDCTVCLDKRNASGKIEFYQDPLLYKCSFRTRLHFTYENLNSKMPSVIKIHTLVESLKLSITDQQLPMFIRIMQLGIALYYGEIGNFKEGEIEDLTCHNKDMLGNITGSEDETRIDMQYPAQHKGQELYSQQDEEQPQGWVSWAWSFVPAIVSYDDGEEDFVGNDPASTMHQQKAQTLKDPIVSIGFYCTKATVTFKLTEMQVESSYYSPQKVKSKEVLCWEQEGTTVEALMMGEPFFDCQIGFVGCRAMCLKGIMGVKDFEENMNRSETEACFFICGDNLSTKGFTYLTNSLFDYRSPENNGTRAEFILDSTHHKETYTEIAGMQRFGAFYMDYLYTMENTSGKGSTNQQDFSSGKSEDLGTVQEKSTKSLVIGPLDFRLDSSAVHRILKMIVCALEHEYEPYSRLKSDIKDENETILNPEEVALLEEYIPTRHTSVTLLKCTCTISMAEFNLLDHLLPVIMGEKNSSNFMNTTNFQSLRPLPSIRILVDKINLEHSVPMYAEQLVHVVSSLTQPSDNLLHYCYVHCYLKIFGFQAGLTSLDCSGSYCLPVPVIPSFSTALYGKLLKLPTCWTKRSQIAITEGIFELPNLTIQATRAQTLLLQAIYQSWSHLGNVSSSAVIEALINEIFLSIGVKSKNPLPTLEGSIQNVELKYCSTSLVKCASGTMGSIKICAKAPVDSGKEKLIPLLQGPSDTKDLHSTKWLNESRKPESLLAPDLMAFTIQVPQYIDYCHNSGAVLLCSIQGLAVNIDPILYTWLIYQPQKRTSRHMQQQPVVAVPLVMPVCRRKEDEVSIGSAPLAKQQSYQASEYASSPVKTKTVTESRPLSVPVKAMLNISESCRSPEERMKEFIGIVWNAVKHLTLQLEVQSCCVFIPNDSLPSPSTIVSGDIPGTVRSWYHGQTSMPGTLVLCLPQIKIISAGHKYMEPLQEIPFVIPRPILEEGDAFPWTISLHNFSIYTLLGKQVTLCLVEPMGCTSTLAVTSQKLLATGPDTRHSFVVCLHVDLESLEIKCSNPQVQLFYELTDIMNKVWNKIQKRGNLNLSPTSPETMAGPVPTSPVRSSIGTAPPDTSTCSPSADIGTTTEGDSIQAGEESPFSDSVTLEQTTSNIGGTSGRVSLWMQWVLPKITIKLFAPDPENKGTEVCMVSELEDLSASIDVQDVYTKVKCKIESFNIDHYRSSLGEECWSLGQCGGVFLSCTDKLNRRTLLVRPISKQDPFSNCSGFFPSTTTKLLDGTHQQHGFLSLTYTKAVTKNVRHKLTSRNERRSFHKLSEGLMDGSPHFLHEILLSAQAFDIVLYFPLLNAIASIFQAKLPKTQKEKRKSPGQPMRTHTLTSRNLPLIYVNTSVIRIFIPKTEEMQPTVEANQAAKEDTVVLKIGSVAMAPQADNPLGRSVLRKDIYQRALNLGILRDPGSEIEDRQYQIDLQSINIGTAQWHQLKPEKESVSGGVVTETERNSQNPALEWNMASSIRRHQERRAILTPVLTDFSVRITGAPAVIFTKVVSPENLHTEEILVCGHSLEVNITTNLDFFLSVAQVQLLHQLIVANMTGLEPSNKAAEISKQEQKKVDIFDGGMAETSSRYSGAQDSGIGSDSVKIRIVQIEQHSGASQHRIARPSRQSSIVKNLNFIPFDIFITASRISLMTYSCMALSKSKSQEQKNNEKTDKSSLNLPEVDSDVAKPNQACISTVTAEDLLRSSISFPSGKKIGVLSLESLHASTRSSARQALGITIVRQPGRRGTGDLQLEPFLYFIVSQPSLLLSCHHRKQRVEVSIFDAVLKGVASDYKCIDPGKTLPEALDYCTVWLQTVPGEIDSKSGIPPSFITLQIKDFLNGPADVNLDISKPLKANLSFTKLDQINLFLKKIKNAHSLAHSEETSAMSNTMVNKDDLPVSKYYRGKLSKPKIHGDGVQKISAQENMWRAVSCFQKISVQTTQIVISMETVPHTSKPCLLASLSNLNGSLSVKATQKVPGIILGSSFLLSINDFLLKTSLKERSRILIGPCCATANLEAKWCKHSGNPGPEQSIPKISIDLRGGLLQVFWGQEHLNCLVLLHELLNGYLNEEGNFEVQVSEPVPQMSSPVEKNQTFKSEQSSDDLRTGLFQYVQDAESLKLPGVYEVLFYNETEDCPGMMLWRYPEPRVLTLVRITPVPFNTTEDPDISTADLGDVLQVPCSLEYWDELQKVFVAFREFNLSESKVCELQLPDINLVNDQKKLVSSDLWRIVLNSSQNGADDQSSASESGSQSTCDPLVTPTALAACTRVDSCFTPWFVPSLCVSFQFAHLEFHLCHHLDQLGTAAPQYLQPFVSDRNMPSELEYMIVSFREPHMYLRQWNNGSVCQEIQFLAQADCKLLECRNVTMQSVVKPFSIFGQMAVSSDVVEKLLDCTVIVDSVFVNLGQHVVHSLNTAIQAWQQNKCPEVEELVFSHFVICNDTQETLRFGQVDTDENILLASLHSHQYSWRSHKSPQLLHICIEGWGNWRWSEPFSVDHAGTFIRTIQYRGRTASLIIKVQQLNGVQKQIIICGRQIICSYLSQSIELKVVQHYIGQDGQAVVREHFDCLTAKQKLPSYILENNELTELCVKAKGDEDWSRDVCLESKAPEYSIVIQVPSSNSSIIYVWCTVLTLEPNSQVQQRMIVFSPLFIMRSHLPDPIIIHLEKRSLGLSETQIIPGKGQEKPLQNIEPDLVHHLTFQAREEYDPSDCAVPISTSLIKQIATKVHPGGTVNQILDEFYGPEKSLQPIWPYNKKDSDRNEQLSQWDSPMRVKLSIWKPYVRTLLIELLPWALLINESKWDLWLFEGEKIVLQVPAGKIIIPPNFQEAFQIGIYWANTNTVHKSVAIKLVHNLTSPKWKDGGNGEVVTLDEEAFVDTEIRLGAFPGHQKLCQFCISSMVQQGIQIIQIEDKTTIINNTPYQIFYKPQLSVCNPHSGKEYFRVPDSATFSICPGGEQPAMKSSSLPCWDLMPDISQSVLDASLLQKQIMLGFSPAPGADSSQCWSLPAIVRPEFPRQSVAVPLGNFRENGFCTRAIVLTYQEHLGVTYLTLSEDPSPRVIIHNRCPVKMLIKENIKDIPKFEVYCKKIPSECSIHHELYHQISSYPDCKTKDLLPSLLLRVEPLDEVTTEWSDAIDINSQGTQVVFLTGFGYVYVDVVHQCGTVFITVAPEGKAGPILTNTNRAPEKIVTFKMFITQLSLAVFDDLTHHKASAELLRLTLDNIFLCVAPGAGPLPGEEPVAALFELYCVEICCGDLQLDNQLYNKSNFHFAVLVCQGEKAEPIQCSKMQSLLISNKELEEYKEKCFIKLCITLNEGKSILCDINEFSFELKPARLYVEDTFVYYIKTLFDTYLPNSRLAGHSTHLSGGKQVLPMQVTQHARALVNPVKLRKLVIQPVNLLVSIHASLKLYIASDHTPLSFSVFERGPIFTTARQLVHALAMHYAAGALFRAGWVVGSLDILGSPASLVRSIGNGVADFFRLPYEGLTRGPGAFVSGVSRGTTSFVKHISKGTLTSITNLATSLARNMDRLSLDEEHYNRQEEWRRQLPESLGEGLRQGLSRLGISLLGAIAGIVDQPMQNFQKTSEAQASAGHKAKGVISGVGKGIMGVFTKPIGGAAELVSQTGYGILHGAGLSQLPKQRHQPSDLHADQAPNSHVKYVWKMLQSLGRPEVHMALDVVLVRGSGQEHEGCLLLTSEVLFVVSVSEDTQQQAFPVTEIDCAQDSKQNNLLTVQLKQPRVACDVEVDGVRERLSEQQYNRLVDYITKTSCHLAPSCSSMQIPCPVVAAEPPPSTVKTYHYLVDPHFAQVFLSKFTMVKNKALRKGFP

SEQ ID NO: 10063 - protein, 3997 aa, Homo sapiens
MLESYVTPILMSYVNRYIKNLKPSDLQLSLWGGDVVLSKLELKLDVLEQELKLPFTFLSGHIHELRIHVPWTKLGSEPVVITINTMECILKLKDGIQDDHESCGSNSTNRSTAESTKSSIKPRRMQQAAPTDPDLPPGYVQSLIRRVVNNVNIVINNLILKYVEDDIVLSVNITSAECYTVGELWDRAFMDISATDLVLRKVINFSDCTVCLDKRNASGKIEFYQDPLLYKCSFRTRLHFTYENLNSKMPSVIKIHTLVESLKLSITDQQLPMFIRIMQLGIALYYGEIGNFKEGEIEDLTCHNKDMLGNITGSEDETRIDMQYPAQHKGQELYSQQDEEQPQGWVSWAWSFVPAIVSYDDGEEDFVGNDPASTMHQQKAQTLKDPIVSIGFYCTKATVTFKLTEMQVESSYYSPQKVKSKEVLCWEQEGTTVEALMMGEPFFDCQIGFVGCRAMCLKGIMGVKDFEENMNRSETEACFFICGDNLSTKGFTYLTNSLFDYRSPENNGTRAEFILDSTHHKETYTEIAGMQRFGAFYMDYLYTMENTSGKGSTNQQDFSSGKSEDLGTVQEKSTKSLVIGPLDFRLDSSAVHRILKMIVCALEHEYEPYSRLKSDIKDENETILNPEEVALLEEYIPTRHTSVTLLKCTCTISMAEFNLLDHLLPVIMGEKNSSNFMNTTNFQSLRPLPSIRILVDKINLEHSVPMYAEQLVHVVSSLTQPSDNLLHYCYVHCYLKIFGFQAGLTSLDCSGSYCLPVPVIPSFSTALYGKLLKLPTCWTKRSQIAITEGIFELPNLTIQATRAQTLLLQAIYQSWSHLGNVSSSAVIEALINEIFLSIGVKSKNPLPTLEGSIQNVELKYCSTSLVKCASGTMGSIKICAKAPVDSGKEKLIPLLQGPSDTKDLHSTKWLNESRKPESLLAPDLMAFTIQVPQYIDYCHNSGAVLLCSIQGLAVNIDPILYTWLIYQPQKRTSRHMQQQPVVAVPLVMPVCRRKEDEVSIGSAPLAKQQSYQASEYASSPVKTKTVTESRPLSVPVKAMLNISESCRSPEERMKEFIGIVWNAVKHLTLQLEVQSCCVFIPNDSLPSPSTIVSGDIPGTVRSWYHGQTSMPGTLVLCLPQIKIISAGHKYMEPLQEIPFVIPRPILEEGDAFPWTISLHNFSIYTLLGKQVTLCLVEPMGCTSTLAVTSQKLLATGPDTRHSFVVCLHVDLESLEIKCSNPQVQLFYELTDIMNKVWNKIQKRGNLNLSPTSPETMAGPVPTSPVRSSIGTAPPDTSTCSPSADIGTTTEGDSIQAGEESPFSDSVTLEQTTSNIGGTSGRVSLWMQWVLPKITIKLFAPDPENKGTEVCMVSELEDLSASIDVQDVYTKVKCKIESFNIDHYRSRPGEGWQSGHFEGVFLQCKEKSVTTTKLLDGTHQQHGFLSLTYTKAVTKNVRHKLTSRNERRSFHKLSEGLMDGSPHFLHEILLSAQAFDIVLYFPLLNAIASIFQAKLPKTQKEKRKSPGQPMRTHTLTSRNLPLIYVNTSVIRIFIPKTEEMQPTVEANQAAKEDTVVLKIGSVAMAPQADNPLGRSVLRKDIYQRALNLGILRDPGSEIEDRQYQIDLQSINIGTAQWHQLKPEKESVSGGVVTETERNSQNPALEWNMASSIRRHQERRAILTPVLTDFSVRITGAPAVIFTKVVSPENLHTEEILVCGHSLEVNITTNLDFFLSVAQVQLLHQLIVANMTGLEPSNKAAEISKQEQKKVDIFDGGMAETSSRYSGAQDSGIGSDSVKIRIVQIEQHSGASQHRIARPSRQSSIVKNLNFIPFDIFITASRISLMTYSCMALSKSKSQEQKNNEKTDKSSLNLPEVDSDVAKPNQACISTVTAEDLLRSSISFPSGKKIGVLSLESLHASTRSSARQALGITIVRQPGRRGTGDLQLEPFLYFIVSQPSLLLSCHHRKQRVEVSIFDAVLKGVASDYKCIDPGKTLPEALDYCTVWLQTVPGEIDSKSGIPPSFITLQIKDFLNGPADVNLDISKPLKANLSFTKLDQINLFLKKIKNAHSLAHSEETSAMSNTMVNKDDLPVSKYYRGKLSKPKIHGDGVQKISAQENMWRAVSCFQKISVQTTQIVISMETVPHTSKPCLLASLSNLNGSLSVKATQKVPGIILGSSFLLSINDFLLKTSLKERSRILIGPCCATANLEAKWCKHSGNPGPEQSIPKISIDLRGGLLQVFWGQEHLNCLVLLHELLNGYLNEEGNFEVQVSEPVPQMSSPVEKNQTFKSEQSSDDLRTGLFQYVQDAESLKLPGVYEVLFYNETEDCPGMMLWRYPEPRVLTLVRITPVPFNTTEDPDISTADLGDVLQVPCSLEYWDELQKVFVAFREFNLSESKVCELQLPDINLVNDQKKLVSSDLWRIVLNSSQNGADDQSSASESGSQSTCDPLVTPTALAACTRVDSCFTPWFVPSLCVSFQFAHLEFHLCHHLDQLGTAAPQYLQPFVSDRNMPSELEYMIVSFREPHMYLRQWNNGSVCQEIQFLAQADCKLLECRNVTMQSVVKPFSIFGQMAVSSDVVEKLLDCTVIVDSVFVNLGQHVVHSLNTAIQAWQQNKCPEVEELVFSHFVICNDTQETLRFGQVDTDENILLASLHSHQYSWRSHKSPQLLHICIEGWGNWRWSEPFSVDHAGTFIRTIQYRGRTASLIIKVQQLNGVQKQIIICGRQIICSYLSQSIELKVVQHYIGQDGQAVVREHFDCLTAKQKLPSYILENNELTELCVKAKGDEDWSRDVCLESKAPEYSIVIQVPSSNSSIIYVWCTVLTLEPNSQVQQRMIVFSPLFIMRSHLPDPIIIHLEKRSLGLSETQIIPGKGQEKPLQNIEPDLVHHLTFQAREEYDPSDCAVPISTSLIKQIATKVHPGGTVNQILDEFYGPEKSLQPIWPYNKKDSDRNEQLSQWDSPMRVKLSIWKPYVRTLLIELLPWALLINESKWDLWLFEGEKIVLQVPAGKIIIPPNFQEAFQIGIYWANTNTVHKSVAIKLVHNLTSPKWKDGGNGEVVTLDEEAFVDTEIRLGAFPGHQKLCQFCISSMVQQGIQIIQIEDKTTIINNTPYQIFYKPQLSVCNPHSGKEYFRVPDSATFSICPGGEQPAMKSSSLPCWDLMPDISQSVLDASLLQKQIMLGFSPAPGADSSQCWSLPAIVRPEFPRQSVAVPLGNFRENGFCTRAIVLTYQEHLGVTYLTLSEDPSPRVIIHNRCPVKMLIKENIKDIPKFEVYCKKIPSECSIHHELYHQISSYPDCKTKDLLPSLLLRVEPLDEVTTEWSDAIDINSQGTQVVFLTGFGYVYVDVVHQCGTVFITVAPEGKAGPILTNTNRAPEKIVTFKMFITQLSLAVFDDLTHHKASAELLRLTLDNIFLCVAPGAGPLPGEEPVAALFELYCVEICCGDLQLDNQLYNKSNFHFAVLVCQGEKAEPIQCSKMQSLLISNKELEEYKEKCFIKLCITLNEGKSILCDINEFSFELKPARLYVEDTFVYYIKTLFDTYLPNSRLAGHSTHLSGGKQVLPMQVTQHARALVNPVKLRKLVIQPVNLLVSIHASLKLYIASDHTPLSFSVFERGPIFTTARQLVHALAMHYAAGALFRAGWVVGSLDILGSPASLVRSIGNGVADFFRLPYEGLTRGPGAFVSGVSRGTTSFVKHISKGTLTSITNLATSLARNMDRLSLDEEHYNRQEEWRRQLPESLGEGLRQGLSRLGISLLGAIAGIVDQPMQNFQKTSEAQASAGHKAKGVISGVGKGIMGVFTKPIGGAAELVSQTGYGILHGAGLSQLPKQRHQPSDLHADQAPNSHVKYVWKMLQSLGRPEVHMALDVVLVRGSGQEHEGCLLLTSEVLFVVSVSEDTQQQAFPVTEIDCAQDSKQNNLLTVQLKQPRVACDVEVDGVRERLSEQQYNRLVDYITKTSCHLAPSCSSMQIPCPVVAAEPPPSTVKTYHYLVDPHFAQVFLSKFTMVKNKALRKGFP

SEQ ID NO: 10064 - protein, 1427 aa, Homo sapiens
MLESYVTPILMSYVNRYIKNLKPSDLQLSLWGGDVVLSKLELKLDVLEQELKLPFTFLSGHIHELRIHVPWTKLGSEPVVITINTMECILKLKDGIQDDHESCGSNSTNRSTAESTKSSIKPRRMQQAAPTDPDLPPGYVQSLIRRVVNNVNIVINNLILKYVEDDIVLSVNITSAECYTVGELWDRAFMDISATDLVLRKVINFSDCTVCLDKRNASGKIEFYQDPLLYKCSFRTRLHFTYENLNSKMPSVIKIHTLVESLKLSITDQQLPMFIRIMQLGIALYYGEIGNFKEGEIEDLTCHNKDMLGNITGSEDETRIDMQYPAQHKGQELYSQQDEEQPQGWVSWAWSFVPAIVSYDDGEEDFVGNDPASTMHQQKAQTLKDPIVSIGFYCTKATVTFKLTEMQVESSYYSPQKVKSKEVLCWEQEGTTVEALMMGEPFFDCQIGFVGCRAMCLKGIMGVKDFEENMNRSETEACFFICGDNLSTKGFTYLTNSLFDYRSPENNGTRAEFILDSTHHKETYTEIAGMQRFGAFYMDYLYTMENTSGKGSTNQQDFSSGKSEDLGTVQEKSTKSLVIGPLDFRLDSSAVHRILKMIVCALEHEYEPYSRLKSDIKDENETILNPEEVALLEEYIPTRHTSVTLLKCTCTISMAEFNLLDHLLPVIMGEKNSSNFMNTTNFQSLRPLPSIRILVDKINLEHSVPMYAEQLVHVVSSLTQPSDNLLHYCYVHCYLKIFGFQAGLTSLDCSGSYCLPVPVIPSFSTALYGKLLKLPTCWTKRSQIAITEGIFELPNLTIQATRAQTLLLQAIYQSWSHLGNVSSSAVIEALINEIFLSIGVKSKNPLPTLEGSIQNVELKYCSTSLVKCASGTMGSIKICAKAPVDSGKEKLIPLLQGPSDTKDLHSTKWLNESRKPESLLAPDLMAFTIQVPQYIDYCHNSGAVLLCSIQGLAVNIDPILYTWLIYQPQKRTSRHMQQQPVVAVPLVMPVCRRKEDEVSIGSAPLAKQQSYQASEYASSPVKTKTVTESRPLSVPVKAMLNISESCRSPEERMKEFIGIVWNAVKHLTLQLEVQSCCVFIPNDSLPSPSTIVSGDIPGTVRSWYHGQTSMPGTLVLCLPQIKIISAGHKYMEPLQEIPFVIPRPILEEGDAFPWTISLHNFSIYTLLGKQVTLCLVEPMGCTSTLAVTSQKLLATGPDTRHSFVVCLHVDLESLEIKCSNPQVQLFYELTDIMNKVWNKIQKRGNLNLSPTSPETMAGPVPTSPVRSSIGTAPPDTSTCSPSADIGTTTEGDSIQAGEESPFSDSVTLEQTTSNIGGTSGRVSLWMQWVLPKITIKLFAPDPENKGTEVCMVSELEDLSASIDVQDVYTKVKCKIESFNIDHYRSRPGEGWQSGHFEGVFLQCKEKSVPWGRVLVFGAMWRCLPFLY

SEQ ID NO: 10065 - protein, 863 aa, Homo sapiens
MLESYVTPILMSYVNRYIKNLKPSDLQLSLWGGDVVLSKLELKLDVLEQELKLPFTFLSGHIHELRIHVPWTKLGSEPVVITINTMECILKLKDGIQDDHESCGSNSTNRSTAESTKSSIKPRRMQQAAPTDPDLPPGYVQSLIRRVVNNVNIVINNLILKYVEDDIVLSVNITSAECYTVGELWDRAFMDISATDLVLRKVINFSDCTVCLDKRNASGKIEFYQDPLLYKCSFRTRLHFTYENLNSKMPSVIKIHTLVESLKLSITDQQLPMFIRIMQLGIALYYGEIGNFKEGEIEDLTCHNKDMLGNITGSEDETRIDMQYPAQHKGQELYSQQDEEQPQGWVSWAWSFVPAIVSYDDGEEDFVGNDPASTMHQQKAQTLKDPIVSIGFYCTKATVTFKLTEMQVESSYYSPQKVKSKEVLCWEQEGTTVEALMMGEPFFDCQIGFVGCRAMCLKGIMGVKDFEENMNRSETEACFFICGDNLSTKGFTYLTNSLFDYRSPENNGTRAEFILDSTHHKETYTEIAGMQRFGAFYMDYLYTMENTSGKGSTNQQDFSSGKSEDLGTVQEKSTKSLVIGPLDFRLDSSAVHRILKMIVCALEHEYEPYSRLKSDIKDENETILNPEEVALLEEYIPTRHTSVTLLKCTCTISMAEFNLLDHLLPVIMGEKNSSNFMNTTNFQSLRPLPSIRILVDKINLEHSVPMYAEQLVHVVSSLTQPSDNLLHYCYVHCYLKIFGFQAGLTSLDCSGSYCLPVPVIPSFSTALYGKLLKLPTCWTKRSQIAITEGIFELPNLTIQATRAQTLLLQAIYQSWSHLGNVSSSAVIEALINEIFLSIEIGSCYVAQVDLELLASNDPPTSTS

SEQ ID NO: 10066 - protein, 415 aa, Homo sapiens
MLESYVTPILMSYVNRYIKNLKPSDLQLSLWGGDVVLSKLELKLDVLEQELKLPFTFLSGHIHELRIHVPWTKLGSEPVVITINTMECILKLKDGIQDDHESCGSNSTNRSTAESTKSSIKPRRMQQAAPTDPDLPPGYVQSLIRRVVNNVNIVINNLILKYVEDDIVLSVNITSAECYTVGELWDRAFMDISATDLVLRKVINFSDCTVCLDKRNASGKIEFYQDPLLYKCSFRTRLHFTYENLNSKMPSVIKIHTLVESLKLSITDQQLPMFIRIMQLGIALYYGEIGNFKEGEIEDLTCHNKDMLGNITGSEDETRIDMQYPAQHKGQELYSQQDEEQPQGWVSWAWSFVPAIVSYDDGEEDFVGNDPASTMHQQKAQTLKDPIVSIGFYCTKATVTFKVGLFSCCLYLYQL

SEQ ID NO: 10067 - protein, 4021 aa, Homo sapiens
MLESYVTPILMSYVNRYIKNLKPSDLQLSLWGGDVVLSKLELKLDVLEQELKLPFTFLSGHIHELRIHVPWTKLGSEPVVITINTMECILKLKDGIQDDHESCGSNSTNRSTAESTKSSIKPRRMQQAAPTDPDLPPGYVQSLIRRVVNNVNIVINNLILKYVEDDIVLSVNITSAECYTVGELWDRAFMDISATDLVLRKVINFSDCTVCLDKRNASGKIEFYQDPLLYKCSFRTRLHFTYENLNSKMPSVIKIHTLVESLKLSITDQQLPMFIRIMQLGIALYYGEIGNFKEGEIEDLTCHNKDMLGNITGSEDETRIDMQYPAQHKGQELYSQQDEEQPQGWVSWAWSFVPAIVSYDDGEEDFVGNDPASTMHQQKAQTLKDPIVSIGFYCTKATVTFKLTEMQVESSYYSPQKVKSKEVLCWEQEGTTVEALMMGEPFFDCQIGFVGCRAMCLKGIMGVKDFEENMNRSETEACFFICGDNLSTKGFTYLTNSLFDYRSPENNGTRAEFILDSTHHKETYTEIAGMQRFGAFYMDYLYTMENTSGKGSTNQQDFSSGKSEDLGTVQEKSTKSLVIGPLDFRLDSSAVHRILKMIVCALEHEYEPYSRLKSDIKDENETILNPEEVALLEEYIPTRHTSVTLLKCTCTISMAEFNLLDHLLPVIMGEKNSSNFMNTTNFQSLRPLPSIRILVDKINLEHSVPMYAEQLVHVVSSLTQPSDNLLHYCYVHCYLKIFGFQAGLTSLDCSGSYCLPVPVIPSFSTALYGKLLKLPTCWTKRSQIAITEGIFELPNLTIQATRAQTLLLQAIYQSWSHLGNVSSSAVIEALINEIFLSIGVKSKNPLPTLEGSIQNVELKYCSTSLVKCASGTMGSIKICAKAPVDSGKEKLIPLLQGPSDTKDLHSTKWLNESRKPESLLAPDLMAFTIQVPQYIDYCHNSGAVLLCSIQGLAVNIDPILYTWLIYQPQKRTSRHMQQPVVAVPLVMPVCRRKEDEVSIGSAPLAKQQSYQASEYASSPVKTKTVTESRPLSVPVKAMLNISESCRSPEERMKEFIGIVWNAVKHLTLQLEVQSCCVFIPNDSLPSPSTIVSGDIPGTVRSWYHGQTSMPGTLVLCLPQIKIISAGHKYMEPLQEIPFVIPRPILEEGDAFPWTISLHNFSIYTLLGKQVTLCLVEPMGCTSTLAVTSQKLLATGPDTRHSFVVCLHVDLESLEIKCSNPQVQLFYELTDIMNKVWNKIQKRGNLNLSPTSPETMAGPVPTSPVRSSIGTAPPDTSTCSPSADIGTTTEGDSIQAGEESPFSDSVTLEQTTSNIGGTSGRVSLWMQWVLPKITIKLFAPDPENKGTEVCMVSELEDLSASIDVQDVYTKVKCKIESFNIDHYRSSLGEECWSLGQCGGVFLSCTDKLNRRTLLVRPISKQDPFSNCSGFFPSTTTKLLDGTHQQHGFLSLTYTKAVTKNVRHKLTSRNERRSFHKLSEGLMDGSPHFLHEILLSAQAFDIVLYFPLLNAIASIFQAKLPKTQKEKRKSPGQPMRTHTLTSRNLPLIYVNTSVIRIFIPKTEEMQPTVEANQAAKEDTVVLKIGSVAMAPQADNPLGRSVLRKDIYQRALNLGILRDPGSEIEDRQYQIDLQSINIGTAQWHQLKPEKESVSGGVVTETERNSQNPALEWNMASSIRRHQERRAILTPVLTDFSVRITGAPAVIFTKVVSPENLHTEEILVCGHSLEVNITTNLDFFLSVAQVQLLHQLIVANMTGLEPSNKAAEISKQEQKKVDIFDGGMAETSSRYSGAQDSGIGSDSVKIRIVQIEQHSGASQHRIARPSRQSSIVKNLNFIPFDIFITASRISLMTYSCMALSKSKSQEQKNNEKTDKSSLNLPEVDSDVAKPNQACISTVTAEDLLRSSISFPSGKKIGVLSLESLHASTRSSARQALGITIVRQPGRRGTGDLQLEPFLYFIVSQPSLLLSCHHRKQRVEVSIFDAVLKGVASDYKCIDPGKTLPEALDYCTVWLQTVPGEIDSKSGIPPSFITLQIKDFLNGPADVNLDISKPLKANLSFTKLDQINLFLKKIKNAHSLAHSEETSAMSNTMVNKDDLPVSKYYRGKLSKPKIHGDGVQKISAQENMWRAVSCFQKISVQTTQIVISMETVPHTSKPCLLASLSNLNGSLSVKATQKVPGIILGSSFLLSINDFLLKTSLKERSRILIGPCCATANLEAKWCKHSGNPGPEQSIPKISIDLRGGLLQVFWGQEHLNCLVLLHELLNGYLNEEGNFEVQVSEPVPQMSSPVEKNQTFKSEQSSDDLRTGLFQYVQDAESLKLPGVYEVLFYNETEDCPGMMLWRYPEPRVLTLVRITPVPFNTTEDPDISTADLGDVLQVPCSLEYWDELQKVFVAFREFNLSESKVCELQLPDINLVNDQKKLVSSDLWRIVLNSSQNGADDQSSASESGSQSTCDPLVTPTALAACTRVDSCFTPWFVPSLCVSFQFAHLEFHLCHHLDQLGTAAPQYLQPFVSDRNMPSELEYMIVSFREPHMYLRQWNNGSVCQEIQFLAQADCKLLECRNVTMQSVVKPFSIFGQMAVSSDVVEKLLDCTVIVDSVFVNLGQHVVHSLNTAIQAWQQNKCPEVEELVFSHFVICNDTQETLRFGQVDTDENILLASLHSHQYSWRSHKSPQLLHICIEGWGNWRWSEPFSVDHAGTFIRTIQYRGRTASLIIKVQQLNGVQKQIIICGRQIICSYLSQSIELKVVQHYIGQDGQAVVREHFDCLTAKQKLPSYILENNELTELCVKAKGDEDWSRDVCLESKAPEYSIVIQVPSSNSSIIYVWCTVLTLEPNSQVQQRMIVFSPLFIMRSHLPDPIIIHLEKRSLGLSETQIIPGKGQEKPLQNIEPDLVHHLTFQAREEYDPSDCAVPISTSLIKQIATKVHPGGTVNQILDEFYGPEKSLQPIWPYNKKDSDRNEQLSQWDSPMRVKLSIWKPYVRTLLIELLPWALLINESKWDLWLFEGEKIVLQVPAGKIIIPPNFQEAFQIGIYWANTNTVHKSVAIKLVHNLTSPKWKDGGNGEVVTLDEEAFVDTEIRLGAFPGHQKLCQFCISSMVQQGIQIIQIEDKTTIINNTPYQIFYKPQLSVCNPHSGKEYFRVPDSATFSICPGGEQPAMKSSSLPCWDLMPDISQSVLDASLLQKQIMLGFSPAPGADSSQCWSLPAIVRPEFPRQSVAVPLGNFRENGFCTRAIVLTYQEHLGVTYLTLSEDPSPRVIIHNRCPVKMLIKENIKDIPKFEVYCKKIPSECSIHHELYHQISSYPDCKTKDLLPSLLLRVEPLDEVTTEWSDAIDINSQGTQVVFLTGFGYVYVDVVHQCGTVFITVAPEGKAGPILTNTNRAPEKIVTFKMFITQLSLAVFDDLTHHKASAELLRLTLDNIFLCVAPGAGPLPGEEPVAALFELYCVEICCGDLQLDNQLYNKSNFHFAVLVCQGEKAEPIQCSKMQSLLISNKELEEYKEKCFIKLCITLNEGKSILCDINEFSFELKPARLYVEDTFVYYIKTLFDTYLPNSRLAGHSTHLSGGKQVLPMQVTQHARALVNPVKLRKLVIQPVNLLVSIHASLKLYIASDHTPLSFSVFERGPIFTTARQLVHALAMHYAAGALFRAGWVVGSLDILGSPASLVRSIGNGVADFFRLPYEGLTRGPGAFVSGVSRGTTSFVKHISKGTLTSITNLATSLARNMDRLSLDEEHYNRQEEWRRQLPESLGEGLRQGLSRLGISLLGAIAGIVDQPMQNFQKTSEAQASAGHKAKGVISGVGKGIMGVFTKPIGGAAELVSQTGYGILHGAGLSQLPKQRHQPSDLHADQAPNSHVKYVWKMLQSLGRPEVHMALDVVLVRGSGQEHEGCLLLTSEVLFVVSVSEDTQQQAFPVTEIDCAQDSKQNNLLTVQLKQPRVACDVEVDGVRERLSEQQYNRLVDYITKTSCHLAPSCSSMQIPCPVVAAEPPPSTVKTYHYLVDPHFAQVFLSKFTMVKNKALRKGFP

SEQ ID NO: 10068 - protein, 561 aa, Homo sapiens
MNSSLTAQRRGSDAELGPWVMAARSKDAAPSQRDGLLPVKVEEDSPGSWEPNYPAASPDPETSRLHFRQLRYQEVAGPEEALSRLRELCRRWLRPELLSKEQILELLVLEQFLTILPEELQAWVREHCPESGEEAVAVVRALQRALDGTSSQGMVTFEDTAVSLTWEEWERLDPARRDFCRESAQKDSGSTVPPSLESRVENKELIPMQQILEEAEPQGQLQEAFQGKRPLFSKCGSTHEDRVEKQSGDPLPLKLENSPEAEGLNSISDVNKNGSIEGEDSKNNELQNSARCSNLVLCQHIPKAERPTDSEEHGNKCKQSFHMVTWHVLKPHKSDSGDSFHHSSLFETQRQLHEERPYKCGNCGKSFKQRSDLFRHQRIHTGEKPYGCQECGKSFSQSAALTKHQRTHTGEKPYTCLKCGERFRQNSHLNRHQSTHSRDKHFKCEECGETCHISNLFRHQRLHKGERPYKCEECEKSFKQRSDLFKHHRIHTGEKPYGCSVCGKRFNQSATLIKHQRIHTGEKPYKCLECGERFRQSTHLIRHQRIHQNKVLSAGRGGSRL

SEQ ID NO: 10069 - protein, 162 aa, Homo sapiens
MNSSLTAQRRGSDAELGPWVMAARSKDAAPSQRDGLLPVKVEEDSPGSWEPNYPAASPDPETSRLHFRQLRYQEVAGPEEALSRLRELCRRWLRPELLSKEQILELLVLEQFLTILPEELQAWVREHCPESGEEAVAVVRALQRALDGTSSQVWKAEWRTKS

SEQ ID NO: 10070 - protein, 102 aa, Homo sapiens
MKKRHREGCDMPGPWSTLRSHRGHHCPHLHPVLRRPTLTDVEGCLQCLDVCGHPRHAVDAHLLHASALDLLHALAHDVGHLGPLSPAGGGNVLSVLTALLGP

SEQ ID NO: 10071 - protein, 257 aa, Homo sapiens
MEFPDLGAHCSEPSCQRLDFLPLKCDACSGIFCADHVAYAQHHCGSAYQKDIQVPVCPLCNVPVPVARGEPPDRAVGEHIDRDCRSDPAQQKRKIFTNKCERAGCRQREMMKLTCERCSRNFCIKHRHPLDHDCSGEGHPTSRAGLAAISRAQAVASTSTVPSPSQTMPSCTSPSRATTRSPSWTAPPVIALQNGLSEDEALQRALEMSLAETKPQVPSCQEEEDLALAQALSASEAEYQRQQAQSRSSKPSNCSLC

SEQ ID NO: 10072 - protein, 176 aa, Homo sapiens
MEFPDLGAHCSEPSCQRLDFLPLKCDACSGIFCADHVAYAQHHCGSAYQKDIQVPVCPLCNVPVPVARGEPPDRAVGEHIDRDCRSDPAQQKRKIFTNKCERAGCRQREMMKLTCERCSRNFCIKHRHPLDHDCSGEGHPTSRAGLAAISRAQAVASTSTVPSPSQTMPSCTSPSR

SEQ ID NO: 10073 - protein, 406 aa, Homo sapiens
MIEYQIPVSFKDVVVGFTQEEWHRLSPAQRALYRDVMLETYSNLVSVGYEGTKPDVILRLEQEEAPWIGEAACPGCHCWEDIWRVNIQRKRRQDMLLRPGAAISKKTLPKEKSCEYNKFGKISLLSTDLFSSIQSPSNWNPCGKNLNHNLDLIGFKRNCAKKQDECYAYGKLLQRINHGRRPNGEKPRGCSHCEKAFTQNPALMYKPAVSDSLLYKRKRVPPTEKPHVCSECGKAFCYKSEFIRHQRSHTGEKPYGCTDCGKAFSHKSTLIKHQRIHTGVRPFECFFCGKAFTQKSHRTEHQRTHTGERPFVCSECGKSFGEKSYLNVHRKMHTGERPYRCRECGKSFSQKSCLNKHWRTHTGEKPYGCNECGKAFYQKPNLSRHQKIHARKNAYRNENLIIVGNT

SEQ ID NO: 10074 - protein, 374 aa, Homo sapiens
MIEYQIPVSFKDVVVGFTQEEWHRLSPAQRALYRDVMLETYSNLVSVGYEGTKPDVILRLEQEEAPWIGEAACPGCHCWEDIWRVNIQRKRRQDMLLRPGAAISKKTLPKEKSCEYNKFGKISLLSTDLFSSIQSPSNWNPCGKNLNHNLDLIGFKRNCAKKQDECYAYGKLLQRINHGRRPNGEKPRGCSHCEKAFTQNPALMYKPAVSDSLLYKRKRVPPTEKPHVCSECGKAFCYKSEFIRHQRSHTGEKPYGCTDCGKAFSHKSTLIKHQRIHTGVRPFECFFCGKAFTQKSHRTEHQRTHTGERPFVCSECGKSFGEKSYLNVHRKMHTGERPYRCRECGKSFSQKSCLNKHWRTHFGESSLRSKSSNT

SEQ ID NO: 10075 - protein, 312 aa, Homo sapiens
MLLRPGAAISKKTLPKEKSCEYNKFGKISLLSTDLFSSIQSPSNWNPCGKNLNHNLDLIGFKRNCAKKQDECYAYGKLLQRINHGRRPNGEKPRGCSHCEKAFTQNPALMYKPAVSDSLLYKRKRVPPTEKPHVCSECGKAFCYKSEFIRHQRSHTGEKPYGCTDCGKAFSHKSTLIKHQRIHTGVRPFECFFCGKAFTQKSHRTEHQRTHTGERPFVCSECGKSFGEKSYLNVHRKMHTGERPYRCRECGKSFSQKSCLNKHWRTHTGEKPYGCNECGKAFYQKPNLSRHQKIHARKNAYRNENLIIVGNT

SEQ ID NO: 10076 - protein, 638 aa, Homo sapiens
MESCSVTRLECSGAISAHCSLHLPGSSDSPASASQIAGTTDAIWNEQEKAELFTDKFCQVCGVMLQFESQRISHYEGEKHAQNVSFYFQMHGEQNEVPGKKMKMHVENFQVHRYEGVDKNKFCDLCNMMFSSPLIAQSHYVGKVHAKKLKQLMEEHDQASPSGFQPEMAFSMRTYVCHICSIAFTSLDMFRSHMQGSEHQIKESIVINLVKNSRKTQDSYQNECADYINVQKARGLEAKTCFRKMEESSLETRRYREVVDSRPRHRMFEQRLPFETFRTYAAPYNISQAMEKQLPHSKKTYDSFQDELEDYIKVQKARGLDPKTCFRKMRENSVDTHGYREMVDSGPRSRMCEQRFSHEASQTYQRPYHISPVESQLPQWLPTHSKRTYDSFQDELEDYIKVQKARGLEPKTCFRKIGDSSVETHRNREMVDVRPRHRMLEQKLPCETFQTYSGPYSISQVVENQLPHCLPAHDSKQRLDSISYCQLTRDCFPEKPVPLSLNQQENNSGSYSVESEVYKHLSSENNTADHQAGHKQKHQKRKRHLEEGKERPEKEQSKHKRKKSYEDTDLDKDKSIRQRKREEDRVKVSSGKLKHRKKKKSHDVPSEKEERKHRKEKKKSVEERTEEEMLWDESILGF

SEQ ID NO: 10077 - protein, 467 aa, Homo sapiens
MRTYVCHICSIAFTSLDMFRSHMQGSEHQIKESIVINLVKNSRKTQDSYQNECADYINVQKARGLEAKTCFRKMEESSLETRRYREVVDSRPRHRMFEQRLPFETFRTYAAPYNISQAMEKQLPHSKKTYDSFQDELEDYIKVQKARGLDPKTCFRKMRENSVDTHGYREMVDSGPRSRMCEQRFSHEASQTYQRPYHISPVESQLPQWLPTHSKRTYDSFQDELEDYIKVQKARGLEPKTCFRKIGDSSVETHRNREMVDVRPRHRMLEQKLPCETFQTYSGPYSISQVVENQLPHCLPAHDSKQRLDSISYCQLTRDCFPEKPVPLSLNQQENNSGSYSVESEVYKHLSSENNTADHQAGHKQKHQKRKRHLEEGKERPEKEQSKHKRKKSYEDTDLDKDKSIRQRKREEDRVKVSSGKLKHRKKKKSHDVPSEKEERKHRKEKKKSVEERTEEEMLWDESILGF

SEQ ID NO: 10078 - protein, 651 aa, Homo sapiens
MLREEATKKSKEKEPGMALPQGRLTFRDVAIEFSLEEWKCLNPAQRALYRAVMLENYRNLEFVDSSLKSMMEFSSTRHSITGEVIHTGTLQRHKSHHIGDFCFPEMKKDIHHFEFQWQEVERNGHEAPMTKIKKLTGSTDRSDHRHAGNKPIKDQLGLSFHSHLPELHMFQTKGKISNQLDKSIGASSASESQRISCRLKTHISNKYGKNFLHSSFTQIQEICMREKPCQSNECGKAFNYSSLLRRHHITHSREREYKCDVCGKIFNQKQYIVYHHRCHTGEKTYKCNECGKTFTQMSSLVCHRRLHTGEKPYKCNECGKTFSEKSSLRCHRRLHTGEKPYKCNECGKTFGRNSALVIHKAIHTGEKPYKCNECGKTFSQKSSLQCHHILHTGEKPYKCEECDNVYIRRSHLERHRKIHTGEGSYKCKVCDKVFRSDSYLAEHQRVHTGEKPYKCNKCGRSFSRKSSLQYHHTLHTGEKPYTCNECGKVFSRRENLARHHRLHAGEKPYKCEECDKVFSRRSHLERHRRIHTGEKPYKCKVCDKAFRSDSCLANHTRVHTGEKPYKCNKCAKVFNQKGILAQHQRVHTGEKPYKCNECGKVFNQKASLAKHQRVHTAEKPYKCNECGKAFTGQSTLIHHQAIHGCRETLQM

SEQ ID NO: 10079 - protein, 515 aa, Homo sapiens
MGLLAFRDVALEFSPEEWECLDPAQRSLYRDVMLENYRNLISLGEDSFNMQFLFHSLAMSKPELIICLEARKEPWNVNTEKTARHSVLSSYLTEDILPEQGLQVSFQKVMLRRYERCCLEKLRLRNDWEIVGEWKGQKASYNGLDLCSATTHSKNFQCNKCVKGFSKFANLNKCKISHTGEKPFKCKECGNVSCMSLIMTQQQRIHIGENPYQCKKCGKAFNECSCFTDCKRIHVGEKHCKCEECNNIFKSCSSLAVVEKNHTEKKTYRCEECGKAFNLCSVLTKHKKIHTGEKPYKCEECGKSFKLFPYLTQHKRIHSREKPYKCEECGKVFKLLSYLTQHRRIHTGEKTFRCEECGKAFNQSSHLTEHRRIHTGEKPYKCEECGKAFTWFSYLIQHKRIHTGQKPYKCEECGKAFTWFSYLTQHKRIHTGEKPYKCDECGKAFNWFSYLTNHKRIHTGEKPYKCEECGKAFGQSSHLSKHKTIHTREKPYKCEECGKAFNHSAQLAVHEKTHT

SEQ ID NO: 10080 - protein, 172 aa, Homo sapiens
MGLLAFRDVALEFSPEEWECLDPAQRSLYRDVMLENYRNLISLGEDSFNMQFLFHSLAMSKPELIICLEARKEPWNVNTEKTARHSVLSSYLTEDILPEQGLQVSFQKVMLRRYERCCLEKLRLRNDWEIPCEDVLASPLPSAMILSFLRPPQKQKHVKPTEPVQSSTIELL

SEQ ID NO: 10081 - protein, 133 aa, Homo sapiens
MGLLAFRDVALEFSPEEWECLDPAQRSLYRDVMLENYRNLISLGEDSFNMQFLFHSLAMSKPELIICLEARKEPWNVNTEKTARHSVLSSYLTEDILPEQGLQVSFQKVMLRRYERCCLEKLRLRNDWEIVAM

SEQ ID NO: 10082 - protein, 88 aa, Homo sapiens
MGLLAFRDVALEFSPEEWECLDPAQRSLYRDVMLENYRNLISLGEDSFNMQFLFHSLAMSKPELIICLEARKEPWNVNTEKTARHSVM

SEQ ID NO: 10083 - protein, 540 aa, Homo sapiens
MELLTFRDVAIEFSPEEWKCLDPAQQNLYRDVMLENYRNLVSLAVYSYYNQGILPEQGIQDSFKKATLGRYGSCGLENICLWKNWESIGEGEGQKECYNLCSQYLTTSHNKHLTVKGDKEYRIFQKKPQFLSAAPTEPCIPMNKYQHKFLKSVFCNKNQINFNHDSNISKHHSTHFLENYYNCNECEKVFYQSSKLIFPENIHIQKKPYNSNECGETSDPFSKLTQHQRIYIGESSQRCNKKCIIVFSQSHLKGHKIINTGEKSVKYKERGKAFTRGLHLGHQKIHTGEKPYKCKKCDKAFNKSSHLAQHQRIHTGEKPFKCKECGKAFNRGSYLTQHQRIHTGERAFKCEECGKAFNRGSYLTQHQRIHTGEKPFRCKECGKAFNRSSYVTQHQRMHTGEKPFKCKECGKAFNRASHLTQHQRIHTGEKHFKCKECGKAFNRGSHLTRHQRIHTGEKSFKCEECGKAFIWGSHLTQHQRVHTGEKFFKCKECGKAFTRSSHLTQHQRIHTGEKPFKCKECGKAFNRRSTLTQHQIIHTR

SEQ ID NO: 10084 - protein, 836 aa, Homo sapiens
MQVDPPLHGPPNDFLIFQIIPLHSLSIMPRFLWILCFSMEETQGELTSSCGSKTMANVSLAFRDVSIDLSQEEWECLDAVQRDLYKDVMLENYSNLVSLGYTIPKPDVITLLEQEKEPWIVMREGTRNWFTDLEYKYITKNLLSEKNVCKIYLSQLQTGEKSKNTIHEDTIFRNGLQCKHEFERQERHQMGCVSQMLIQKQISHPLHPKIHAREKSYECKECRKAFRQQSYLIQHLRIHTGERPYKCMECGKAFCRVGDLRVHHTIHAGERPYECKECGKAFRLHYHLTEHQRIHSGVKPYECKECGKAFSRVRDLRVHQTIHAGERPYECKECGKAFRLHYQLTEHQRIHTGERPYECKVCGKTFRVQRHISQHQKIHTGVKPYKCNECGKAFSHGSYLVQHQKIHTGEKPYECKECGKSFSFHAELARHRRIHTGEKPYECRECGKAFRLQTELTRHHRTHTGEKPYECKECGKAFICGYQLTLHLRTHTGEIPYECKECGKTFSSRYHLTQHYRIHTGEKPYICNECGKAFRLQGELTRHHRIHTCEKPYECKECGKAFIHSNQFISHQRIHTSESTYICKECGKIFSRRYNLTQHFKIHTGEKPYICNECGKAFRFQTELTQHHRIHTGEKPYKCTECGKAFIRSTHLTQHHRIHTGEKPYECTECGKTFSRHYHLTQHHRGHTGEKPYICNECGNAFICSYRLTLHQRIHTGELPYECKECGKTFSRRYHLTQHFRLHTGEKPYSCKECGNAFRLQAELTRHHIVHTGEKPYKCKECGKAFSVNSELTRHHRIHTGEKPYQCKECGKAFIRSDQLTLHQRNHISEEVLCIM

SEQ ID NO: 10085 - protein, 658 aa, Homo sapiens
MTPGVRVSTDPEQVTFEDVVVGFSQEEWGQLKPAQRTLYRDVMLDTFRLLVSVGHWLPKPNVISLLEQEAELWAVESRLPQGVYPDLETRPKVKLSVLKQGISEEISNSVILVERFLWDGLWYCRGEDTEGHWEWSCESLESLAVPVAFTPVKTPVLEQWQRNGFGENISLNPDLPHQPMTPERQSPHTWGTRGKREKPDLNVLQKTCVKEKPYKCQECGKAFSHSSALIEHHRTHTGERPYECHECLKGFRNSSALTKHQRIHTGEKPYKCTQCGRTFNQIAPLIQHQRTHTGEKPYECSECGKSFSFRSSFSQHERTHTGEKPYECSECGKAFRQSIHLTQHLRIHTGEKPYQCGECGKAFSHSSSLTKHQRIHTGEKPYECHECGKAFTQITPLIQHQRTHTGEKPYECGECGKAFSQSTLLTEHRRIHTGEKPYGCNECGKTFSHSSSLSQHERTHTGEKPYECSQCGKAFRQSTHLTQHQRIHTGEKPYECNDCGKAFSHSSSLTKHQRIHTGEKPYECNQCGRAFSQLAPLIQHQRIHTGEKPYECNQCGRAFSQSSLLIEHQRIHTKEKPYGCNECGKSFSHSSSLSQHERTHTGEKPYECHDCGKSFRQSTHLTQHRRIHTGEKPYACRDCGKAFTHSSSLTKHQRTHTG

SEQ ID NO: 10086 - protein, 390 aa, Homo sapiens
MELGSRRRSVGCRCRGLCLAVRREQVTFEDVVVGFSQEEWGQLKPAQRTLYRDVMLDTFRLLVSVGHWLPKPNVISLLEQEAELWAVESRLPQGVYPDLETRPKVKLSVLKQGISEEISNSVILVERFLWDGLWYCRGEDTEGHWEWSCESLESLAVPVAFTPVKTPVLEQWQRNGFGENISLNPDLPHQPMTPERQSPHTWGTRGKREKPDLNVLQKTCVKEKPYKCQECGKAFSHSSALIEHHRTHTGERPYECHECLKGFRNSSALTKHQRIHTGEKPYKCTQCGRTFNQIAPLIQHQRTHTGEKPYECSECGKSFSFRSSFSQHERTHTGEKPYECSECGKAFRQSIHLTQHLRIHTGEKPYQCGECGKAFTHSSSLTKHQRTHTG

SEQ ID NO: 10087 - protein, 670 aa, Homo sapiens
MTPGVRVSTDPEQVTFEDVVVGFSQEEWGQLKPAQRTLYRDVMLDTFRLLVSVGHWLPKPNVISLLEQEAELWAVESRLPQGVYPEIKGHFQFLLLSDLETRPKVKLSVLKQGISEEISNSVILVERFLWDGLWYCRGEDTEGHWEWSCESLESLAVPVAFTPVKTPVLEQWQRNGFGENISLNPDLPHQPMTPERQSPHTWGTRGKREKPDLNVLQKTCVKEKPYKCQECGKAFSHSSALIEHHRTHTGERPYECHECLKGFRNSSALTKHQRIHTGEKPYKCTQCGRTFNQIAPLIQHQRTHTGEKPYECSECGKSFSFRSSFSQHERTHTGEKPYECSECGKAFRQSIHLTQHLRIHTGEKPYQCGECGKAFSHSSSLTKHQRIHTGEKPYECHECGKAFTQITPLIQHQRTHTGEKPYECGECGKAFSQSTLLTEHRRIHTGEKPYGCNECGKTFSHSSSLSQHERTHTGEKPYECSQCGKAFRQSTHLTQHQRIHTGEKPYECNDCGKAFSHSSSLTKHQRIHTGEKPYECNQCGRAFSQLAPLIQHQRIHTGEKPYECNQCGRAFSQSSLLIEHQRIHTKEKPYGCNECGKSFSHSSSLSQHERTHTGEKPYECHDCGKSFRQSTHLTQHRRIHTGEKPYACRDCGKAFTHSSSLTKHQRTHTG

SEQ ID NO: 10088 - protein, 682 aa, Homo sapiens
MELGSRRRSVGCRCRGLCLAVRREQVTFEDVVVGFSQEEWGQLKPAQRTLYRDVMLDTFRLLVSVGHWLPKPNVISLLEQEAELWAVESRLPQGVYPEIKGHFQFLLLSDLETRPKVKLSVLKQGISEEISNSVILVERFLWDGLWYCRGEDTEGHWEWSCESLESLAVPVAFTPVKTPVLEQWQRNGFGENISLNPDLPHQPMTPERQSPHTWGTRGKREKPDLNVLQKTCVKEKPYKCQECGKAFSHSSALIEHHRTHTGERPYECHECLKGFRNSSALTKHQRIHTGEKPYKCTQCGRTFNQIAPLIQHQRTHTGEKPYECSECGKSFSFRSSFSQHERTHTGEKPYECSECGKAFRQSIHLTQHLRIHTGEKPYQCGECGKAFSHSSSLTKHQRIHTGEKPYECHECGKAFTQITPLIQHQRTHTGEKPYECGECGKAFSQSTLLTEHRRIHTGEKPYGCNECGKTFSHSSSLSQHERTHTGEKPYECSQCGKAFRQSTHLTQHQRIHTGEKPYECNDCGKAFSHSSSLTKHQRIHTGEKPYECNQCGRAFSQLAPLIQHQRIHTGEKPYECNQCGRAFSQSSLLIEHQRIHTKEKPYGCNECGKSFSHSSSLSQHERTHTGEKPYECHDCGKSFRQSTHLTQHRRIHTGEKPYACRDCGKAFTHSSSLTKHQRTHTG

SEQ ID NO: 10089 - protein, 536 aa, Homo sapiens
MAVGLLKAMYQELVTFRDVAVDFSQEEWDCLDSSQRHLYSNVMLENYRILVSLGLCFSKPSVILLLEQGKAPWMVKRELTKGLCSGWEPICETEELTPKQDFYEEHQSQKIIETLTSYNLEYSSLREEWKCEGYFERQPGNQKACFKEEIITHEEPLFDEREQEYKSWGSFHQNPLLCTQKIIPKEEKVHKHDTQKRSFKKNLMAIKPKSVCAEKKLLKCNDCEKVFSQSSSLTLHQRIHTGEKPYKCIECGKAFSQRSNLVQHQRIHTGEKPYECKECRKAFSQNAHLVQHLRVHTGEKPYECKVCRKAFSQFAYLAQHQRVHTGEKPYECIECGKAFSNRSSIAQHQRVHTGEKPYECNVCGKAFSLRAYLTVHQRIHTGERPYECKECGKAFSQNSHLAQHQRIHTGEKPYKCQECRKAFSQIAYLAQHQRVHTGEKPYECIECGKAFSNDSSLTQHQRVHTGEKPYECTVCGKAFSYCGSLAQHQRIHTGERPYECKECKKTFRQHAHLAHHQRIHIGESLSPPNPVNHQVL

SEQ ID NO: 10090 - protein, 333 aa, Homo sapiens
MAIKPKSVCAEKKLLKCNDCEKVFSQSSSLTLHQRIHTGEKPYKCIECGKAFSQRSNLVQHQRIHTGEKPYECKECRKAFSQNAHLVQHLRVHTGEKPYECKVCRKAFSQFAYLAQHQRVHTGEKPYECIECGKAFSNRSSIAQHQRVHTGEKPYECNVCGKAFSLRAYLTVHQRIHTGERPYECKECGKAFSQNSHLAQHQRIHTGEKPYKCQECRKAFSQIAYLAQHQRVHTGEKPYECIECGKAFSNDSSLTQHQRVHTGEKPYECTVCGKAFSYCGSLAQHQRIHTGERPYECKECKKTFRQHAHLAHHQRIHIGESLSPPNPVNHQVL

SEQ ID NO: 10091 - protein, 439 aa, Homo sapiens
MLQTTWPQESVTFEDVAVYFTQNQWASLDPAQRALYGEVMLENYANVASLVAFPFPKPALISHLERGEAPWGPDPWDTEILRGISQGGESWIKNEGLVIKQEASEETELHRMPVGGLLRNVSQHFDFKRKALKQTFNLNPNLILRGGMKFYECKECGKIFRYNSKLIRHQMSHTGEKPFKCKECGKAFKSSYDCIVHEKNHIGEGPYECKECGKGLSSNTALTQHQRIHTGEKPYECKECGKAFRRSAAYLQHQRLHTGEKLYKCKECWKAFGCRSLFIVHQRIHTGEKPYQCKECGKAFTQKIASIQHQRVHTGEKPYECKVCGKAFKWYGSFVQHQKLHPVEKKPVKVLGPSLVSPQCSSPAIPPVLLQGSCSASAVAVPSLTFPHAVLIPTSGNFFMLLPTSGIPSSSAQIVRVFQGLTPTVKPSPVILTPSSHSS

SEQ ID NO: 10092 - protein, 157 aa, Homo sapiens
MLQTTWPQESVTFEDVAVYFTQNQWASLDPAQRALYGEVMLENYANVASLVAFPFPKPALISHLERGEAPWGPDPWDTEILRGISQGGESWIKNEGLVIKQEASEETELHRMPVGGLLRNVSQHFDFKRKALKQTFNLNPNLILRGGSVEVRSLRPA

SEQ ID NO: 10093 - protein, 722 aa, Homo sapiens
MMKEVLSTGQGNTEVIHTGTLQRYQSYHIGDFCFQEIEKEIHDIEFQCQEDERNGHEAPMTKIKKLTGSTDQHDHRHAGNKPIKDQLGSSFYSHLPELHIIQIKGKIGNQFEKSTSDAPSVSTSQRISPRPQIHISNNYGNNSPNSSLLPQKQEVYMREKSFQCNESGKAFNCSSLLRKHQIPHLGDKQYKCDVCGKLFNHKQYLTCHCRCHTGEKPYKCNECGKSFSQVSSLTCHRRLHTAVKSHKCNECGKIFGQNSALVIHKAIHTGEKPYKCNECDKAFNQQSNLARHRRIHTGEKPYKCEECDKVFSRKSTLESHKRIHTGEKPYKCKVCDTAFTWNSQLARHKRIHTGEKTYKCNECGKTFSHKSSLVCHHRLHGGEKSYKCKVCDKAFAWNSHLVRHTRIHSGGKPYKCNECGKTFGQNSDLLIHKSIHTGEQPYKYEECEKVFSCGSTLETHKIIHTGEKPYKCKVCDKAFACHSYLAKHTRIHSGEKPYKCNECSKTFRLRSYLASHRRVHSGEKPYKCNECSKTFSQRSYLHCHRRLHSGEKPYKCNECGKTFSHKPSLVHHRRLHTGEKSYKCTVCDKAFVRNSYLARHTRIHTAEKPYKCNECGKAFNQQSQLSLHHRIHAGEKLYKCETCDKVFSRKSHLKRHRRIHPGKKPYKCKVCDKTFGSDSHLKQHTGLHTGEKPYKCNECGKAFSKQSTLIHHQAVHGVGKLD

SEQ ID NO: 10094 - protein, 595 aa, Homo sapiens
MGPLTFRDVAIEFSLKEWQCLDTAQRNLYRNVMLENYRNLVFLGITVSKPDLITCLEQGKEAWSMKRHEIMVAKPTVMCSHFAQDLWPEQNIKDSFQKVTLKRYGKCRHENLPLRKGCESMDECKMHKGGCNGLNQCLTATQSKIFQCDKYVKVAHKFSNSNRHEIRHTKKKPFKCTKCGKSFGMISCLTEHSRIHTRVNFYKCEECGKAFNWSSTLTKHKRIHTGEKPYKCEECGKAFNQSSNLIKHKKIHTGEKPYKCEECGKTFNRFSTLTTHKIIHTGEKPYKCKECGKAFNRSSTLTTHRKIHTGEKPYKCEECGKAFKQSSNLTTHKIIHTGEKPYKCKKCGKAFNQSAHLTTHEVIHTGEKPYKCEKCGKAFNHFSHLTTHKIIHTGEKPYKCKECGKAFKHSSTLTKHKIIHTGEKPYKCKECEKAFNQSSKLTEHKKIHTGEKPYECEKCGKAFNQSSNLTRHKKSHTEEKPYKCEECGKGFKWPSTLTIHKIIHTGEKPYKCEECGKAFNQSSKLTKHKKIHTGEKPYTCEECGKAFNQSSNLTKHKRIHTGEKPYKCEECDKAFKWSSVLTKHKIIHTGEKLQI

SEQ ID NO: 10095 - protein, 562 aa, Homo sapiens
MGPLTFRDVAIEFSLKEWQCLDTAQRNLYRNVMLENYRNLVFLVMCSHFAQDLWPEQNIKDSFQKVTLKRYGKCRHENLPLRKGCESMDECKMHKGGCNGLNQCLTATQSKIFQCDKYVKVAHKFSNSNRHEIRHTKKKPFKCTKCGKSFGMISCLTEHSRIHTRVNFYKCEECGKAFNWSSTLTKHKRIHTGEKPYKCEECGKAFNQSSNLIKHKKIHTGEKPYKCEECGKTFNRFSTLTTHKIIHTGEKPYKCKECGKAFNRSSTLTTHRKIHTGEKPYKCEECGKAFKQSSNLTTHKIIHTGEKPYKCKKCGKAFNQSAHLTTHEVIHTGEKPYKCEKCGKAFNHFSHLTTHKIIHTGEKPYKCKECGKAFKHSSTLTKHKIIHTGEKPYKCKECEKAFNQSSKLTEHKKIHTGEKPYECEKCGKAFNQSSNLTRHKKSHTEEKPYKCEECGKGFKWPSTLTIHKIIHTGEKPYKCEECGKAFNQSSKLTKHKKIHTGEKPYTCEECGKAFNQSSNLTKHKRIHTGEKPYKCEECDKAFKWSSVLTKHKIIHTGEKLQI

SEQ ID NO: 10096 - protein, 87 aa, Homo sapiens
MGPLTFRDVAIEFSLKEWQCLDTAQRNLYRNVMLENYRNLVFLGITVSKPDLITCLEQGKEAWSMKRHEIMVAKPTESYSVTQSGMQ

SEQ ID NO: 10097 - protein, 154 aa, Homo sapiens
MVEKKTSVRSQDPGQRRVLDRAARQRRINRQLEALENDNFQDDPHAGLPQLGKRLPQFDDDADTGKKKKKTRGDHFKLRFRKNFQALLEEQNLSVAEGPNYLTACAGPPSRPQRPFCAVCGFPSPYTCVSCGARYCTVRCLGTHQETRCLKWTV

SEQ ID NO: 10098 - protein, 903 aa, Homo sapiens
MAASRSTRVTRSTVGLNGLDESFCGRTLRNRSIAHPEEISSNSQVRSRSPKKRPEPVPIQKGNNNGRTTDLKQQSTRESWVSPRKRGLSSSEKDNIERQAIENCERRQTEPVSPVLKRIKRCLRSEAPNSSEEDSPIKSDKESVEQRSTVVDNDADFQGTKRACRCLILDDCEKREIKKVNVSEEGPLNSAVVEEITGYLAVNGVDDSDSAVINCDDCQPDGNTKQNSIGSYVLQEKSVAENGDTDTQTSMFLDSRKEDSYIDHKVPCTDSQVQVKLEDHKIVTACLPVEHVNQLTTEPATGPFSETQSSLRDSEEEVDVVGDSSASKEQCKENTNNELDTSLESMPASGEPEPSPVLDCVSAQMMSLSEPQEHRYTLRTSPRRAAPTRGSPTKNSSPYRENGQFEENNLSPNETNATVSDNVSQSPTNPGEISQNEKGICCDSQNNGSEGVSKPPSEARLNIGHLPSAKESASQHITEEEDDDPDVYYFESDHVALKHNKDYQRLLQTIAVLEAQRSQAVQDLESLGRHQREALKNPIGFVEKLQKKADIGLPYPQRVVQLPEIVWDQYTHSLGNFEREFKNRKRHTRRVKLVFDKVGLPARPKSPLDPKKDGESLSYSMLPLSDGPEGSSSRPQMIRGRLCDDTKPETFNQLWTVEEQKKLEQLLIKYPPEEVESRRWQKIADELGNRTAKQVASRVQKYFIKLTKAGIPVPGRTPNLYIYSKKSSTSRRQHPLNKHLFKPSTFMTSHEPPVYMDEDDDRSCFHSHMNTAVEDASDDESIPIMYRNLPEYKELLQFKKLKKQKLQQMQAESGFVQHVGFKCDNCGIEPIQGVRWHCQDCPPEMSLDFCDSCSDCLHETDIHKEDHQLEPIYRSETFLDRDYCVSQGTSYNYLDPNYFPANR

SEQ ID NO: 10099 - protein, 902 aa, Homo sapiens
MAASRSTRVTRSTVGLNGLDESFCGRTLRNRSIAHPEEISSNSQVRSRSPKKRPEPVPIQKGNNNGRTTDLKQQSTRESWVSPRKRGLSSSEKDNIERQAIENCERRQTEPVSPVLKRIKRCLRSEAPNSSEEDSPIKSDKESVEQRSTVVDNDADFQGTKRACRCLILDDCEKREIKKVNVSEEGPLNSAVVEEITGYLAVNGVDDSDSAVINCDDCQPDGNTKQNSIGSYVLQEKSVAENGDTDTQTSMFLDSRKEDSYIDHKVPCTDSQVQVKLEDHKIVTACLPVEHVNQLTTEPATGPFSETQSSLRDSEEEVDVVGDSSASKEQCKENTNNELDTSLESMPASGEPEPSPVLDCVSAQMMSLSEPQEHRYTLRTSPRRAAPTRGSPTKNSSPYRENGQFEENNLSPNETNATVSDNVSQSPTNPGEISQNEKGICCDSQNNGSEGVSKPPSEARLNIGHLPSAKESASQHITEEEDDDPDVYYFESDHVALKHNKDYQRLLQTIAVLEAQRSQAVQDLESLGRHQREALKNPIGFVEKLQKKADIGLPYPQRVVQLPEIVWDQYTHSLGNFEREFKNRKRHTRRVKLVFDKGLPARPKSPLDPKKDGESLSYSMLPLSDGPEGSSSRPQMIRGRLCDDTKPETFNQLWTVEEQKKLEQLLIKYPPEEVESRRWQKIADELGNRTAKQVASRVQKYFIKLTKAGIPVPGRTPNLYIYSKKSSTSRRQHPLNKHLFKPSTFMTSHEPPVYMDEDDDRSCFHSHMNTAVEDASDDESIPIMYRNLPEYKELLQFKKLKKQKLQQMQAESGFVQHVGFKCDNCGIEPIQGVRWHCQDCPPEMSLDFCDSCSDCLHETDIHKEDHQLEPIYRSETFLDRDYCVSQGTSYNYLDPNYFPANR

SEQ ID NO: 10100 - protein, 409 aa, Homo sapiens
MIDLWLYSYQRLLQTIAVLEAQRSQAVQDLESLGRHQREALKNPIGFVEKLQKKADIGLPYPQRVVQLPEIVWDQYTHSLGNFEREFKNRKRHTRRVKLVFDKVGLPARPKSPLDPKKDGESLSYSMLPLSDGPEGSSSRPQMIRGRLCDDTKPETFNQLWTVEEQKKLEQLLIKYPPEEVESRRWQKIADELGNRTAKQVASRVQKYFIKLTKAGIPVPGRTPNLYIYSKKSSTSRRQHPLNKHLFKPSTFMTSHEPPVYMDEDDDRSCFHSHMNTAVEDASDDESIPIMYRNLPEYKELLQFKKLKKQKLQQMQAESGFVQHVGFKCDNCGIEPIQGVRWHCQDCPPEMSLDFCDSCSDCLHETDIHKEDHQLEPIYRSETFLDRDYCVSQGTSYNYLDPNYFPANR

SEQ ID NO: 10101 - protein, 683 aa, Homo sapiens
MAASRSTRVTRSTVGLNGLDESFCGRTLRNRSIAHPEEISSNSQVRSRSPKKRPEPVPIQKGNNNGRTTDLKQQSTRESWVSPRKRGLSSSEKDNIERQAIENCERRQTEPVSPVLKRIKRCLRSEAPNSSEEDSPIKSDKESVEQRSTVVDNDADFQGTKRACRCLILDDCEKREIKKVNVSEEGPLNSAVVEEITGYLAVNGVDDSDSAVINCDDCQPDGNTKQNSIGSYVLQEKSVAENGDTDTQTSMFLDSRKEDSYIDHKVPCTDSQVQVKLEDHKIVTACLPVEHVNQLTTEPATGPFSETQSSLRDSEEEVDVVGDSSASKEQCKENTNNELDTSLESMPASGEPEPSPVLDCVSAQMMSLSEPQEHRYTLRTSPRRAAPTRGSPTKNSSPYRENGQFEENNLSPNETNATVSDNVSQSPTNPGEISQNEKGICCDSQNNGSEGVSKPPSEARLNIGHLPSAKESASQHITEEEDDDPDVYYFESDHVALKHNKDYQRLLQTIAVLEAQRSQAVQDLESLGRHQREALKNPIGFVEKLQKKADIGLPYPQRVVQLPEIVWDQYTHSLGNFEREFKNRKRHTRRVKLVFDKVGLPARPKSPLDPKKDGESLSYSMLPLSDGPEGSSSRPQMIRGRLCDDTKPETFNQLWTVEEQVINISKSCRLKKTSKQLTSESVL

SEQ ID NO: 10102 - protein, 429 aa, Homo sapiens
MPLCRPEHLMPRASRVPVAASLPLSHAVIPTQLPSRPGHRPPGRPRRCPKASCLPPPVGPSSTQTAKRVTMGWPRPGRALVAVKALLVLSLLQVPAQAVVRAVLEDNSSSVDFADLPALFGVPLAPEGIRGYLMEVKPANACHPIEAPRLGNRSLGAIVLIRRYDCTFDLKVLNAQRAGFEAAIVHNVHSDDLVSMTHVYEDLRGQIAIPSVFVSEAASQDLRVILGCNKSAHALLLPDDPPCHDLGCHPVLTVSWVLGCTLALVVSAFFVLNHLWLWAQACCSHRRPVKTSTCQKAQVRTFTWHNDLCAICLDEYEEGDQLKILPCSHTYHCKCIDPWFSQAPRRSCPVCKQSVAATEDSFDSTTYSFRDEDPSLPGHRPPIWAIQVQLRSRRLELLGRASPHCHCSTTSLEAEYTTVSSAPPEAPGQ

SEQ ID NO: 10103 - protein, 459 aa, Homo sapiens
MAASGAVEPGPPGAAVAPSPAPAPPPAPDHLFRPISAEDEEQQPTEIESLCMNCYCNGMTRLLLTKIPFFREIIVSSFSCEHCGWNNTEIQSAGRIQDQGVRYTLSVRALEDMNREVVKTDSAATRIPELDFEIPAFSQKGALTTVEGLITRAISGLEQDQPARRANKDATAERIDEFIVKLKELKQVASPFTLIIDDPSGNSFVENPHAPQKDDALVITHYNRTRQQEEMLGLQEEAPAEKPEEEDLRNEVLQFSTNCPECNAPAQTNMKLVQIPHFKEVIIMATNCENCGHRTNEVKSGGAVEPLGTRITLHITDASDMTRDLLKSETCSVEIPELEFELGMAVLGGKFTTLEGLLKDIRELVTKNPFTLGDSSNPGQTERLQEFSQKMDQIIEGNMKAHFIMDDPAGNSYLQNVYAPEDDPEMKVERYKRTFDQNEELGLNDMKTEGYEAGLAPQR

SEQ ID NO: 10104 - protein, 803 aa, Homo sapiens
MEIPKLLPARGTLQGGGGGGIPAGGGRVHRGPDSPAGQVPTRRLLLLRGPQDGGPGRRREEASTASRGPGPSLLAPRTDQPSGGGGGGGDDFFLVLLDPVGGDVETAGSGQAAGPVLREEAEEGPGLQGGESGANPAGPTALGPRCLSAVPTPAPISAPGPAAAFAGTVTIHNQDLLLRFENGVLTLATPPPHAWEPGAAPAQQPGCLIAPQAGFPHAAHPGDCPELPPDLLLAEPAEPAPAPAPEEEAEGPAAALGPRGPLGSGPGVVLYLCPEAQCGQTFAKKHQLKVHLLTHSSSQGQRPFKCPLGGCGWTFTTSYKLKRHLQSHDKLRPFGCPAEGCGKSFTTVYNLKAHMKGHEQENSFKCEVCEESFPTQAKLSAHQRSHFEPERPYQCAFSGCKKTFITVSALFSHNRAHFREQELFSCSFPGCSKQYDKACRLKIHLRSHTGERPFLCDFDGCGWNFTSMSKLLRHKRKHDDDRRFMCPVEGCGKSFTRAEHLKGHSITHLGTKPFVCPVAGCCARFSARSSLYIHSKKHLQDVDTWKSRCPISSCNKLFTSKHSMKTHMVKRHKVGQDLLAQLEAANSLTPSSELTSQRQNDLSDAEIVSLFSDVPDSTSAALLDTALVNSGILTIDVASVSSTLAGHLPANNNNSVGQAVDPPSLMATSDPPQSLDTSLFFGTAATGFQQSSLNMDEVSSVSVGPLGSLDSLAMKNSSPEPQALTPSSKLTVDTDALTPSSTLCENSVSELLTPTKAEWNVHPDSDFFGQEGETQFGFPNAAGNHGSQKETDLITVTGSSFLV

SEQ ID NO: 10105 - protein, 540 aa, Homo sapiens
MWLLRCVLLCVSLSLAVSGQHKPEAPDYSSVLHCGPWSFQFAVNLNQEATSPPVLIAWDNQGLLHELQNDSDCGTWIRKGPGSSVVLEATYSSCYVTEWDSHYIMPVGVEGAGAAEHKVVTERKLLKCPMDLLARDAPDTDWCDSIPARDRLPCAPSPISRGDCEGLGCCYSSEEVNSCYYGNTVTLHCTREGHFSIAVSRNVTSPPLLLDSVRLALRNDSACNPVMATQAFVLFQFPFTSCGTTRQITGDRAVYENELVATRDVKNGSRGSVTRDSIFRLHVSCSYSVSSNSLPINVQVFTLPPPFPETQPGPLTLELQIAKDKNYGSYYGVGDYPVVKLLRDPIYVEVSILHRTDPYLGLLLQQCWATPSTDPLSQPQWPILVKGCPYIGDNYQTQLIPVQKALDLPFPSHHQRFSIFTFSFVNPTVEKQALRGPVHLHCSVSVCQPAETPSCVVTCPDLSRRRNFDNSSQNTTASVSSKGPMILLQATKDPPEKLRVPVDSKVLWVAGLSGTLILGALLVSYLAVKKQKSCPDQMCQ

SEQ ID NO: 10106 - protein, 1079 aa, Homo sapiens
MPRVHNIKKSLTPHISCVTNESDNLLDFLPDRLRAKLLPFQKDGIIFALKRNGRCMVADEMGLGKTIQAIGITYFYKEEWPLLIVVPSSLRYPWTEEIEKWIPELSPEEINVIQNKTDVRRMSTSKVTVLGYGLLTADAKTLIDALNNQNFKVVIVDESHYMKSRNATRSRILLPIVQKARRAILLTGTPALGRPEELFMQIEALFPQKFGRWTDYAKRYCNAHIRYFGKRPQWDCRGASNLNELHQLLSDIMIRRLKTEVLTQLPPKVRQRIPFDLPSAAAKELNTSFEEWEKIMRTPNSGAMETVMGLITRMFKQTAIAKAGAVKDYIKMMLQNDSLKFLVFAHHLSMLQACTEAVIENKTRYIRIDGSVSSSERIHLVNQFQKDPDTRVAILSIQAAGQGLTFTAASHVVFAELYWDPGHIKQAEDRAHRIGQCSSVNIHYLIANGTLDTLMWGMLNRKAQVTGSTLNGRKEKIQAEEGDKEKWDFLQFAEAWTPNDSSEELRKEALFTHFEKEKQHDIRSFFVPQPKKRQLMTSCDESKRFREENTVVSSDPTKTAARDIIDYESDVEPETKRLKLAASEDHCSPSEETPSQSKQIRTPLVESVQEAKAQLTTPAFPVEGWQCSLCTYINNSELPYCEMCETPQGSAVMQIDSLNHIQDKNEKDDSQKDTSKKVQTISDCEKQALAQSEPGQLADSKEETPKIEKEDGLTSQPGNEQWKSSDTLPVYDTLMFCASRNTDRIHIYTKDGKQMSCNFIPLDIKLDLWEDLPASFQLKQYRSLILRFVREWSSLTAMKQRIIRKSGQLFCSPILALEEITKQQTKQNCTKRYITKEDVAVASMDKVKNVGGHVRLITKESRPRDPFTKKLLEDGACVPFLNPYTVQADLTVKPSTSKGYLQAVDNEGNPLCLRCQQPTCQTKQACKANSWDSRFCSLKCQEEFWIRSNNSYLRAKVFETEHGVCQLCNVNAQELFLRLRDAPKSQRKNLLYATWTSKLPLEQLNEMIRNPGEGHFWQVDHIKPVYGGGGQCSLDNLQTLCTVCHKERTARQAKERSQVRRQSLASKHGSDITRFLVKK

SEQ ID NO: 10107 - protein, 598 aa, Homo sapiens
MTSCDESKRFREENTVVSSDPTKTAARDIIDYESDVEPETKRLKLAASEDHCSPSEETPSQSKQIRTPLVESVQEAKAQLTTPAFPVEGWQCSLCTYINNSELPYCEMCETPQGSAVMQIDSLNHIQDKNEKDDSQKDTSKKVQTISDCEKQALAQSEPGQLADSKEETPKIEKEDGLTSQPEQWKSSDTLPVYDTLMFCASRNTDRIHIYTKDGKQMSCNFIPLDIKLDLWEDLPASFQLKQYRSLILRFVREWSSLTAMKQRIIRKSGQLFCSPILALEEITKQQTKQNCTKRYITKEDVAVASMDKVKNVGGHVRLITKESRPRDPFTKKLLEDGACVPFLNPYTVQADLTVKPSTSKGYLQAVDNEGNPLCLRCQQPTCQTKQACKANSWDSRFCSLKCQEEFWIRSNNSYLRAKVFETEHGVCQLCNVNAQELFLRLRDAPKSQRKNLLYATWTSKLPLEQLNEMIRNPGEGHFWQVDHIKPVYGGGGQCSLDNLQTLCTVCHKERTARQAKERSQVRRQSLASKHGSDITRFLETSKLHESHKVTGAEQGLQVSGLPDSAAPEGGAAHTNDQRRCQRMKQPLTEVQILSHSS

SEQ ID NO: 10108 - protein, 1077 aa, Homo sapiens
MPRVHNIKKSLTPHISCVTNESDNLLDFLPDRLRAKLLPFQKDGIIFALKRNGRCMVADEMGLGKTIQAIGITYFYKEEWPLLIVVPSSLRYPWTEEIEKWIPELSPEEINVIQNKTDVRRMSTSKVTVLGYGLLTADAKTLIDALNNQNFKVVIVDESHYMKSRNATRSRILLPIVQKARRAILLTGTPALGRPEELFMQIEALFPQKFGRWTDYAKRYCNAHIRYFGKRPQWDCRGASNLNELHQLLSDIMIRRLKTEVLTQLPPKVRQRIPFDLPSAAAKELNTSFEEWEKIMRTPNSGAMETVMGLITRMFKQTAIAKAGAVKDYIKMMLQNDSLKFLVFAHHLSMLQACTEAVIENKTRYIRIDGSVSSSERIHLVNQFQKDPDTRVAILSIQAAGQGLTFTAASHVVFAELYWDPGHIKQAEDRAHRIGQCSSVNIHYLIANGTLDTLMWGMLNRKAQVTGSTLNGRKEKIQAEEGDKEKWDFLQFAEAWTPNDSSEELRKEALFTHFEKEKQHDIRSFFVPQPKKRQLMTSCDESKRFREENTVVSSDPTKTAARDIIDYESDVEPETKRLKLAASEDHCSPSEETPSQSKQIRTPLVESVQEAKAQLTTPAFPVEGWQCSLCTYINNSELPYCEMCETPQGSAVMQIDSLNHIQDKNEKDDSQKDTSKKVQTISDCEKQALAQSEPGQLADSKEETPKIEKEDGLTSQPEQWKSSDTLPVYDTLMFCASRNTDRIHIYTKDGKQMSCNFIPLDIKLDLWEDLPASFQLKQYRSLILRFVREWSSLTAMKQRIIRKSGQLFCSPILALEEITKQQTKQNCTKRYITKEDVAVASMDKVKNVGGHVRLITKESRPRDPFTKKLLEDGACVPFLNPYTVQADLTVKPSTSKGYLQAVDNEGNPLCLRCQQPTCQTKQACKANSWDSRFCSLKCQEEFWIRSNNSYLRAKVFETEHGVCQLCNVNAQELFLRLRDAPKSQRKNLLYATWTSKLPLEQLNEMIRNPGEGHFWQVDHIKPVYGGGGQCSLDNLQTLCTVCHKERTARQAKERSQVRRQSLASKHGSDITRFLVKK

SEQ ID NO: 10109 - protein, 435 aa, Homo sapiens
MCETPQGSAVMQIDSLNHIQDKNEKDDSQKDTSKKVQTISDCEKQALAQSEPGQLADSKEETPKIEKEDGLTSQPEQWKSSDTLPVYDTLMFCASRNTDRIHIYTKDGKQMSCNFIPLDIKLDLWEDLPASFQLKQYRSLILRFVREWSSLTAMKQRIIRKSGQLFCSPILALEEITKQQTKQNCTKRYITKEDVAVASMDKVKNVGGHVRLITKESRPRDPFTKKLLEDGACVPFLNPYTVQADLTVKPSTSKGYLQAVDNEGNPLCLRCQQPTCQTKQACKANSWDSRFCSLKCQEEFWIRSNNSYLRAKVFETEHGVCQLCNVNAQELFLRLRDAPKSQRKNLLYATWTSKLPLEQLNEMIRNPGEGHFWQVDHIKPVYGGGGQCSLDNLQTLCTVCHKERTARQAKERSQVRRQSLASKHGSDITRFLVKK

SEQ ID NO: 10110 - protein, 368 aa, Homo sapiens
MGLGKTIQAIGITYFYKEEWPLLIVVPSSLRYPWTEEIEKWIPELSPEEINVIQNKTDVRRMSTSKVTVLGYGLLTADAKTLIDALNNQNFKVVIVDESHYMKSRNATRSRILLPIVQKARRAILLTGTPALGRPEELFMQIEALFPQKFGRWTDYAKRYCNAHIRYFGKRPQWDCRGASNLNELHQLLSDIMIRRLKTEVLTQLPPKVRQRIPFDLPSAAAKELNTSFEEWEKIMRTPNSGAMETVMGLITRMFKQTAIAKAGAVKDYIKMMLQNDSLKFLVFAHHLSMLQACTEAVIENKTRYIRIDGSVSSSERIHLVNQFQKDPDTRVAILSIQAAGQDLYDKVAWGKRTLVSGLFMECFCFVP

SEQ ID NO: 10111 - protein, 858 aa, Homo sapiens
MDLPALLPAPTARGGQHGGGPGPLRRAPAPLGASPARRRLLLVRGPEDGGPGARPGEASGPSPPPAEDDSDGDSFLVLLEVPHGGAAAEAAGSQEAEPGSRVNLASRPEQGPSGPAAPPGPGVAPAGAVTISSQDLLVRLDRGVLALSAPPGPATAGAAAPRRAPQASGPSTPGYRCPEPQCALAFAKKHQLKVHLLTHGGGQGRRPFKCPLEGCGWAFTTSYKLKRHLQSHDKLRPFGCPVGGCGKKFTTVYNLKAHMKGHEQESLFKCEVCAERFPTHAKLSSHQRSHFEPERPYKCDFPGCEKTFITVSALFSHNRAHFREQELFSCSFPGCSKQYDKACRLKIHLRSHTGERPFICDSDSCGWTFTSMSKLLRHRRKHDDDRRFTCPVEGCGKSFTRAEHLKGHSITHLGTKPFECPVEGCCARFSARSSLYIHSKKHVQDVGAPKSRCPVSTCNRLFTSKHSMKAHMVRQHSRRQDLLPQLEAPSSLTPSSELSSPGQSELTNMDLAALFSDTPANASGSAGGSDEALNSGILTIDVTSVSSSLGGNLPANNSSLGPMEPLVLVAHSDIPPSLDSPLVLGTAATVLQQGSFSVDDVQTVSAGALGCLVALPMKNLSDDPLALTSNSNLAAHITTPTSSSTPRENASVPELLAPIKVEPDSPSRPGAVGQQEGSHGLPQSTLPSPAEQHGAQDTELSAGTGNFYLESGGSARTDYRAIQLAKEKKQRGAGSNAGASQSTQRKIKEGKMSPPHFHASQNSWLCGSLVVPSGGRPGPAPAAGVQCGAQGVQVQLVQDDPSGEGVLPSARGPATFLPFLTVDLPVYVLQEVLPSSGGPAGPEATQFPGSTINLQDLQ

SEQ ID NO: 10112 - protein, 710 aa, Homo sapiens
MDLPALLPAPTARGGQHGGGPGPLRRAPAPLGASPARRRLLLVRGPEDGGPGARPGEASGPSPPPAEDDSDGDSFLVLLEVPHGGAAAEAAGSQEAEPGSRVNLASRPEQGPSGPAAPPGPGVAPAGAVTISSQDLLVRLDRGVLALSAPPGPATAGAAAPRRAPQASGPSTPGYRCPEPQCALAFAKKHQLKVHLLTHGGGQGRRPFKCPLEGCGWAFTTSYKLKRHLQSHDKLRPFGCPVGGCGKKFTTVYNLKAHMKGHEQESLFKCEVCAERFPTHAKLSSHQRSHFEPERPYKCDFPGCEKTFITVSALFSHNRAHFREQELFSCSFPGCSKQYDKACRLKIHLRSHTGERPFICDSDSCGWTFTSMSKLLRHRRKHDDDRRFTCPVEGCGKSFTRAEHLKGHSITHLGTKPFECPVEGCCARFSARSSLYIHSKKHVQDVGAPKSRCPVSTCNRLFTSKHSMKAHMVRQHSRRQDLLPQLEAPSSLTPSSELSSPGQSELTNMDLAALFSDTPANASGSAGGSDEALNSGILTIDVTSVSSSLGGNLPANNSSLGPMEPLVLVAHSDIPPSLDSPLVLGTAATVLQQGSFSVDDVQTVSAGALGCLVALPMKNLSDDPLALTSNSNLAAHITTPTSSSTPRENASVPELLAPIKVEPDSPSRPGAVGQQEGSHGLPQSTLPSPAEQHGAQDTELSAGTGNFYLV

SEQ ID NO: 10113 - protein, 452 aa, Homo sapiens
MKGHEQESLFKCEVCAERFPTHAKLSSHQRSHFEPERPYKCDFPGCEKTFITVSALFSHNRAHFREQELFSCSFPGCSKQYDKACRLKIHLRSHTGERPFICDSDSCGWTFTSMSKLLRHRRKHDDDRRFTCPVEGCGKSFTRAEHLKGHSITHLGTKPFECPVEGCCARFSARSSLYIHSKKHVQDVGAPKSRCPVSTCNRLFTSKHSMKAHMVRQHSRRQDLLPQLEAPSSLTPSSELSSPGQSELTNMDLAALFSDTPANASGSAGGSDEALNSGILTIDVTSVSSSLGGNLPANNSSLGPMEPLVLVAHSDIPPSLDSPLVLGTAATVLQQGSFSVDDVQTVSAGALGCLVALPMKNLSDDPLALTSNSNLAAHITTPTSSSTPRENASVPELLAPIKVEPDSPSRPGAVGQQEGSHGLPQSTLPSPAEQHGAQDTELSAGTGNFYLV

SEQ ID NO: 10114 - protein, 496 aa, Homo sapiens
MAANCTSSWSLGESCNRPGLELPRSMASSETQLGNHDVDPEISHVNFRMFSCPKESDPIQALRKLTELCHLWLRPDLHTKEQILDMLVMEQFMISMPQELQVLVMMNGVQSCKDLEDLLRNNRRPKKWSVVTFHGKEYIVQDSDIEMAEAPSSVRDDLKDVSSQRASSVNQMRPGEGQAHRELQILPRVPALSRRQGEDFLLHKSIDVTGDPKSLRPKQTLEKDLKENREENPGLTSPEPQLPKSPTDLVRAKEGKDPPKIASVENVDADTPSACVVEREASTHSGNRGDALNLSSPKRSKPDASSISQEEPQGEATPVGNRESPGQAGMNSIHSPGPASPVSHPDGQEAKALPPFACDVCEKRFTCNSKLVIHKRSHTGERLFQCNLCGKRFMQLISLQFHQRTHTGERPYTCDVCQKQFTQKSYLKCHKRSHTGEKPFECKDCKKVFTYRGSLKEHQRIHSGEKPYKCSKCPRAFSRLKLLRRHQKTHPEATSQ

SEQ ID NO: 10115 - protein, 379 aa, Homo sapiens
MIVRPPQPRETSVVTFHGKEYIVQDSDIEMAEAPSSVRDDLKDVSSQRASSVNQMRPGEGQAHRELQILPRVPALSRRQGEDFLLHKSIDVTGDPKSLRPKQTLEKDLKENREENPGLTSPEPQLPKSPTDLVRAKEGKDPPKIASVENVDADTPSACVVEREASTHSGNRGDALNLSSPKRSKPDASSISQEEPQGEATPVGNRESPGQAGMNSIHSPGPASPVSHPDGQEAKALPPFACDVCEKRFTCNSKLVIHKRSHTGERLFQCNLCGKRFMQLISLQFHQRTHTGERPYTCDVCQKQFTQKSYLKCHKRSHTGEKPFECKDCKKVFTYRGSLKEHQRIHSGEKPYKCSKCPRAFSRLKLLRRHQKTHPEATSQ

SEQ ID NO: 10116 - protein, 496 aa, Homo sapiens
MAANCTSSWSLGESCNSPGSEPPQSMPSPATQLGNHDSDPETCHVNFRMFSCPKESDPIQALRKLTELCHLWLRPDLHTKEQILDMLVMEQFMISMPQELQVLVMMNGVQSCKDLEDLLRNNRRPKKWSVVSFLGKEYLMQESDVEMAEAPASVRDDPRHVSSQRTSSVNQMCPEEGQASQELQTLPRVPALFRRQEEDFLLPETTVMKGDPKALRPKPTLEKDLEEDREENPGLTSPEPQLPNSPTGVVGAKEGKEPQKRASVENVDADTPSACVVEREASTHSGSRGDALNLRGLKRSKPDATSISQEEPQGEATPVGNRESPGQAEINPVHSPGPAGPVSHPSGQEVKELLPFACEVCGKRFKYRGKLAVHTRSHTGERLFQCNLCGKRFMQRIGLQFHQRTHTGERPYTCDICQKQFTQKSYLKCHKRSHTGEKPFECKDCKKVFTYKANLKEHQRIHSGEKPHKCSKCPRAFGRPATLRRHQKTHREATSQ

SEQ ID NO: 10117 - protein, 1185 aa, Homo sapiens
MADGGEREELLSPSPVSPAKRQCSWPSPQAHHPRGSPGAAGGGAGGVGSSCLVLGARPHLQPDSLLDCAAKTVAEKWAYERVEERFERIPEPVQRRIVYWSFPRNEREICMYSSFQYRGGPGAGAAGGAAGASPAEEGPQPPPGAAAPAGSAPGGVAAGASPGLGAGAGAAGCGGEGLPFRRGIRLLDSGSVENVLQVGFHLSGTVTELATASEPAVTYKVAISFDRCKITSVTCGCGNKDIFYCAHVVALSLYRIRKPDQVKLRLPISETLFQMNRDQLQKFIQYLITAHHTEVLPTAQKLADEILSSNSEINQVNGAPDPTAGASIDDENCWHLDEEQVKEQVKLFLSQGGYCGSGKQLNSMFAKVREMLRMRDSNGARMLTLITEQFVADPRLTLWRQQGTNMTDKCRQLWDELGALWVCIILNPHCKLEEKSCWLQQLQKWSDLDVCPLEDGNYGHELPNITNALPQSAIHSPDSLSRPRRTVFTRAIEGRELHWQDSHLQRIISSDVYTAPACQRESERLLFNSQGQPLWLEHVPTACARVDALRSHGYPKEALRLTVAIINTLRLQQQRQLEIYKHQKKELLQRGTTTITNLEGWVGHPLDPIDCLFLTLTEACRLNDDGYLEMSDMNESRPPVYQHVPVAAGSPNSSESYLSLALEVALMGLGQQRLMPEGLYAQDKVCRNEEQLLSQLQELQLDDELVQTLQKQCILLLEGGPFSGLGEVIHRESVPMHTFAKYLFSALLPHDPDLSYKLALRAMRLPVLENSASAGDTSHPHHMVSVVPSRYPRWFTLGHLESQQCELASTMLTAAKGDTLRLRTILEAIQKHIHSSSLIFKLAQDAFKIATPTDSSTDSTLLNVALELGLQVMRMTLSTLNWRRREMVRWLVTCATEVGVRALVSILQSWYTLFTPTEATSIVAATAVSHTTILRLSLDYPQREELASCARTLALQCAMKDPQSCALSALTLCEKDHIAFEAAYQIAIDAAAGGMTHSQLFTIARYMELRGYPLRAFKLASLAMSHLNLAYNQDTHPAINDVLWACALSHSLGKNELAALIPLVVKSVHCATVLSDILRRCTVTAPGLAGIPGRRSSGKLMSTDKAPLRQLLDATINAYINTTHSRLTHISPRHYGEFIEFLSKARETFLLPQDGHLQFAQFIDNLKQIYKGKKKLMLLVRERFG

SEQ ID NO: 10118 - protein, 408 aa, Homo sapiens
MLPRPKAPASPRRPQTPTPSEQDADPGPASPRDTEAQRLRFRQFQYHVASGPHLALGQLWTLCRQWLRPEARSKEQMLELLVLEQFLGALPSKMRTWVQSQGPRSCREAASLVEDLTQMCQQEVLVSLDSVEPQDWSFGEEEDGKSPRSQKEPSQASELILDAVAAAPALPEESEWLETTQLQQSLHTRAEAEAPRAPGLLGSRARLPLKPSIWDEPEDLLAGPSSDLRAEGTVISSPKGPSAQRISPRRRNRNTDQSGRHQPSLKHTKGGTQEAVAGISVVPRGPRGGRPFQCADCGMVFTWVTHFIEHQKTHREEGPFPCPECGKVFLHNSVLTEHGKIHLLEPPRKKAPRSKGPRESVPPRDGAQGPVAPRSPKRPFQCSVCGKAFPWMVHLIDHQKLHTAHGHM

SEQ ID NO: 10119 - protein, 178 aa, Homo sapiens
MLPRPKAPASPRRPQTPTPSEQDADPGPASPRDTEAQRLRFRQFQYHVASGPHLALGQLWTLCRQWLRPEARSKEQMLELLVLEQFLGALPSKMRTWVQSQGPRSCREAASLVEDLTQMCQQEGERRRLRAPGRARGPDVSEDRTALLPAHIAPTPARPLPTSKPLLPRGCVFNYFYI

SEQ ID NO: 10120 - protein, 614 aa, Homo sapiens
MMAADIPRVTTPLSSLVQVPQEEDRQEEEVTTMILEDDSWVQEAVLQEDGPESEPFPQSAGKGGPQEEVTRGPQGALGRLRELCRRWLRPEVHTKEQMLTMLPKEIQAWLQEHRPESSEEAAALVEDLTQTLQDSDFEIQSENGENCNQDMFENESRKIFSEMPEGESAQHSDGESDFERDAGIQRLQGHSPGEDHGEVVSQDREVGQLIGLQGTYLGEKPYECPQCGKTFSRKSHLITHERTHTGEKYYKCDECGKSFSDGSNFSRHQTTHTGEKPYKCRDCGKSFSRSANLITHQRIHTGEKPFQCAECGKSFSRSPNLIAHQRTHTGEKPYSCPECGKSFGNRSSLNTHQGIHTGEKPYECKECGESFSYNSNLIRHQRIHTGEKPYKCTDCGQRFSQSSALITHRRTHTGEKPYQCSECGKSFSRSSNLATHRRTHMVEKPYKCGVCGKSFSQSSSLIAHQGMHTGEKPYECLTCGESFSWSSNLLKHQRIHTGEKPYKCSECGKCFSQRSQLVVHQRTHTGEKPYKCLMCGKSFSRGSILVMHQRAHLGDKPYRCPECGKGFSWNSVLIIHQRIHTGEKPYKCPECGKGFSNSSNFITHQRTHMKEKLY

SEQ ID NO: 10121 - protein, 150 aa, Homo sapiens
MMAADIPRVTTPLSSLVQVPQEEDRQEEEVTTMILEDDSWVQEAVLQEDGPESEPFPQSAGKGGPQEEVTRGPQGALGRLRELCRRWLRPEVHTKEQMLTMLPKEIQAWLQEHRPESSEEAAALVEDLTQTLQDSAVAVVASLPVEVTSL

SEQ ID NO: 10122 - protein, 146 aa, Homo sapiens
MMAADIPRVTTPLSSLVQVPQEEDRQEEEVTTMILEDDSWVQEAVLQEDGPESEPFPQSAGKGGPQEEVTRGPQGALGRLRELCRRWLRPEVHTKEQMLTMLPKEIQAWLQEHRPESSEEAAALVEDLTQTLQDSETASCVHGCPV

SEQ ID NO: 10123 - protein, 429 aa, Homo sapiens
MAQAPADPGREGHLEQRILQVLTEAGSPVKLAQLVKECQAPKRELNQVLYRMKKELKVSLTSPATWCLGGTDPEGEGPAELALSSPAERPQQHAATIPETPGPQFSQQREEDIYRFLKDNGPQRALVIAQALGMRTAKDVNRDLYRMKSRHLLDMDEQSKAWTIYRPEDSGRRAKSASIIYQHNPINMICQNGPNSWISIANSEAIQIGHGNIITRQTVSREDGSAGPRHLPSMAPGDSSTWGTLVDPWGPQDIHMEQSILRRVQLGHSNEMRLHGVPSEGPAHIPPGSPPVSATAAGPEASFEARIPSPGTHPEGEAAQRIHMKSCFLEDATIGNSNKMSISPGVAGPGGVAGSGEGEPGEDAGRRPADTQSRSHFPRDIGQPITPSHSKLTPKLETMTLGNRSHKAAEGSHYVDEASHEGSWWGGGI

SEQ ID NO: 10124 - protein, 446 aa, Homo sapiens
MAQAPADPGREGHLEQRILQVLTEAGSPVKLAQLVKECQAPKRELNQVLYRMKKELKVSLTSPATWCLGGTDPEGEGPAELALSSPAERPQQHAATIPETPGPQFSQQREEDIYRFLKDNGPQRALVIAQALGMRTAKDVNRDLYRMKSRHLLDMDEQSKAWTIYRPEDSGRRAKSASIIYQHNPINMICQNGPNSWISIANSEAIQIGHGNIITRQTVSREDGSAGPRHLPSMAPGDSSTWGTLVDPWGPQDIHMEQSILRRVQLGHSNEMRLHGVPSEGPAHIPPGSPPVSATAAGPEASFEARIPSPGTHPEGEAAQRIHMKSCFLEDATIGNSNKMSISPGVAGPGGVAGSGEGEPGEDAVAAFTEVLNPSKSFMKFGINFFQTPVNVDSLTSSHESQMFLTACRLVIFSRRFSTYFAQIHLRNHSVLHLCPHKIYLLKNKK

SEQ ID NO: 10125 - protein, 380 aa, Homo sapiens
MAQAPADPGREGHLEQRILQVLTEAGSPVKLAQLVKECQAPKRELNQVLYRMKKELKVSLTSPATWCLGGTDPEGEGPAELALSSPAERPQQHAATIPETPGPQFSQQREEDIYRFLKDNGPQRALVIAQALGMRTAKDVNRDLYRMKSRHLLDMDEQSKAWTIYRPEDSGRRAKSASIIYQHNPINMICQNGPNSWISIANSEAIQIGHGNIITRQTVSREDGSAGPRHLPSMAPGDSSTWGTLVDPWGPQDIHMEQSILRRVQLGHSNEMRLHGVPSEGPAHIPPGSPPVSATAAGPEASFEARIPSPGTHPEGEAAQRIHMKSCFLEDATIGNSNKMSISPGVAGPGGVAGSGEGEPGEDAGRRPADTQSRSFDGQE

SEQ ID NO: 10126 - protein, 406 aa, Homo sapiens
MAQAPADPGREGHLEQRILQVLTEAGSPVKLAQLVKECQAPKRELNQVLYRMKKELKVSLTSPATWCLGGTDPEGEGPAELALSSPEEDIYRFLKDNGPQRALVIAQALGMRTAKDVNRDLYRMKSRHLLDMDEQSKAWTIYRPEDSGRRAKSASIIYQHNPINMICQNGPNSWISIANSEAIQIGHGNIITRQTVSREDGSAGPRHLPSMAPGDSSTWGTLVDPWGPQDIHMEQSILRRVQLGHSNEMRLHGVPSEGPAHIPPGSPPVSATAAGPEASFEARIPSPGTHPEGEAAQRIHMKSCFLEDATIGNSNKMSISPGVAGPGGVAGSGEGEPGEDAGRRPADTQSRSHFPRDIGQPITPSHSKLTPKLETMTLGNRSHKAAEGSHYVDEASHEGSWWGGGI

SEQ ID NO: 10127 - protein, 149 aa, Homo sapiens
MAQAPADPGREGHLEQRILQVLTEAGSPVKLAQLVKECQAPKRELNQVLYRMKKELKVSLTSPATWCLGGTDPEGEGPAELALSSPGNCHPGEAGLTLQGASWQWTSTDLSLGSNLNSATWELTGFLSLCLGFFFWLMELTAGLLGRGC

SEQ ID NO: 10128 - protein, 248 aa, Homo sapiens
MAQAPADPGREGHLEQRILQVLTEAGSPVKLAQLVKECQAPKRELNQVLYRMKKELKVSLTSPATWCLGGTDPEGEGPAELALSSPAERPQQHAATIPETPGPQFSQQREEDIYRFLKDNGPQRALVIAQALGMRTAKDVNRDLYRMKSRHLLDMDEQSKAWTIYRPEDSGRRAKSASIIYQHNPINMICQNGPNSWISIANSEAIQIGHGNIITRQTVSREDGKSPKRAQGGDLGGEPPDPLGGGKG

SEQ ID NO: 10129 - protein, 354 aa, Homo sapiens
MAQAPADPGREAERPQQHAATIPETPGPQFSQQREEDIYRFLKDNGPQRALVIAQALGMRTAKDVNRDLYRMKSRHLLDMDEQSKAWTIYRPEDSGRRAKSASIIYQHNPINMICQNGPNSWISIANSEAIQIGHGNIITRQTVSREDGSAGPRHLPSMAPGDSSTWGTLVDPWGPQDIHMEQSILRRVQLGHSNEMRLHGVPSEGPAHIPPGSPPVSATAAGPEASFEARIPSPGTHPEGEAAQRIHMKSCFLEDATIGNSNKMSISPGVAGPGGVAGSGEGEPGEDAGRRPADTQSRSHFPRDIGQPITPSHSKLTPKLETMTLGNRSHKAAEGSHYVDEASHEGSWWGGGI

SEQ ID NO: 10130 - protein, 362 aa, Homo sapiens
MDSPEVTFTLAYLVFAVCFVFTPNEFHAAGLTVQNLLSGWLGSEDAAFVPFHLRRTAATLLCHSLLPLGYYVGMCLAASEKRLHALSQAPEAWRLFLLLAVTLPSIACILIYYWSRDRWACHPLARTLALYALPQSGWQAVASSVNTEFRRIDKFATGAPGARVIVTDTWVMKVTTYRVHVAQQQDVHLTVTESRQHELSPDSNLPVQLLTIRVASTNPAVQAFDIWLNSTEYGELCEKLRAPIRRAAHVVIHQSLGDLFLETFASLVEVNPAYSVPSSQELEACIGCMQTRASVKLVKTCQEAATGECQQCYCRPMWCLTCMGKWFASRQDPLRPDTWLASRVPCPTCRARFCILDVCTVR

SEQ ID NO: 10131 - protein, 232 aa, Homo sapiens
MDSPEVTFTLAYLVFAVCFVFTPNEFHAAGLTVQNLLSGWLGSEDAAFVPFHLRRTAATLLCHSLLPLGYYVGMCLAASEKRLHALSQAPEAWRLFLLLAVTLPSIACILIYYWSRDRWACHPLARTLALYALPQSGWQAVASSVNTEFRRIDKFATGAPGARVIVTDTWVMKVTTYRVHVAQQQDVHLTVTESRQHELSPDSNLPVQLLTIRVASTNPAVQAFDIWSWRPA

SEQ ID NO: 10132 - protein, 468 aa, Homo sapiens
MSTADLMENLREELTCFICLDYFSSPVTTECGHSFCLVCLLRSWEEHNTPLSCPECWRTLEGPHFQSNERLGRLASIARQLRSQVLQSEDEQGSYGRMPTTAKALSDDEQGGSAFVAQSHGANRVHLSSEAEEHHREKLQEILNLLRVRRKEAQAVLTHEKERVKLCQEETKTCKQVVVSEYMKMHQFLKEEEQLQLQLLEQEEKENMRKLRNNEIKLTQQIRSLSKMIAQIESSSQSSAFESLEEVRGALERSEPLLLQCPEATTTELSLCRITGMKEMLRKFSTEITLDPATANAYLVLSEDLKSVKYGGSRQQLPDNPERFDQSATVLGTQIFTSGRHYWEVEVGNKTEWEVGICKDSVSRKGNLPKPPGDLFSLIGLKIGDDYSLWVSSPLKGQHVREPVCKVGVFLDYESGHIAFYNGTDESLIYSFPQASFQEALRPIFSPCLPNEGTNTDPLTICSLNSHV

SEQ ID NO: 10133 - protein, 284 aa, Homo sapiens
MDAIKKKMQMLKLDKENAIDRAEQAEADKKQAEDRCKQLEEEQQALQKKLKGTEDEVEKYSESVKEAQEKLEQAEKKATDAEADVASLNRRIQLVEEELDRAQERLATALQKLEEAEKAADESERGMKVIENRAMKDEEKMELQEMQLKEAKHIAEDSDRKYEEVARKLVILEGELERSEERAEVAESKCGDLEEELKIVTNNLKSLEAQADKYSTKEDKYEEEIKLLEEKLKEAETRAEFAERSVAKLEKTIDDLEDEVYAQKMKYKAISEELDNALNDITSL

SEQ ID NO: 10134 - protein, 284 aa, Homo sapiens
MDAIKKKMQMLKLDKENAIDRAEQAEADKKQAEDRCKQLEEEQQALQKKLKGTEDEVEKYSESVKEAQEKLEQAEKKATDAEADVASLNRRIQLVEEELDRAQERLATALQKLEEAEKAADESERGMKVIENRAMKDEEKMELQEMQLKEAKHIAEDSDRKYEEVARKLVILEGELERSEERAEVAESRARQLEEELRTMDQALKSLMASEEEYSTKEDKYEEEIKLLEEKLKEAETRAEFAERSVAKLEKTIDDLEETLASAKEENVEIHQTLDQTLLELNNL

SEQ ID NO: 10135 - protein, 248 aa, Homo sapiens
MAGISSIDAVKKKIQSLQQVADEAEERAEHLQREADAERQARERAEADVASLNRRIQLVEEELDRAQERLATALQKLEEAEKAADESERGMKVIENRAMKDEEKMELQEMQLKEAKHIAEDSDRKYEEVARKLVILEGELERSEERAEVAESRARQLEEELRTMDQALKSLMASEEEYSTKEDKYEEEIKLLEEKLKEAETRAEFAERSVAKLEKTIDDLEETLASAKEENVEIHQTLDQTLLELNNL

SEQ ID NO: 10136 - protein, 2 aa, Homo sapiens
EI

SEQ ID NO: 10137 - protein, 1041 aa, Homo sapiens
MENMFLQSSMLTCIFLLISGSCELCAEENFSRSYPCDEKKQNDSVIAECSNRRLQEVPQTVGKYVTELDLSDNFITHITNESFQGLQNLTKINLNHNPNVQHQNGNPGIQSNGLNITDGAFLNLKNLRELLLEDNQLPQIPSGLPESLTELSLIQNNIYNITKEGISRLINLKNLYLAWNCYFNKVCEKTNIEDGVFETLTNLELLSLSFNSLSHVPPKLPSSLRKLFLSNTQIKYISEEDFKGLINLTLLDLSGNCPRCFNAPFPCVPCDGGASINIDRFAFQNLTQLRYLNLSSTSLRKINAAWFKNMPHLKVLDLEFNYLVGEIASGAFLTMLPRLEILDLSFNYIKGSYPQHINISRNFSKLLSLRALHLRGYVFQELREDDFQPLMQLPNLSTINLGINFIKQIDFKLFQNFSNLEIIYLSENRISPLVKDTRQSYANSSSFQRHIRKRRSTDFEFDPHSNFYHFTRPLIKPQCAAYGKALDLSLNSIFFIGPNQFENLPDIACLNLSANSNAQVLSGTEFSAIPHVKYLDLTNNRLDFDNASALTELSDLEVLDLSYNSHYFRIAGVTHHLEFIQNFTNLKVLNLSHNNIYTLTDKYNLESKSLVELVFSGNRLDILWNDDDNRYISIFKGLKNLTRLDLSLNRLKHIPNEAFLNLPASLTELHINDNMLKFFNWTLLQQFPRLELLDLRGNKLLFLTDSLSDFTSSLRTLLLSHNRISHLPSGFLSEVSSLKHLDLSSNLLKTINKSALETKTTTKLSMLELHGNPFECTCDIGDFRRWMDEHLNVKIPRLVDVICASPGDQRGKSIVSLELTTCVSDVTAVILFFFTFFITTMVMLAALAHHLFYWDVWFIYNVCLAKVKGYRSLSTSQTFYDAYISYDTKDASVTDWVINELRYHLEESRDKNVLLCLEERDWDPGLAIIDNLMQSINQSKKTVFVLTKKYAKSWNFKTAFYLALQRLMDENMDVIIFILLEPVLQHSQYLRLRQRICKSSILQWPDNPKAEGLFWQTLRNVVLTENDSRYNNMYVDSIKQY

SEQ ID NO: 10138 - protein, 1059 aa, Homo sapiens
MKESSLQNSSCSLGKETKKENMFLQSSMLTCIFLLISGSCELCAEENFSRSYPCDEKKQNDSVIAECSNRRLQEVPQTVGKYVTELDLSDNFITHITNESFQGLQNLTKINLNHNPNVQHQNGNPGIQSNGLNITDGAFLNLKNLRELLLEDNQLPQIPSGLPESLTELSLIQNNIYNITKEGISRLINLKNLYLAWNCYFNKVCEKTNIEDGVFETLTNLELLSLSFNSLSHVPPKLPSSLRKLFLSNTQIKYISEEDFKGLINLTLLDLSGNCPRCFNAPFPCVPCDGGASINIDRFAFQNLTQLRYLNLSSTSLRKINAAWFKNMPHLKVLDLEFNYLVGEIASGAFLTMLPRLEILDLSFNYIKGSYPQHINISRNFSKLLSLRALHLRGYVFQELREDDFQPLMQLPNLSTINLGINFIKQIDFKLFQNFSNLEIIYLSENRISPLVKDTRQSYANSSSFQRHIRKRRSTDFEFDPHSNFYHFTRPLIKPQCAAYGKALDLSLNSIFFIGPNQFENLPDIACLNLSANSNAQVLSGTEFSAIPHVKYLDLTNNRLDFDNASALTELSDLEVLDLSYNSHYFRIAGVTHHLEFIQNFTNLKVLNLSHNNIYTLTDKYNLESKSLVELVFSGNRLDILWNDDDNRYISIFKGLKNLTRLDLSLNRLKHIPNEAFLNLPASLTELHINDNMLKFFNWTLLQQFPRLELLDLRGNKLLFLTDSLSDFTSSLRTLLLSHNRISHLPSGFLSEVSSLKHLDLSSNLLKTINKSALETKTTTKLSMLELHGNPFECTCDIGDFRRWMDEHLNVKIPRLVDVICASPGDQRGKSIVSLELTTCVSDVTAVILFFFTFFITTMVMLAALAHHLFYWDVWFIYNVCLAKVKGYRSLSTSQTFYDAYISYDTKDASVTDWVINELRYHLEESRDKNVLLCLEERDWDPGLAIIDNLMQSINQSKKTVFVLTKKYAKSWNFKTAFYLALQRLMDENMDVIIFILLEPVLQHSQYLRLRQRICKSSILQWPDNPKAEGLFWQTLRNVVLTENDSRYNNMYVDSIKQY

SEQ ID NO: 10139 - protein, 469 aa, Homo sapiens
MPIRALCTICSDFFDHSRDVAAIHCGHTFHLQCLIQWFETAPSRTCPQCRIQVGKRTIINKLFFDLAQEEENVLDAEFLKNELDNVRAQLSQKDKEKRDSQVIIDTLRDTLEERNATVVSLQQALGKAEMLCSTLKKQMKYLEQQQDETKQAQEEARRLRSKMKTMEQIELLLQSQRPEVEEMIRDMGVGQSAVEQLAVYCVSLKKEYENLKEARKASGEVADKLRKDLFSSRSKLQTVYSELDQAKLELKSAQKDLQSADKEIMSLKKKLTMLQETLNLPPVASETVDRLVLESPAPVEVNLKLRRPSFRDDIDLNATFDVDTPPARPSSSQHGYYEKLCLEKSHSPIQDVPKKICKGPRKESQLSLGGQSCAGEPDEELVGAFPIFVRNAILGQKQPKRPRSESSCSKDVVRTGFDGLGGRTKFIQPTDTVMIRPLPVKPKTKVKQRVRVKTVPSLFQAKLDTFLWS

SEQ ID NO: 10140 - protein, 160 aa, Homo sapiens
MTDQQAEARSYLSEEMIAEFKAAFDMFDADGGGDISVKELGTVMRMLGQTPTKEELDAIIEEVDEDGSGTIDFEEFLVMMVRQMKEDAKGKSEEELAECFRIFDRNADGYIDPEELAEIFRASGEHVTDEEIESLMKDGDKNNDGRIDFDEFLKMMEGVQ

SEQ ID NO: 10141 - protein, 243 aa, Homo sapiens
MAASSISSPWGKHVFKAILMVLVALILLHSALAQSRRDFAPPGQQKREAPVDVLTQIGRSVRGTLDAWIGPETMHLVSESSSQVLWAISSAISVAFFALSGIAAQLLNALGLAGDYLAQGLKLSPGQVQTFLLWGAGALVVYWLLSLLLGLVLALLGRILWGLKLVIFLAGFVALMRSVPDPSTRALLLLALLILYALLSRLTGSRASGAQLEAKVRGLERQVEELRWRQRRAAKGARSVEEE

SEQ ID NO: 10142 - protein, 468 aa, Homo sapiens
MAPPPARVHLGAFLAVTPNPGSAASGTEAAAATPSKVWGSSAGRIEPRGGGRGALPTSMGQHGPSARARAGRAPGPRPAREASPRLRVHKTFKFVVVGVLLQVVPSSAATIKLHDQSIGTQQWEHSPLGELCPPGSHRSEHPGACNRCTEGVGYTNASNNLFACLPCTACKSDEEERSPCTTTRNTACQCKPGTFRNDNSAEMCRKCSRGCPRGMVKVKDCTPWSDIECVHKESGNGHNIWVILVVTLVVPLLLVAVLIVCCCIGSGCGGDPKCMDRVCFWRLGLLRGPGAEDNAHNEILSNADSLSTFVSEQQMESQEPADLTGVTVQSPGEAQCLLGPAEAEGSQRRRLLVPANGADPTETLMLFFDKFANIVPFDSWDQLMRQLDLTKNEIDVVRAGTAGPGDALYAMLMKWVNKTGRNASIHTLLDALERMEERHAREKIQDLLVDSGKFIYLEDGTGSAVSLE

SEQ ID NO: 10143 - protein, 120 aa, Homo sapiens
MEGLRRGLSRWKRYHIKVHLADEALLLPLTVRPRDTLSDLRAQLVGQGVSSWKRAFYYNARRLDDHQTVRDARLQDGSVLLLVSDPSEAQRLTPAIPALWEAEASRSLESRSSRPAWPTW

SEQ ID NO: 10144 - protein, 1503 aa, Homo sapiens
MEPSALRKAGSEQEEGFEGLPRRVTDLGMVSNLRRSNSSLFKSWRLQCPFGNNDKQESLSSWIPENIKKKECVYFVESSKLSDAGKVVCQCGYTHEQHLEEATKPHTFQGTQWDPKKHVQEMPTDAFGDIVFTGLSQKVKKYVRVSQDTPSSVIYHLMTQHWGLDVPNLLISVTGGAKNFNMKPRLKSIFRRGLVKVAQTTGAWIITGGSHTGVMKQVGEAVRDFSLSSSYKEGELITIGVATWGTVHRREGLIHPTGSFPAEYILDEDGQGNLTCLDSNHSHFILVDDGTHGQYGVEIPLRTRLEKFISEQTKERGGVAIKIPIVCVVLEGGPGTLHTIDNATTNGTPCVVVEGSGRVADVIAQVANLPVSDITISLIQQKLSVFFQEMFETFTESRIVEWTKKIQDIVRRRQLLTVFREGKDGQQDVDVAILQALLKASRSQDHFGHENWDHQLKLAVAWNRVDIARSEIFMDEWQWKPSDLHPTMTAALISNKPEFVKLFLENGVQLKEFVTWDTLLYLYENLDPSCLFHSKLQKVLVEDPERPACAPAAPRLQMHHVAQVLRELLGDFTQPLYPRPRHNDRLRLLLPVPHVKLNVQGVSLRSLYKRSSGHVTFTMDPIRDLLIWAIVQNRRELAGIIWAQSQDCIAAALACSKILKELSKEEEDTDSSEEMLALAEEYEHRAIGVFTECYRKDEERAQKLLTRVSEAWGKTTCLQLALEAKDMKFVSHGGIQAFLTKVWWGQLSVDNGLWRVTLCMLAFPLLLTGLISFREKRLQDVGTPAARARAFFTAPVVVFHLNILSYFAFLCLFAYVLMVDFQPVPSWCECAIYLWLFSLVCEEMRQLFYDPDECGLMKKAALYFSDFWNKLDVGAILLFVAGLTCRLIPATLYPGRVILSLDFILFCLRLMHIFTISKTLGPKIIIVKRMMKDVFFFLFLLAVWVVSFGVAKQAILIHNERRVDWLFRGAVYHSYLTIFGQIPGYIDGVNFNPEHCSPNGTDPYKPKCPESDATQQRPAFPEWLTVLLLCLYLLFTNILLLNLLIAMFNYTFQQVQEHTDQIWKFQRHDLIEEYHGRPAAPPPFILLSHLQLFIKRVVLKTPAKRHKQLKNKLEKNEEAALLSWEIYLKENYLQNRQFQQKQRPEQKIEDISNKVDAMVDLLDLDPLKRSGSMEQRLASLEEQVAQTAQALHWIVRTLRASGFSSEADVPTLASQKAAEEPDAEPGGRKKTEEPGDSYHVNARHLLYPNCPVTRFPVPNEKVPWETEFLIYDPPFYTAERKDAAAMDPMGDTLEPLSTIQYNVVDGLRDRRSFHGPYTVQAGLPLNPMGRTGLRGRGSLSCFGPNHTLYPMVTRWRRNEDGAICRKSIKKMLEVLVVKLPLSEHWALPGGSREPGEMLPRKLKRILRQEHWPSFENLLKCGMEVYKGYMDDPRNTDNAWIETVAVSVHFQDQNDVELNRLNSNLHACDSGASIRWQVVDRRIPLYANHKTLLQKAAAEFGAHY

SEQ ID NO: 10145 - protein, 1449 aa, Homo sapiens
MEPSALRKAGSEQEEGFEGLPRRVTDLGMVSNLRRSNSSLFKSWRLQCPFGNNDKQESLSSWIPENIKKKECVYFVESSKLSDAGKVVCQCGYTHEQHLEEATKPHTFQGTQWDPKKHVQEMPTDAFGDIVFTGLSQKVKKYVRVSQDTPSSVIYHLMTQHWGLDVPNLLISVTGGAKNFNMKPRLKSIFRRGLVKVAQTTGAWIITGGSHTGVMKQVGEAVRDFSLSSSYKEGELITIGVATWGTVHRREGLIHPTGSFPAEYILDEDGQGNLTCLDSNHSHFILVDDGTHGQYGVEIPLRTRLEKFISEQTKERGGVAIKIPIVCVVLEGGPGTLHTIDNATTNGTPCVVVEGSGRVADVIAQVANLPVSDITISLIQQKLSVFFQEMFETFTESRIVEWTKKIQDIVRRRQLLTVFREGKDGQQDVDVAILQALLKASRSQDHFGHENWDHQLKLAVAWNRVDIARSEIFMDEWQWKPSDLHPTMTAALISNKPEFVKLFLENGVQLKEFVTWDTLLYLYENLDPSCLFHSKLQMHHVAQVLRELLGDFTQPLYPRPRHNDRLRLLLPVPHVKLNVQGVSLRSLYKRSSGHVTFTMDPIRDLLIWAIVQNRRELAGIIWAQSQDCIAAALACSKILKELSKEEEDTDSSEEMLALAEEYEHRAIGVFTECYRKDEERAQKLLTRVSEAWGKTTCLQLALEAKDMKFVSHGGIQAFLTKVWWGQLSVDNGLWRVTLCMLAFPLLLTGLISFREKRLQDVGTPAARARAFFTAPVVVFHLNILSYFAFLCLFAYVLMVDFQPVPSWCECAIYLWLFSLVCEEMRQLFYDPDECGLMKKAALYFSDFWNKLDVGAILLFVAGLTCRLIPATLYPGRVILSLDFILFCLRLMHIFTISKTLGPKIIIVKRMMKDVFFFLFLLAVWVVSFGVAKQAILIHNERRVDWLFRGAVYHSYLTIFGQIPGYIDGVNFNPEHCSPNGTDPYKPKCPESDATQQRPAFPEWLTVLLLCLYLLFTNILLLNLLIAMFNYTFQQVQEHTDQIWKFQRHDLIEEYHGRPAAPPPFILLSHLQLFIKRVVLKTPAKRHKQLKNKLEKNEEAALLSWEIYLKENYLQNRQFQQKQRPEQKIEDISNKVDAMVDLLDLDPLKRSGSMEQRLASLEEQVAQTAQALHWIVRTLRASGFSSEADVPTLASQKAAEEPDAEPGGRKKTEEPGDSYHVNARHLLYPNCPVTRFPVPNEKVPWETEFLIYDPPFYTAERKDAAAMDPMGENPMGRTGLRGRGSLSCFGPNHTLYPMVTRWRRNEDGAICRKSIKKMLEVLVVKLPLSEHWALPGGSREPGEMLPRKLKRILRQEHWPSFENLLKCGMEVYKGYMDDPRNTDNAWIETVAVSVHFQDQNDVELNRLNSNLHACDSGASIRWQVVDRRIPLYANHKTLLQKAAAEFGAHY

SEQ ID NO: 10146 - protein, 846 aa, Homo sapiens
MEPSALRKAGSEQEEGFEGLPRRVTDLGMVSNLRRSNSSLFKSWRLQCPFGNNDKQESLSSWIPENIKKKECVYFVESSKLSDAGKVVCQCGYTHEQHLEEATKPHTFQGTQWDPKKHVQEMPTDAFGDIVFTGLSQKVKKYVRVSQDTPSSVIYHLMTQHWGLDVPNLLISVTGGAKNFNMKPRLKSIFRRGLVKVAQTTGAWIITGGSHTGVMKQVGEAVRDFSLSSSYKEGELITIGVATWGTVHRREGLIHPTGSFPAEYILDEDGQGNLTCLDSNHSHFILVDDGTHGQYGVEIPLRTRLEKFISEQTKERGGVAIKIPIVCVVLEGGPGTLHTIDNATTNGTPCVVVEGSGRVADVIAQVANLPVSDITISLIQQKLSVFFQEMFETFTESRIVEWTKKIQDIVRRRQLLTVFREGKDGQQDVDVAILQALLKASRSQDHFGHENWDHQLKLAVAWNRVDIARSEIFMDEWQWKPSDLHPTMTAALISNKPEFVKLFLENGVQLKEFVTWDTLLYLYENLDPSCLFHSKLQKVLVEDPERPACAPAAPRLQMHHVAQVLRELLGDFTQPLYPRPRHNDRLRLLLPVPHVKLNVQGVSLRSLYKRSSGHVTFTMDPIRDLLIWAIVQNRRELAGIIWAQSQDCIAAALACSKILKELSKEEEDTDSSEEMLALAEEYEHRAIGVFTECYRKDEERAQKLLTRVSEAWGKTTCLQLALEAKDMKFVSHGGIQAFLTKVWWGQLSVDNGLWRVTLCMLAFPLLLTGLISFREKRLQDVGTPAARARAFFTAPVVVFHLNILSYFAFLCLFAYVLMVDFQPVPSWCECAIYLWLFSLVCEEMRQ

SEQ ID NO: 10147 - protein, 247 aa, Homo sapiens
MNPLLILTFVAAALAAPFDDDDKIVGGYNCEENSVPYQVSLNSGYHFCGGSLINEQWVVSAGHCYKSRIQVRLGEHNIEVLEGNEQFINAAKIIRHPQYDRKTLNNDIMLIKLSSRAVINARVSTISLPTAPPATGTKCLISGWGNTASSGADYPDELQCLDAPVLSQAKCEASYPGKITSNMFCVGFLEGGKDSCQGDSGGPVVCNGQLQGVVSWGDGCAQKNKPGVYTKVYNYVKWIKNTIAANS

SEQ ID NO: 10148 - protein, 778 aa, Homo sapiens
MTTRQATKDPLLRGVSPTPSKIPVRSQKRTPFPTVTSCAVDQENQDPRRWVQKPPLNIQRPLVDSAGPRPKARHQAETSQRLVGISQPRNPLEELRPSPRGQNVGPGPPAQTEAPGTIEFVADPAALATILSGEGVKSCHLGRQPSLAKRVLVRGSQGGTTQRVQGVRASAYLAPRTPTHRLDPARASCFSRLEGPGPRGRTLCPQRLQALISPSGPSFHPSTRPSFQELRRETAGSSRTSVSQASGLLLETPVQPAFSLPKGEREVVTHSDEGGVASLGLAQRVPLRENREMSHTRDSHDSHLMPSPAPVAQPLPGHVVPCPSPFGRAQRVPSPGPPTLTSYSVLRRLTVQPKTRFTPMPSTPRVQQAQWLRGVSPQSCSEDPALPWEQVAVRLFDQESCIRSLEGSGKPPVATPSGPHSNRTPSLQEVKIQRIGILQQLLRQEVEGLVGGQCVPLNGGSSLDMVELQPLLTEISRTLNATEHNSGTSHLPGLLKHSGLPKPCLPEECGEPQPCPPAEPGPPEAFCRSEPEIPEPSLQEQLEVPEPYPPAEPRPLESCCRSEPEIPESSRQEQLEVPEPCPPAEPRPLESYCRIEPEIPESSRQEQLEVPEPCPPAEPGPLQPSTQGQSGPPGPCPRVELGASEPCTLEHRSLESSLPPCCSQWAPATTSLIFSSQHPLCASPPICSLQSLRPPAGQAGLSNLAPRTLALRERLKSCLTAIHCFHEARLDDECAFYTSRAPPSGPTRVCTNPVATLLEWQDALCFIPVGSAAPQGSP

SEQ ID NO: 10149 - protein, 144 aa, Homo sapiens
MTTRQATKDPLLRGVSPTPSKIPVRSQKRTPFPTVTSCAVDQENQDPRRWVQKPPLNIQRPLVDSAGPRPKARHQAETSQRLVGISQPRNPLEELRPSPRGQNVGPGPPAQTVLVPAPGKLFALRRSPFPPAKCHLARCHGLYL

SEQ ID NO: 10150 - protein, 126 aa, Homo sapiens
MTTRQATKDPLLRGVSPTPSKIPVRSQKRTPFPTVTSCAVDQENQDPRRWVQKPPLNIQRPLVDSAGPRPKARHQAETSQRLVGISQPRNPLEELRPSPRGQNVGPGPPAQTGAMACTCNHSYSGG

SEQ ID NO: 10151 - protein, 1034 aa, Homo sapiens
MPRRKQQAPKRAAGYAQEEQLKEEEEIKEEEEEEDSGSVAQLQGGNDTGTDEELETGPEQKGCFSYQNSPGSHLSNQDAENESLLSDASDQVSDIKSVCGRDASDKKAHTHVRLPNEAHNCMDKMTAVYANILSDSYWSGLGLGFKLSNSERRNCDTRNGSNKSDFDWHQDALSKSLQQNLPSRSVSKPSLFSSVQLYRQSSKMCGTVFTGASRFRCRQCSAAYDTLVELTVHMNETGHYQDDNRKKDKLRPTSYSKPRKRAFQDMDKEDAQKVLKCMFCGDSFDSLQDLSVHMIKTKHYQKVPLKEPVPTISSKMVTPAKKRVFDVNRPCSPDSTTGSFADSFSSQKNANLQLSSNNRYGYQNGASYTWQFEACKSQILKCMECGSSHDTLQQLTTHMMVTGHFLKVTSSASKKGKQLVLDPLAVEKMQSLSEAPNSDSLAPKPSSNSASDCTASTTELKKESKKERPEETSKDEKVVKSEDYEDPLQKPLDPTIKYQYLREEDLEDGSKGGGDILKSLENTVTTAINKAQNGAPSWSAYPSIHAAYQLSEGTKPPLPMGSQVLQIRPNLTNKLRPIAPKWKVMPLVSMPTHLAPYTQVKKESEDKDEAVKECGKESPHEEASSFSHSEGDSFRKSETPPEAKKTELGPLKEEEKLMKEGSEKEKPQPLEPTSALSNGCALANHAPALPCINPLSALQSVLNNHLGKATEPLRSPSCSSPSSSTISMFHKSNLNVMDKPVLSPASTRSASVSRRYLFENSDQPIDLTKSKSKKAESSQAQSCMSPPQKHALSDIADMVKVLPKATTPKPASSSRVPPMKLEMDVRRFEDVSSEVSTLHKRKGRQSNWNPQHLLILQAQFASSLFQTSEGKYLLSDLGPQERMQISKFTGLSMTTISHWLANVKYQLRKTGGTKFLKNMDKGHPIFYCSDCASQFRTPSTYISHLESHLGFQMKDMTRLSVDQQSKVEQEISRVSSAQRSPETIAAEEDTDSKFKCKLCCRTFVSKHAVKLHLSKTHSKSPEHHSQFVTDVDEE

SEQ ID NO: 10152 - protein, 1031 aa, Homo sapiens
MMAAALLHYTGYAQEEQLKEEEEIKEEEEEEDSGSVAQLQGGNDTGTDEELETGPEQKGCFSYQNSPGSHLSNQDAENESLLSDASDQVSDIKSVCGRDASDKKAHTHVRLPNEAHNCMDKMTAVYANILSDSYWSGLGLGFKLSNSERRNCDTRNGSNKSDFDWHQDALSKSLQQNLPSRSVSKPSLFSSVQLYRQSSKMCGTVFTGASRFRCRQCSAAYDTLVELTVHMNETGHYQDDNRKKDKLRPTSYSKPRKRAFQDMDKEDAQKVLKCMFCGDSFDSLQDLSVHMIKTKHYQKVPLKEPVPTISSKMVTPAKKRVFDVNRPCSPDSTTGSFADSFSSQKNANLQLSSNNRYGYQNGASYTWQFEACKSQILKCMECGSSHDTLQQLTTHMMVTGHFLKVTSSASKKGKQLVLDPLAVEKMQSLSEAPNSDSLAPKPSSNSASDCTASTTELKKESKKERPEETSKDEKVVKSEDYEDPLQKPLDPTIKYQYLREEDLEDGSKGGGDILKSLENTVTTAINKAQNGAPSWSAYPSIHAAYQLSEGTKPPLPMGSQVLQIRPNLTNKLRPIAPKWKVMPLVSMPTHLAPYTQVKKESEDKDEAVKECGKESPHEEASSFSHSEGDSFRKSETPPEAKKTELGPLKEEEKLMKEGSEKEKPQPLEPTSALSNGCALANHAPALPCINPLSALQSVLNNHLGKATEPLRSPSCSSPSSSTISMFHKSNLNVMDKPVLSPASTRSASVSRRYLFENSDQPIDLTKSKSKKAESSQAQSCMSPPQKHALSDIADMVKVLPKATTPKPASSSRVPPMKLEMDVRRFEDVSSEVSTLHKRKGRQSNWNPQHLLILQAQFASSLFQTSEGKYLLSDLGPQERMQISKFTGLSMTTISHWLANVKYQLRKTGGTKFLKNMDKGHPIFYCSDCASQFRTPSTYISHLESHLGFQMKDMTRLSVDQQSKVEQEISRVSSAQRSPETIAAEEDTDSKFKCKLCCRTFVSKHAVKLHLSKTHSKSPEHHSQFVTDVDEE

SEQ ID NO: 10153 - protein, 275 aa, Homo sapiens
MSQKRQTKFQNGKSKTSENSSAKREKGMVVNSKEISDAVGQSKFVLENLRHYTVHPNLAQYYKPLKATALQKFLAQNRKNTSFMLKVTQYDQDKTLLIMTNNPPPCSITQQDKESASKYFSKELLLKVMESHHQHKPTENLWLPRMPQKKKLRSKLKPIFPLILSDDPTSKREQWFRFSTDNDFKSEGKYSKVYALRTQKKMYPQLTFAPVHERDMRKDASKKSASERPISKVIREPLTLASLLEDMPTRTAPGESAFRNGRAPQWIIKKATVIG

SEQ ID NO: 10154 - protein, 253 aa, Homo sapiens
MAHYKTEQDDWLIIYLKYLLFVFNFFFWVGGAAVLAVGIWTLVEKSGYLSVLASSTFAASAYILIFAGVLVMVTGFLGFGAILWERKGCLSTYFCLLLVIFLVELVAGVLAHVYYQRLSDELKQHLNRTLAENYGQPGATQITASVDRLQQDFKCCGSNSSADWQHSTYILLREAEGRQVPDSCCKTVVVRCGQRAHPSNIYKVEGGCLTKLEQFLADHLLLMGAVGIGVACLQICGMVLTCCLHQRLQRHFY

SEQ ID NO: 10155 - protein, 2214 aa, Homo sapiens
MVANFFKSLILPYIHKLCKGMFTKKLGNTNKNKEYRQQKKDQDFPTAGQTKSPKFSYTFKSTVKKIAKCSSTHNLSTEEDEASKEFSLSPTFSYRVAIANGLQKNAKVTNSDNEDLLQELSSIESSYSESLNELRSSTENQAQSTHTMPVRRNRKSSSSLAPSEGSSDGERTLHGLKLGALRKLRKWKKSQECVSSDSELSTMKKSWGIRSKSLDRTVRNPKTNALEPGFSSSGCISQTHDVMEMIFKELQGISQIETELSELRGHVNALKHSIDEISSSVEVVQSEIEQLRTGFVQSRRETRDIHDYIKHLGHMGSKASLRFLNVTEERFEYVESVVYQILIDKMGFSDAPNAIKIEFAQRIGHQRDCPNAKPRPILVYFETPQQRDSVLKKSYKLKGTGIGISTDILTHDIRERKEKGIPSSQTYESMAIKLSTPEPKIKKNNWQSPDDSDEDLESDLNRNSYAVLSKSELLTKGSTSKPSSKSHSARSKNKTANSSRISNKSDYDKISSQLPESDILEKQTTTHYADATPLWHSQSDFFTAKLSRSESDFSKLCQSYSEDFSENQFFTRTNGSSLLSSSDRELWQRKQEGTATLYDSPKDQHLNGGVQGIQGQTETENTETVDSGMSNGMVCASGDRSHYSDSQLSLHEDLSPWKEWNQGADLGLDSSTQEGFDYETNSLFDQQLDVYNKDLEYLGKCHSDLQDDSESYDLTQDDNSSPCPGLDNEPQGQWVGQYDSYQGANSNELYQNQNQLSMMYRSQSELQSDDSEDAPPKSWHSRLSIDLSDKTFSFPKFGSTLQRAKSALEVVWNKSTQSLSGYEDSGSSLMGRFRTLSQSTANESSTTLDSDVYTEPYYYKAEDEEDYTEPVADNETDYVEVMEQVLAKLENRTSITETDEQMQAYDHLSYETPYETPQDEGYDGPADDMVSEEGLEPLNETSAEMEIREDENQNIPEQPVEITKPKRIRPSFKEAALRAYKKQMAELEEKILAGDSSSVDEKARIVSGNDLDASKFSALQVCGGAGGGLYGIDSMPDLRRKKTLPIVRDVAMTLAARKSGLSLAMVIRTSLNNEELKMHVFKKTLQALIYPMSSTIPHNFEVWTATTPTYCYECEGLLWGIARQGMKCLECGVKCHEKCQDLLNADCLQRAAEKSSKHGAEDKTQTIITAMKERMKIREKNRPEVFEVIQEMFQISKEDFVQFTKAAKQSVLDGTSKWSAKITITVVSAQGLQAKDKTGSSDPYVTVQVGKNKRRTKTIFGNLNPVWDEKFYFECHNSTDRIKVRVWDEDDDIKSRVKQHFKKESDDFLGQTIVEVRTLSGEMDVWYNLEKRTDKSAVSGAIRLKINVEIKGEEKVAPYHIQYTCLHENLFHYLTEVKSNGGVKIPEVKGDEAWKVFFDDASQEIVDEFAMRYGIESIYQAMTHFSCLSSKYMCPGVPAVMSTLLANINAFYAHTTVSTNIQVSASDRFAATNFGREKFIKLLDQLHNSLRIDLSKYRENFPASNTERLQDLKSTVDLLTSITFFRMKVLELQSPPKASMVVKDCVRACLDSTYKYIFDNCHELYSQLTDPSKKQDIPREDQGPTTKNLDFWPQLITLMVTIIDEDKTAYTPVLNQFPQELNMGKISAEIMWTLFALDMKYALEEHENQRLCKSTDYMNLHFKVKWFYNEYVRELPAFKDAVPEYSLWFEPFVMQWLDENEDVSMEFLHGALGRDKKDGFQQTSEHALFSCSVVDVFAQLNQSFEIIKKLECPNPEALSHLMRRFAKTINKVLLQYAAIVSSDFSSHCDKENVPCILMNNIQQLRVQLEKMFESMGGKELDSEASTILKELQVKLSGVLDELSVTYGESFQVIIEECIKQMSFELNQMRANGNTTSNKNSAAMDAEIVLRSLMDFLDKTLSLSAKICEKTVLKRVLKELWKLVLNKIEKQIVLPPLTDQTGPQMIFIAAKDLGQLSKLKEHMIREDARGLTPRQCAIMEVVLATIKQYFHAGGNGLKKNFLEKSPDLQSLRYALSLYTQTTDALIKKFIDTQTSQSRSSKDAVGQISVHVDITATPGTGDHKVTVKVIAINDLNWQTTAMFRPFVEVCILGPNLGDKKRKQGTKTKSNTWSPKYNETFQFILGKENRPGAYELHLSVKDYCFAREDRIIGMTVIQLQNIAEKGSYGAWYPLLKNISMDETGLTILRILSQRTSDDVAKEFVRLKSETRSTEESA

SEQ ID NO: 10156 - protein, 73 aa, Homo sapiens
MIEVVCNDRLGKKVRVKCNTDDTIGDLKKLIAAQTGTRWNKIVLKKWYTIFKDHVSLGDYEIHDGMNLELYYQ

SEQ ID NO: 10157 - protein, 294 aa, Homo sapiens
MPRGDSEQVRYCARFSYLWLKFSLIIYSTVFWLIGALVLSVGIYAEVERQKYKTLESAFLAPAIILILLGVVMFMVSFIGVLASLRDNLYLLQAFMYILGICLIMELIGGVVALTFRNQTIDFLNDNIRRGIENYYDDLDFKNIMDFVQKKFKCCGGEDYRDWSKNQYHDCSAPGPLACGVPYTCCIRNTTEVVNTMCGYKTIDKERFSVQDVIYVRGCTNAVIIWFMDNYTIMAGILLGILLPQFLGVLLTLLYITRVEDIIMEHSVTDGLLGPGAKPSVEAAGTGCCLCYPN

SEQ ID NO: 10158 - protein, 442 aa, Homo sapiens
MEASRCRLSPSGDSVFHEEMMKMRQAKLDYQRLLLEKRQRKKRLEPFMVQPNPEARLRRAKPRASDEQTPLVNCHTPHSNVILHGIDGPAAVLKPDEVHAPSVSSSVVEEDAENTVDTASKPGLQERLQKHDISESVNFDEETDGISQSACLERPNSASSQNSTDTGTSGSATAAQPADNLLGDIDDLEDFVYSPAPQGVTVRCRIIRDKRGMDRGLFPTYYMYLEKEENQKIFLLAARKRKKSKTANYLISIDPVDLSREGESYVGKLRSNLMGTKFTVYDRGICPMKGRGLVGAAHTRQELAAISYETNVLGFKGPRKMSVIIPGMTLNHKQIPYQPQNNHDSLLSRWQNRTMENLVELHNKAPVWNSDTQSYVLNFRGRVTQASVKNFQIVHKNDPDYIVMQFGRVADDVFTLDYNYPLCAVQAFGIGLSSFDSKLACE

SEQ ID NO: 10159 - protein, 501 aa, Homo sapiens
MEASRCRLSPSGDSVFHEEMMKMRQAKLDYQRLLLEKRQRKKRLEPFMVQPNPEARLRRAKPRASDEQTPLVNCHTPHSNVILHGIDGPAAVLKPDEVHAPSVSSSVVEEDAENTVDTASKPGLQERLQKHDISESVNFDEETDGISQSACLERPNSASSQNSTDTGTSGSATAAQPADNLLGDIDDLEDFVYSPAPQGVTVRCRIIRDKRGMDRGLFPTYYMYLEKEENQKIFLLAARKRKKSKTANYLISIDPVDLSREGESYVGKLRSNLMGTKFTVYDRGICPMKGRGLVGAAHTRQELAAISYETNVLGFKGPRKMSVIIPGMTLNHKQIPYQPQNNHDSLLSRWQNRTMENLVELHNKAPVWNSDTQSYVLNFRGRVTQASVKNFQIVHKNDPDYIVMQFGRVADDVFTLDYNYPLCAVQAFGIGLSSFDKCIQTLRMQELCELHRQHHSAASLVHRTVCQRWVGHPWRLLPQTSLLWTDLSPPPVVPAPHQISM

SEQ ID NO: 10160 - protein, 170 aa, Homo sapiens
MMKMRQAKLDYQRLLLEKRQRKKRLEPFMVQPNPEARLRRAKPRASDEQTPLVNCHTPHSNVILHGIDGPAAVLKPDEVHAPSVSSSVVEEDAENTVDTASKPGLQERLQKHDISESVNFDEETDGISQSACLERPNSASSQNSTFSSFCQKTEDTGYRHFRFCYCRPTS

SEQ ID NO: 10161 - protein, 842 aa, Homo sapiens
MAVRPGLWPALLGIVLAAWLRGSGAQQSATVANPVPGANPDLLPHFLVEPEDVYIVKNKPVLLVCKAVPATQIFFKCNGEWVRQVDHVIERSTDGSSGLPTMEVRINVSRQQVEKVFGLEEYWCQCVAWSSSGTTKSQKAYIRIAYLRKNFEQEPLAKEVSLEQGIVLPCRPPEGIPPAEVEWLRNEDLVDPSLDPNVYITREHSLVVRQARLADTANYTCVAKNIVARRRSASAAVIVYVDGSWSPWSKWSACGLDCTHWRSRECSDPAPRNGGEECQGTDLDTRNCTSDLCVHTASGPEDVALYVGLIAVAVCLVLLLLVLILVYCRKKEGLDSDVADSSILTSGFQPVSIKPSKADNPHLLTIQPDLSTTTTTYQGSLCPRQDGPSPKFQLTNGHLLSPLGGGRHTLHHSSPTSEAEEFVSRLSTQNYFRSLPRGTSNMTYGTFNFLGGRLMIPNTGISLLIPPDAIPRGKIYEIYLTLHKPEDVRLPLAGCQTLLSPIVSCGPPGVLLTRPVILAMDHCGEPSPDSWSLRLKKQSCEGSWEDVLHLGEEAPSHLYYCQLEASACYVFTEQLGRFALVGEALSVAAAKRLKLLLFAPVACTSLEYNIRVYCLHDTHDALKEVVQLEKQLGGQLIQEPRVLHFKDSYHNLRLSIHDVPSSLWKSKLLVSYQEIPFYHIWNGTQRYLHCTFTLERVSPSTSDLACKLWVWQVEGDGQSFSINFNITKDTRFAELLALESEAGVPALVGPSAFKIPFLIRQKIISSLDPPCRRGADWRTLAQKLHLDSHLSFFASKPSPTAMILNLWEARHFPNGNLSQLAAAVAGLGQPDAGLFTVSEAEC

SEQ ID NO: 10162 - protein, 301 aa, Homo sapiens
MAVRPGLWPALLGIVLAAWLRGSGAQQSATVANPVPGANPDLLPHFLVEPEDVYIVKNKPVLLVCKAVPATQIFFKCNGEWVRQVDHVIERSTDGSSGLPTMEVRINVSRQQVEKVFGLEEYWCQCVAWSSSGTTKSQKAYIRIAYLRKNFEQEPLAKEVSLEQGIVLPCRPPEGIPPAEVEWLRNEDLVDPSLDPNVYITREHSLVVRQARLADTANYTCVAKNIVARRRSASAAVIVYVDGSWSPWSKWSACGLDCTHWRSRECSDPAPRNGGEECQGTDLDTRNCTSDLCVHSESSLP

SEQ ID NO: 10163 - protein, 802 aa, Homo sapiens
MAGTSERSLISSISQPKAIECFEVKKKAFLTHGRYHGSGATPPKTKDPKPETFCGQTGLPTMEVRINVSRQQVEKVFGLEEYWCQCVAWSSSGTTKSQKAYIRIAYLRKNFEQEPLAKEVSLEQGIVLPCRPPEGIPPAEVEWLRNEDLVDPSLDPNVYITREHSLVVRQARLADTANYTCVAKNIVARRRSASAAVIVYVDGSWSPWSKWSACGLDCTHWRSRECSDPAPRNGGEECQGTDLDTRNCTSDLCVHTASGPEDVALYVGLIAVAVCLVLLLLVLILVYCRKKEGLDSDVADSSILTSGFQPVSIKPSKADNPHLLTIQPDLSTTTTTYQGSLCPRQDGPSPKFQLTNGHLLSPLGGGRHTLHHSSPTSEAEEFVSRLSTQNYFRSLPRGTSNMTYGTFNFLGGRLMIPNTGISLLIPPDAIPRGKIYEIYLTLHKPEDVRLPLAGCQTLLSPIVSCGPPGVLLTRPVILAMDHCGEPSPDSWSLRLKKQSCEGSWEDVLHLGEEAPSHLYYCQLEASACYVFTEQLGRFALVGEALSVAAAKRLKLLLFAPVACTSLEYNIRVYCLHDTHDALKEVVQLEKQLGGQLIQEPRVLHFKDSYHNLRLSIHDVPSSLWKSKLLVSYQEIPFYHIWNGTQRYLHCTFTLERVSPSTSDLACKLWVWQVEGDGQSFSINFNITKDTRFAELLALESEAGVPALVGPSAFKIPFLIRQKIISSLDPPCRRGADWRTLAQKLHLDSHLSFFASKPSPTAMILNLWEARHFPNGNLSQLAAAVAGLGQPDAGLFTVSEAEC

SEQ ID NO: 10164 - protein, 3526 aa, Homo sapiens
MNMVKRIMGRPRQEECSPQDNALGLMHLRRLFTELCHPPRHMTQKEQEEKLYMMLPVFNRVFGNAPPNTMTEKFSDLLQFTTQVSRLMVTEIRRRASNKSTEAASRAIVQFLEINQSEEASRGWMLLTTINLLASSGQKTVDCMTTMSVPSTLVKCLYLFFDLPHVPEAVGGAQNELPLAERRGLLQKVFVQILVKLCSFVSPAEELAQKDDLQLLFSAITSWCPPYNLPWRKSAGEVLMTISRHGLSVNVVKYIHEKECLSTCVQNMQQSDDLSPLEIVEMFAGLSCFLKDSSDVSQTLLDDFRIWQGYNFLCDLLLRLEQAKEAESKDALKDLVNLITSLTTYGVSELKPAGITTGAPFLLPGFAVPQPAGKGHSVRNVQAFAVLQNAFLKAKTSFLAQIILDAITNIYMADNANYFILESQHTLSQFAEKISKLPEVQNKYFEMLEFVVFSLNYIPCKELISVSILLKSSSSYHCSIIAMKTLLKFTRHDYIFKDVFREVGLLEVMVNLLHKYAALLKDPTQALNEQGDSRNNSSVEDQKHLALLVMETLTVLLQGSNTNAGIFREFGGARCAHNIVKYPQCRQHALMTIQQLVLSPNGDDDMGTLLGLMHSAPPTELQLKTDILRALLSVLRESHRSRTVFRKVGGFVYITSLLVAMERSLSCPPKNGWEKVNQNQVFELLHTVFCTLTAAMRYEPANSHFFKTEIQYEKLADAVRFLGCFSDLRKISAMNVFPSNTQPFQRLLEEDVISIESVSPTLRHCSKLFIYLYKVATDSFDSRAEQIPPCLTSESSLPSPWGTPALSRKRHAYHSVSTPPVYPPKNVADLKLHVTTSSLQSSDAVIIHPGAMLAMLDLLASVGSVTQPEHALDLQLAVANILQSLVHTERNQQVMCEAGLHARLLQRCSAALADEDHSLHPPLQRMFERLASQALEPMVLREFLRLASPLNCGAWDKKLLKQYRVHKPSSLSYEPEMRSSMITSLEGLGTDNVFSLHEDNHYRISKSLVKSAEGSTVPLTRVKCLVSMTTPHDIRLHGSSVTPAFVEFDTSLEGFGCLFLPSLAPHNAPTNNTVTTGLIDGAVVSGIGSGERFFPPPSGLSYSSWFCIEHFSSPPNNHPVRLLTVVRRANSSEQHYVCLAIVLSAKDRSLIVSTKEELLQNYVDDFSEESSFYEILPCCARFRCGELIIEGQWHHLVLVMSKGMLKNSTAALYIDGQLVNTVKLHYVHSTPGGSGSANPPVVSTVYAYIGTPPAQRQIASLVWRLGPTHFLEEVLPSSNVTTIYELGPNYVGSFQAVCMPCKDAKSEGVVPSPVSLVPEEKVSFGLYALSVSSLTVARIRKVYNKLDSKAIAKQLGISSHENATPVKLIHNSAGHLNGSARTIGAALIGYLGVRTFVPKPVATTLQYVGGAAAILGLVAMASDVEGLYAAVKALVCVVKSNPLASKEMERIKGYQLLAMLLKKKRSLLNSHILHLTFSLVGTVDSGHETSIIPNSTAFQDLLCDFEVWLHAPYELHLSLFEHFIELLTESSEASKNAKLMREFQLIPKLLLTLRDMSLSQPTIAAISNVLSFLLQGFPSSNDLLRFGQFISSTLPTFAVCEKFVVMEINNEEKLDTGTEEEFGGLVSANLILLRNRLLDILLKLIYTSKEKTSINLQACEELVKTLGFDWIMMFMEEHLHSTTVTAAMRILVVLLSNQSILIKFKEGLSGGGWLEQTDSVLTNKIGTVLGFNVGRSAGGRSTVREINRDACHFPGFPVLQSFLPKHTNVPALYFLLMALFLQQPVSELPENLQVSVPVISCRSKQGCQFDLDSIWTFIFGVPASSGTVVSSIHNVCTEAVFLLLGMLRSMLTSPWQSEEEGSWLREYPVTLMQFFRYLYHNVPDLASMWMSPDFLCALAATVFPFNIRPYSEMVTDLDDEVGSPAEEFKAFAADTGMNRSQSEYCNVGTKTYLTNHPAKKFVFDFMRVLIIDNLCLTPASKQTPLIDLLLEASPERSTRTQQKEFQTYILDSVMDHLLAADVLLGEDASLPITSGGSYQVLVNNVFYFTQRVVDKLWQGMFNKESKLLIDFIIQLIAQSKRRSQGLSLDAVYHCLNRTILYQFSRAHKTVPQQVALLDSLRVLTVNRNLILGPGNHDQEFISCLAHCLINLHVGSNVDGFGLEAEARMTTWHIMIPSDIEPDGSYSQDISEGRQLLIKAVNRVWTELIHSKKQVLEELFKVTLPVNERGHVDIATARPLIEEAALKCWQNHLAHEKKCISRGEALAPTTQSKLSRVSSGFGLSKLTGSRRNRKESGLNKHSLSTQEISQWMFTHIAVVRDLVDTQYKEYQERQQNALKYVTEEWCQIECELLRERGLWGPPIGSHLDKWMLEMTEGPCRMRKKMVRNDMFYNHYPYVPETEQETNVASEIPSKQPETPDDIPQKKPARYRRAVSYDSKEYYMRLASGNPAIVQDAIVESSEGEAAQQEPEHGEDTIAKVKGLVKPPLKRSRSAPDGGDEENQEQLQDQIAEGSSIEEEEKTDNATLLRLLEEGEKIQHMYRCARVQGLDTSEGLLLFGKEHFYVIDGFTMTATREIRDIETLPPNMHEPIIPRGARQGPSQLKRTCSIFAYEDIKEVHKRRYLLQPIAVEVFSGDGRNYLLAFQKGIRNKVYQRFLAVVPSLTDSSESVSGQRPNTSVEQGSGLLSTLVGEKSVTQRWERGEISNFQYLMHLNTLAGRSYNDLMQYPVFPWILADYDSEEVDLTNPKTFRNLAKPMGAQTDERLAQYKKRYKDWEDPNGETPAYHYGTHYSSAMIVASYLVRMEPFTQIFLRLQGGHFDLADRMFHSVREAWYSASKHNMADVKELIPEFFYLPEFLFNSNNFDLGCKQNGTKLGDVILPPWAKGDPREFIRVHREALECDYVSAHLHEWIDLIFGYKQQGPAAVEAVNVFHHLFYEGQVDIYNINDPLKETATIGFINNFGQIPKQLFKKPHPPKRVRSRLNGDNAGISVLPGSTSDKIFFHHLDNLRPSLTPVKELKEPVGQIVCTDKGILAVEQNKVLIPPTWNKTFAWGYADLSCRLGTYESDKAMTVYECLSEWGQILCAICPNPKLVITGGTSTVVCVWEMGTSKEKAKTVTLKQALLGHTDTVTCATASLAYHIIVSGSRDRTCIIWDLNKLSFLTQLRGHRAPVSALCINELTGDIVSCAGTYIHVWSINGNPIVSVNTFTGRSQQIICCCMSEMNEWDTQNVIVTGHSDGVVRFWRMEFLQVPETPAPEPAEVLEMQEDCPEAQIGQEAQDEDSSDSEADEQSISQDPKDTPSQPSSTSHRPRAASCRATAAWCTDSGSDDSRRWSDQLSLDEKDGFIFVNYSEGQTRAHLQGPLSHPHPNPIEVRNYSRLKPGYRWERQLVFRSKLTMHTAFDRKDNAHPAEVTALGISKDHSRILVGDSRGRVFSWSVSDQPGRSAADHWVKDEGGDSCSGCSVRFSLTERRHHCRNCGQLFCQKCSRFQSEIKRLKISSPVRVCQNCYYNLQHERGSEDGPRNC

SEQ ID NO: 10165 - protein, 3509 aa, Homo sapiens
MNMVKRIMGRPRQEECSPQDNALGLMHLRRLFTELCHPPRHMTQKEQEEKLYMMLPVFNRVFGNAPPNTMTEKFSDLLQFTTQVSRLMVTEIRRRASNKSTEAASRAIVQFLEINQSEEASRGWMLLTTINLLASSGQKTVDCMTTMSVPSTLVKCLYLFFDLPHVPEAVGGAQNELPLAERRGLLQKVFVQILVKLCSFVSPAEELAQKDDLQLLFSAITSWCPPYNLPWRKSAGEVLMTISRHGLSVNVVKYIHEKECLSTCVQNMQQSDDLSPLEIVEMFAGLSCFLKDSSDVSQTLLDDFRIWQGYNFLCDLLLRLEQAKEAESKDALKDLVNLITSLTTYGVSELKPAGITTGAPFLLPGFAVPQPAGKGHSVRNVQAFAVLQNAFLKAKTSFLAQIILDAITNIYMADNANYFILESQHTLSQFAEKISKLPEVQNKYFEMLEFVVFSLNYIPCKELISVSILLKSSSSYHCSIIAMKTLLKFTRHDYIFKDVFREVGLLEVMVNLLHKYAALLKDPTQALNEQGDSRNNSSVEDQKHLALLVMETLTVLLQGSNTNAGIFREFGGARCAHNIVKYPQCRQHALMTIQQLVLSPNGDDDMGTLLGLMHSAPPTELQLKTDILRALLSVLRESHRSRTVFRKVGGFVYITSLLVAMERSLSCPPKNGWEKVNQNQVFELLHTVFCTLTAAMRYEPANSHFFKTEIQYEKLADAVRFLGCFSDLRKISAMNVFPSNTQPFQRLLEEDVISIESVSPTLRHCSKLFIYLYKVATDSFDSRAEQIPPCLTSESSLPSPWGTPALSRKRHAYHSVSTPPVYPPKNVADLKLHVTTSSLQSSDAVIIHPGAMLAMLDLLASVGSVTQPEHALDLQLAVANILQSLVHTERNQQVMCEAGLHARLLQRCSAALADEDHSLHPPLQRMFERLASQALEPMVLREFLRLASPLNCGAWDKKLLKQYRVHKPSSLSYEPEMRSSMITSLEGLGTDNVFSLHEDNHYRISKSLVKSAEGSTVPLTRVKCLVSMTTPHDIRLHGSSVTPAFVEFDTSLEGFGCLFLPSLAPHNAPTNNTVTTGLIDGAVVSGIGSGERFFPPPSGLSYSSWFCIEHFSSPPNNHPVRLLTVVRRANSSEQHYVCLAIVLSAKDRSLIVSTKEELLQNYVDDFSEESSFYEILPCCARFRCGELIIEGQWHHLVLVMSKGMLKNSTAALYIDGQLVNTVKLHYVHSTPGGSGSANPPVVSTVYAYIGTPPAQRQIASLVWRLGPTHFLEEVLPSSNVTTIYELGPNYVGSFQAVCMPCKDAKSEGVVPSPVSLVPEEKVSFGLYALSVSSLTVARIRKVYNKLDSKAIAKQLGISSHENATPVKLIHNSAGHLNGSARTIGAALIGYLGVRTFVPKPVATTLQYVGGAAAILGLVAMASDVEGLYAAVKALVCVVKSNPLASKEMERIKGYQLLAMLLKKKRSLLNSHILHLTFSLVGTVDSGHETSIIPNSTAFQDLLCDFEVWLHAPYELHLSLFEHFIELLTESSEASKNAKLMREFQLIPKLLLTLRDMSLSQPTIAAISNVLSFLLQGFPSSNDLLRFGQFISSTLPTFAVCEKFVVMEINNEEKLDTGTEEEFGGLVSANLILLRNRLLDILLKLIYTSKEKTSINLQACEELVKTLGFDWIMMFMEEHLHSTTVTAAMRILVVLLSNQSILIKFKEGLSGGGWLEQTDSVLTNKIGTVLGFNVGRSAGGRSTVREINRDACHFPGFPVLQSFLPKHTNVPALYFLLMALFLQQPVSELPENLQVSVPVISCRSKQGCQFDLDSIWTFIFGVPASSGTVVSSIHNVCTEAVFLLLGMLRSMLTSPWQSEEEGSWLREYPVTLMQFFRYLYHNVPDLASMWMSPDFLCALAATVFPFNIRPYSEMVTDLDDEVGSPAEEFKAFAADTGMNRSQSEYCNVGTKTYLTNHPAKKFVFDFMRVLIIDNLCLTPASKQTPLIDLLLEASPERSTRTQQKEFQTYILDSVMDHLLAADVLLGEDASLPITSGGSYQVLVNNVFYFTQRVVDKLWQGMFNKESKLLIDFIIQLIAQSKRRSQGLSLDAVYHCLNRTILYQFSRAHKTVPQQVALLDSLRVLTVNRNLILGPGNHDQEFISCLAHCLINLHVGSNVDGFGLEAEARMTTWHIMIPSDIEPDGSYSQDISEGRQLLIKAVNRVWTELIHSKKQVLEELFKVTLPVNERGHVDIATARPLIEEAALKCWQNHLAHEKKCISRGEALAPTTQSKLSRVSSGFGLSKLTGSRRNRKESGLNKHSLSTQEISQWMFTHIAVVRDLVDTQYKEYQERQQNALKYVTEEWCQIECELLRERGLWGPPIGSHLDKWMLEMTEGPCRMRKKMVRNDMFYNHYPYVPETEQETNVAKPARYRRAVSYDSKEYYMRLASGNPAIVQDAIVESSEGEAAQQEPEHGEDTIAKVKGLVKPPLKRSRSAPDGGDEENQEQLQDQIAEGSSIEEEEKTDNATLLRLLEEGEKIQHMYRCARVQGLDTSEGLLLFGKEHFYVIDGFTMTATREIRDIETLPPNMHEPIIPRGARQGPSQLKRTCSIFAYEDIKEVHKRRYLLQPIAVEVFSGDGRNYLLAFQKGIRNKVYQRFLAVVPSLTDSSESVSGQRPNTSVEQGSGLLSTLVGEKSVTQRWERGEISNFQYLMHLNTLAGRSYNDLMQYPVFPWILADYDSEEVDLTNPKTFRNLAKPMGAQTDERLAQYKKRYKDWEDPNGETPAYHYGTHYSSAMIVASYLVRMEPFTQIFLRLQGGHFDLADRMFHSVREAWYSASKHNMADVKELIPEFFYLPEFLFNSNNFDLGCKQNGTKLGDVILPPWAKGDPREFIRVHREALECDYVSAHLHEWIDLIFGYKQQGPAAVEAVNVFHHLFYEGQVDIYNINDPLKETATIGFINNFGQIPKQLFKKPHPPKRVRSRLNGDNAGISVLPGSTSDKIFFHHLDNLRPSLTPVKELKEPVGQIVCTDKGILAVEQNKVLIPPTWNKTFAWGYADLSCRLGTYESDKAMTVYECLSEWGQILCAICPNPKLVITGGTSTVVCVWEMGTSKEKAKTVTLKQALLGHTDTVTCATASLAYHIIVSGSRDRTCIIWDLNKLSFLTQLRGHRAPVSALCINELTGDIVSCAGTYIHVWSINGNPIVSVNTFTGRSQQIICCCMSEMNEWDTQNVIVTGHSDGVVRFWRMEFLQVPETPAPEPAEVLEMQEDCPEAQIGQEAQDEDSSDSEADEQSISQDPKDTPSQPSSTSHRPRAASCRATAAWCTDSGSDDSRRWSDQLSLDEKDGFIFVNYSEGQTRAHLQGPLSHPHPNPIEVRNYSRLKPGYRWERQLVFRSKLTMHTAFDRKDNAHPAEVTALGISKDHSRILVGDSRGRVFSWSVSDQPGRSAADHWVKDEGGDSCSGCSVRFSLTERRHHCRNCGQLFCQKCSRFQSEIKRLKISSPVRVCQNCYYNLQHERGSEDGPRNC

SEQ ID NO: 10166 - protein, 1243 aa, Homo sapiens
MSEAPRFFVGPEDTEINPGNYRHFFHHADEDDEEEDDSPPERQIVVGICSMAKKSKSKPMKEILERISLFKYITVVVFEEEVILNEPVENWPLCDCLISFHSKGFPLDKAVAYAKLRNPFVINDLNMQYLIQDRREVYSILQAEGILLPRYAILNRDPNNPKECNLIEGEDHVEVNGEVFQKPFVEKPVSAEDHNVYIYYPTSAGGGSQRLFRKIGSRSSVYSPESNVRKTGSYIYEEFMPTDGTDVKVYTVGPDYAHAEARKSPALDGKVERDSEGKEVRYPVILNAREKLIAWKVCLAFKQTVCGFDLLRANGQSYVCDVNGFSFVKNSMKYYDDCAKILGNIVMRELAPQFHIPWSIPLEAEDIPIVPTTSGTMMELRCVIAVIRHGDRTPKQKMKMEVRHQKFFDLFEKCDGYKSGKLKLKKPKQLQEVLDIARQLLMELGQNNDSEIEENKPKLEQLKTVLEMYGHFSGINRKVQLTYLPHGCPKTSSEEEDSRREEPSLLLVLKWGGELTPAGRVQAEELGRAFRCMYPGGQGDYAGFPGCGLLRLHSTYRHDLKIYASDEGRVQMTAAAFAKGLLALEGELTPILVQMVKSANMNGLLDSDSDSLSSCQQRVKARLHEILQKDRDFTAEDYEKLTPSGSISLIKSMHLIKNPVKTCDKVYSLIQSLTSQIRHRMEDPKSSDIQLYHSETLELMLRRWSKLEKDFKTKNGRYDISKIPDIYDCIKYDVQHNGSLKLENTMELYRLSKALADIVIPQEYGITKAEKLEIAKGYCTPLVRKIRSDLQRTQDDDTVNKLHPVYSRGVLSPERHVRTRLYFTSESHVHSLLSILRYGALCNESKDEQWKRAMDYLNVVNELNYMTQIVIMLYEDPNKDLSSEERFHVELHFSPGAKGCEEDKNLPSGYGYRPASRENEGRRPFKIDNDDEPHTSKRDEVDRAVILFKPMVSEPIHIHRKSPLPRSRKTATNDEESPLSVSSPEGTGTWLHYTSGVGTGRRRRRSGEQITSSPVSPKSLAFTSSIFGSWQQVVSENANYLRTPRTLVEQKQNPTVGSHCAGLFSTSVLGGSSSAPNLQDYARTHRKKLTSSGCIDDATRGSAVKRFSISFARHPTNGFELYSMVPSICPLETLHNALSLKQVDEFLASIASPSSDVPRKTAEISSTALRSSPIMRKKVSLNTYTPAKILPTPPATLKSTKASSKPATSGPSSAVVPNTSSRKKNITSKTETHEHKKNTGKKK

SEQ ID NO: 10167 - protein, 1222 aa, Homo sapiens
MSEAPRFFVGPEDTEINPGNYRHFFHHADEDDEEEDDSPPERQIVVGICSMAKKSKSKPMKEILERISLFKYITVVVFEEEVILNEPVENWPLCDCLISFHSKGFPLDKAVAYAKLRNPFVINDLNMQYLIQDRREVYSILQAEGILLPRYAILNRDPNNPKECNLIEGEDHVEVNGEVFQKPFVEKPVSAEDHNVYIYYPTSAGGGSQRLFRKIGSRSSVYSPESNVRKTGSYIYEEFMPTDGTDVKVYTVGPDYAHAEARKSPALDGKVERDSEGKEVRYPVILNAREKLIAWKVCLAFKQTVCGFDLLRANGQSYVCDVNGFSFVKNSMKYYDDCAKILGNIVMRELAPQFHIPWSIPLEAEDIPIVPTTSGTMMELRCVIAVIRHGDRTPKQKMKMEVRHQKFFDLFEKCDGYKSGKLKLKKPKQLQEVLDIARQLLMELGQNNDSEIEENKPKLEQLKTVLEMYGHFSGINRKVQLTYLPHGCPKTSSEEEDSRREEPSLLLVLKWGGELTPAGRVQAEELGRAFRCMYPGGQGDYAGFPGCGLLRLHSTYRHDLKIYASDEGRVQMTAAAFAKGLLALEGELTPILVQMVKSANMNGLLDSDSDSLSSCQQRVKARLHEILQKDRDFTAEDYEKLTPSGSISLIKSMHLIKNPVKTCDKVYSLIQSLTSQIRHRMEDPKSSDIQLYHSETLELMLRRWSKLEKDFKTKNGRYDISKIPDIYDCIKYDVQHNGSLKLENTMELYRLSKALADIVIPQEYGITKAEKLEIAKGYCTPLVRKIRSDLQRTQDDDTVNKLHPVYSRGVLSPERHVRTRLYFTSESHVHSLLSILRYGALCNESKDEQWKRAMDYLNVVNELNYMTQIVIMLYEDPNKDLSSEERFHVELHFSPGAKGCEEDKNLPSGYGYRPASRENEGRRPFKIDNDDEPHTSKRDEVDRAVILFKPMVSEPIHIHRKSPLPRSRKTATNDEESPLSVSSPEGTGTWLHYTSGVGTGRRRRRSGEQITSSPVSPKSLAFTSSIFGSWQQVVSENANYLRTPRTLVEQKQNPTVGSHCAGLFSTSVLGGSSSAPNLQDYARTHRKKLTSSGCIDGFELYSMVPSICPLETLHNALSLKQVDEFLASIASPSSDVPRKTAEISSTALRSSPIMRKKVSLNTYTPAKILPTPPATLKSTKASSKPATSGPSSAVVPNTSSRKKNITSKTETHEHKKNTGKKK

SEQ ID NO: 10168 - protein, 163 aa, Homo sapiens
MGSTWGSPGWVRLALCLTGLVLSLYALHVKAARARDRDYRALCDVGTAISCSRVFSSRWGRGFGLVEHVLGQDSILNQSNSIFGCIFYTLQLLLGCLRTRWASVLMLLSSLVSLAGSVYLAWILFFVLYDFCIVCITTYAINVSLMWLSFRKVQEPQGKAKRH

SEQ ID NO: 10169 - protein, 156 aa, Homo sapiens
MGSTWGSPGWVRLALCLTGLVLSLYALHVKAARARDRDYRALCDVGTAISCSRVFSSRWGRGFGLVEHVLGQDSILNQSNSIFGCIFYTLQLLLDGVSPCCPGWSQAICLPQPPKVLGGLQALPADTLGLCPDAAELPGVSRWFCLPGLDPVLRAL

SEQ ID NO: 10170 - protein, 92 aa, Homo sapiens
MGSTWGSPGWVRLALCLTGLVLSLYALHVKAARARDRDYRALCDVGTAISCSRVFSSRLPADTLGLCPDAAELPGVSRWFCLPGLDPVLRAL

SEQ ID NO: 10171 - protein, 588 aa, Homo sapiens
MLENYRNLVFLGIAAFKPDLIIFLEQGKEPWNMKRHEMVEEPPVICSHFSQEFWPEQGIEDSFQKMILRRYDKCGHENLHLKISCTNVDECNVHKEGYNKLNQSLTTTQSKVFQCGKYANVFHKCSNSNRHKIRHTGEKGLKCKEYVRSFCMLSHLSQHERIYTRENSYKCEENGKAFNWSSTLTYYKSIHTGEKPYKCEECGKAFSKFSILTKHKVIHTGEKPYKCEECGKAFNRSSILTKHKIIHTGEKPYKCEECGKGFSSVSTLNTHKAIHAEEKPYKCEECGKASNSSSKLMEHKRIHTGEKPYKCEECGKAFSWSSSLTEHKRIHAGEKPYKCEECGKAFNRSSILTKHKIIHTGEKPYKCEGCGKAFSKVSTLNTHKAIHAEEKPYKCEECGKASNSSSKLMEHKRIHTGEKPYKCEECGKAFSWSSSLTEHKRIHAGEKPYKCEECGKAFTWSSSFTKHKRIHAAEKPYKCEECGKGFSTFSILTKHKIIHTGEKRYKCEECGKAFSWSSILTEHKIIHTGEKPYKCEECGKAFSRSSSLTRHKRIHTGEKPYKCEECGKAFKSSSTVSYHKKIHTGENP

SEQ ID NO: 10172 - protein, 199 aa, Homo sapiens
MASGSGTKNLDFRRKWDKDEYEKLAEKRLTEEREKKDGKPVQPVKRELLRHRDYKVDLESKLGKTIVITKTTPQSEMGGYYCNVCDCVVKDSINFLDHINGKKHQRNLGMSMRVERSTLDQVKKRFEVNKKKMEEKQKDYDFEERMKELREEEEKAKAYKKEKQKEKKRRAEEDLTFEEDDEMAAVMGFSGFGSTKKSY

SEQ ID NO: 10173 - protein, 717 aa, Homo sapiens
MKSQEEVEVAGIKLCKAMSLGSVTFTDVAIDFSQDEWEWLNLAQRSLYKKVMLENYRNLVSVGLCISKPDVISLLEQEKDPWVIKGGMNRGLCPDLECVWVTKSLSLNQDIYEEKLPPAIIMERLKSYDLECSTLGKNWKCEDLFERELVNQKTHFRQETITHIDTLIEKRDHSNKSGTVFHLNTLSYIKQIFPMEERIFNFHTDKKSLKTHSVVKKHKQDRGEKKLLKCNDCEKIFSKISTLTLHQRIHTGEKPYECIECGKAFSQSAHLAQHQRIHTGEKPFECTECGKAFSQNAHLVQHQRVHTGEKPYQCKQCNKAFSQLAHLAQHQRVHTGEKPYECIECGKAFSDCSSLAHHRRIHTGKRPYECIDCGKAFRQNASLIRHRRYYHTGEKPFDCIDCGKAFTDHIGLIQHKRTHTGERPYKCNVCGKAFSHGSSLTVHQRIHTGEKPYECNICEKAFSHRGSLTLHQRVHTGEKPYECKECGKAFRQSTHLAHHQRIHTGEKPYECKECSKTFSQNAHLAQHQKIHTGEKPYECKECGKAFSQIAHLVQHQRVHTGEKPYECIECGKAFSDGSYLVQHQRLHSGKRPYECLECGKAFRQRASLICHQRCHTGEKPYECNVCGKAFSHRKSLTLHQRIHTGEKPYECKECSKAFSQVAHLTLHKRIHTGERPYECKECGKAFRQSVHLAHHQRIHTGESSVILSSALPYHQVL

SEQ ID NO: 10174 - protein, 599 aa, Homo sapiens
MKSQEEVEVAGIKLCKAMSLGSVTFTDVAIDFSQDEWEWLNLAQRSLYKKVMLENYRNLVSVGKSIFLLLPPHDSVVFYAIIRISHSFPQHRQFLYVFLHAGLCISKPDVISLLEQEKDPWVIKGGMNRGLCPGEKPYECIECGKAFSQSAHLAQHQRIHTGEKPFECTECGKAFSQNAHLVQHQRVHTGEKPYQCKQCNKAFSQLAHLAQHQRVHTGEKPYECIECGKAFSDCSSLAHHRRIHTGKRPYECIDCGKAFRQNASLIRHRRYYHTGEKPFDCIDCGKAFTDHIGLIQHKRTHTGERPYKCNVCGKAFSHGSSLTVHQRIHTGEKPYECNICEKAFSHRGSLTLHQRVHTGEKPYECKECGKAFRQSTHLAHHQRIHTGEKPYECKECSKTFSQNAHLAQHQKIHTGEKPYECKECGKAFSQIAHLVQHQRVHTGEKPYECIECGKAFSDGSYLVQHQRLHSGKRPYECLECGKAFRQRASLICHQRCHTGEKPYECNVCGKAFSHRKSLTLHQRIHTGEKPYECKECSKAFSQVAHLTLHKRIHTGERPYECKECGKAFRQSVHLAHHQRIHTGESSVILSSALPYHQVL

SEQ ID NO: 10175 - protein, 549 aa, Homo sapiens
MPVDLGQALGLLPSLAKAEDSQFSESDAALQEELSSPETARQLFRQFRYQVMSGPHETLKQLRKLCFQWLQPEVHTKEQILEILMLEQFLTILPGEIQMWVRKQCPGSGEEAVTLVESLKGDPQRLWQWISIQVLGQDILSEKMESPSCQVGEVEPHLEVVPQELGLENSSSGPGELLSHIVKEESDTEAELALAASQPARLEERLIRDQDLGASLLPAAPQEQWRQLDSTQKEQYWDLMLETYGKMVSGAGISHPKSDLTNSIEFGEELAGIYLHVNEKIPRPTCIGDRQENDKENLNLENHRDQELLHASCQASGEVPSQASLRGFFTEDEPGCFGEGENLPEALQNIQDEGTGEQLSPQERISEKQLGQHLPNPHSGEMSTMWLEEKRETSQKGQPRAPMAQKLPTCRECGKTFYRNSQLIFHQRTHTGETYFQCTICKKAFLRSSDFVKHQRTHTGEKPCKCDYCGKGFSDFSGLRHHEKIHTGEKPYKCPICEKSFIQRSNFNRHQRVHTGEKPYKCSHCGKSFSWSSSLDKHQRSHLGKKPFQ

SEQ ID NO: 10176 - protein, 548 aa, Homo sapiens
MPVDLGQALGLLPSLAKAEDSQFSESDAALQEELSSPETARQLFRQFRYQVMSGPHETLKQLRKLCFQWLQPEVHTKEQILEILMLEQFLTILPGEIQMWVRKQCPGSGEEAVTLVESLKGDPQRLWQWISIQVLGQDILSEKMESPSCQVGEVEPHLEVVPQELGLENSSSGPGELLSHIVKEESDTEAELALAASQPARLEERLIRDQDLGASLLPAAPQEQWRQLDSTQKEQYWDLMLETYGKMVSGGISHPKSDLTNSIEFGEELAGIYLHVNEKIPRPTCIGDRQENDKENLNLENHRDQELLHASCQASGEVPSQASLRGFFTEDEPGCFGEGENLPEALQNIQDEGTGEQLSPQERISEKQLGQHLPNPHSGEMSTMWLEEKRETSQKGQPRAPMAQKLPTCRECGKTFYRNSQLIFHQRTHTGETYFQCTICKKAFLRSSDFVKHQRTHTGEKPCKCDYCGKGFSDFSGLRHHEKIHTGEKPYKCPICEKSFIQRSNFNRHQRVHTGEKPYKCSHCGKSFSWSSSLDKHQRSHLGKKPFQ

SEQ ID NO: 10177 - protein, 452 aa, Homo sapiens
MFATSGAVAAGKPYSCSECGKSFCYSSVLLRHERAHGGDGRFRCLECGERCARAADLRAHRRTHAGQTLYICSECGQSFRHSGRLDLHLGAHRQRCRTCPCRTCGRRFPHLPALLLHRRRQHLPERPRRCPLCARTFRQSALLFHQARAHPLGTTSDPAAPPHRCAQCPRAFRSGAGLRSHARIHVSRSPTRPRVSDAHQCGVCGKCFGKSSTLTRHLQTHSGEKPFKCPECGKGFLESATLVRHQRTHTGEKPYACGDCGRCFSESSTLLRHRRSHQGERPHACATCGKGFGQRSDLVVHQRIHTGEKPFACPECGRRFSDRSDLTKHRRTHTGEKPYRCELCGKRFTCVSNLNVHRRNHAGHKPHKCPECSKAFSVASKLALHRKTHLGERPAECAECGKCFSHSRSLSQHQRAHTRARTAAAVAIQSAVGTALVFEGPAEQEKPGFSVS

SEQ ID NO: 10178 - protein, 865 aa, Homo sapiens
MSLQDSTLSREGKPEGEIMAAVFFSVGRLSPEVTQPDEDLHLQAEETQLVKESVTFKDVAIDFTLEEWRLMDPTQRNLHKDVMLENYRNLVSLGLAVSKPDMISHLENGKGPWVTVREISRIPYPDMEPKPATKKATRTKAISEDLSQEAILEKLTENGLWDSRMEGLWKWNDRILRLQNNQENHLSQRIIPLKKTPTSQRGFRFESILIPEPGIATEELHSRCQTQEENFTENLNLITDTHLGKIICKEMKGSKAIRQTSELTLGKKSNNKEKPYKCSTCEKAFHYRSLLIQHQRTHTKEKPYECNECGKTFSQPSYLSQHKKIHTGEKPYKCNECGKAFIASSSLMVHQRIHTKEKPYQCNVCGKSFSQCARLNQHQRIQTGEKPYKCSECGKAFSDKSKLARHQETHNGEKPYKCDDCGKAFRNKSYLSVHQKTHTEEKPYQCNECGKSFKNTTIFNVHQRIHTGEKPFRCNECGKAYRSNSSLIVHIRTHTGEKPYECNECGKAFNRIANFTEHQRIHTGEKPYKCNECGKAFINYSCLTVHHRMHTGEKPYKCTECGKAFMRSSSLIIHQRIHTEEKPYLCNECGESFRIKSHLTVHQRIHTGEKPYKCTDCERAFTKMVNLKEHQKIHTGVKPYKCYDCGKSFRTKSYLIVHQRTHTGEKPYKCNECEKAFTNTSQLTVHQRRHTGEKPYKCNECGKVFTSNSGFNTHQRTHTGEKPFKCNDCGKAFSQMVHVTEHQKIHSGEKPYKCDVCGKAFRRGSYLTVHWRTHTGEKPYTCKECGKGCITLSQLTLHQRIHTGERPYKCEECGKAFRTNSDFTVHLRMHTGEKPYKCNECGKAFRSSSSLTVHQRIHQRETQLI

SEQ ID NO: 10179 - protein, 739 aa, Homo sapiens
MEPKPATKKATRTKAISEDLSQEAILEKLTENGLWDSRMEGLWKWNDRILRLQNNQENHLSQRIIPLKKTPTSQRGFRFESILIPEPGIATEELHSRCQTQEENFTENLNLITDTHLGKIICKEMKGSKAIRQTSELTLGKKSNNKEKPYKCSTCEKAFHYRSLLIQHQRTHTKEKPYECNECGKTFSQPSYLSQHKKIHTGEKPYKCNECGKAFIASSSLMVHQRIHTKEKPYQCNVCGKSFSQCARLNQHQRIQTGEKPYKCSECGKAFSDKSKLARHQETHNGEKPYKCDDCGKAFRNKSYLSVHQKTHTEEKPYQCNECGKSFKNTTIFNVHQRIHTGEKPFRCNECGKAYRSNSSLIVHIRTHTGEKPYECNECGKAFNRIANFTEHQRIHTGEKPYKCNECGKAFINYSCLTVHHRMHTGEKPYKCTECGKAFMRSSSLIIHQRIHTEEKPYLCNECGESFRIKSHLTVHQRIHTGEKPYKCTDCERAFTKMVNLKEHQKIHTGVKPYKCYDCGKSFRTKSYLIVHQRTHTGEKPYKCNECEKAFTNTSQLTVHQRRHTGEKPYKCNECGKVFTSNSGFNTHQRTHTGEKPFKCNDCGKAFSQMVHVTEHQKIHSGEKPYKCDVCGKAFRRGSYLTVHWRTHTGEKPYTCKECGKGCITLSQLTLHQRIHTGERPYKCEECGKAFRTNSDFTVHLRMHTGEKPYKCNECGKAFRSSSSLTVHQRIHQRETQLI

SEQ ID NO: 10180 - protein, 759 aa, Homo sapiens
MVHFLHPGHTPRNIVPPDAQKDALGCCVVQEEASPYTLVNICLNVLIANLEKLCSERPDGTLCLPEHWSFPQEVAERFLRVMTWQGKLTDRTASIFRGNQMKLKLVNIQKAKISTAAFIKAFCRHKLIELNATAVHADLPVPDIISGLCSNRWIQQNLQCLLLDSTSIPQNSRLLFFSQLTGLRILSVFNVCFHTEDLANVSQLPRLESLDISNTLVTDISALLTCKDRLKSLTMHYLKCLAMTKSQILAVIRELKCLLHLDISDHRQLKSDLAFHLLQQKDILPNVVSLDISGGNCITDEAVELFIRLRPAMQFVGLLATDAGSSDFFTTKQGLRVAGGASMSQISEALSRYRNRSCFVKEALHRLFTETFSMEVTMPAILKLVAIGMRNHPLDLRVQFTASACALNLTRQGLAKGMPVRLLSEVTCLLFKALKNFPHYQQLQKNCLLSLTNSRILVDVPFDRFDAAKFVMRWLCKHENPKMQTMAVSVTSILALQLSPEQTAQLEELFMAVKELLAIVKQKTTENLDDVTFLFTLKALWNLTDGSPAACKHFIENQGLQIFIQVLETFSESAIQSKVLGLLNNIAEVRELSSKLVTEDVLKHINSLLCSREMEVSYFAAGIIAHLTSDRQLWISRDFQRRTLLQDLHATIQNWPSSSCKMTALVTYRSFKTFFPLLGNFSQPEVQLWALWAMYHVCSKNPSKYCKMLVEEEGLQLLCDIQEHSEATPKAQQIAASILDDFRMHFMNYQRPTLCQMPF

SEQ ID NO: 10181 - protein, 417 aa, Homo sapiens
MSQISEALSRYRNRSCFVKEALHRLFTETFSMEVTMPAILKLVAIGMRNHPLDLRVQFTASACALNLTRQGLAKGMPVRLLSEVTCLLFKALKNFPHYQQLQKNCLLSLTNSRILVDVPFDRFDAAKFVMRWLCKHENPKMQTMAVSVTSILALQLSPEQTAQLEELFMAVKELLAIVKQKTTENLDDVTFLFTLKALWNLTDGSPAACKHFIENQGLQIFIQVLETFSESAIQSKVLGLLNNIAEVRELSSKLVTEDVLKHINSLLCSREMEVSYFAAGIIAHLTSDRQLWISRDFQRRTLLQDLHATIQNWPSSSCKMTALVTYRSFKTFFPLLGNFSQPEVQLWALWAMYHVCSKNPSKYCKMLVEEEGLQLLCDIQEHSEATPKAQQIAASILDDFRMHFMNYQRPTLCQMPF

SEQ ID NO: 10182 - protein, 779 aa, Homo sapiens
MASFVTEVLAHSGRLEKEDLGTRISRLTRRVEEIKGEVCNMISKKYSEFLPSMQSAQGLITQVDKLSEDIDLLKSRIESEVRRDLHVSTGEFTDLKQQLERDSVVLSLLKQLQEFSTAIEEYNCALTEKKYVTGAQRLEEAQKCLKLLKSRKCFDLKILKSLSMELTIQKQNILYHLGEEWQKLIVWKFPPSKDTSSLESYLQTELHLYTEQSHKEEKTPMPPISSVLLAFSVLGELHSKLKSFGQMLLKYILRPLASCPSLHAVIESQPNIVIIRFESIMTNLEYPSPSEVFTKIRLVLEVLQKQLLDLPLDTDLENEKTSTVPLAEMLGDMIWEDLSECLIKNCLVYSIPTNSSKLQQYEEIIQSTEEFENALKEMRFLKGDTTDLLKYARNINSHFANKKCQDVIVAARNLMTSEIHNTVKIIPDSKINVPELPTPDEDNKLEVQKVSNTQYHEVMNLEPENTLDQHSFSLPTCRISESVKKLMELAYQTLLEATTSSDQCAVQLFYSVRNIFHLFHDVVPTYHKENLQKLPQLAAIHHNNCMYIAHHLLTLGHQFRLRLAPILCDGTATFVDLVPGFRRLGTECFLAQMRAQKGELLERLSSARNFSNMDDEENYSAASKAVRQVLHQLKRLGIVWQDVLPVNIYCKAMGTLLNTAISEVIGKITALEDISTEDGDRLYSLCKTVMDEGPQVFAPLSEESKNKKYQEEVPVYVPKWMPFKELMMMLQASLQEIGDRWADGKGPLAAAFSSSEVKALIRALFQNTERRAAALAKIK

SEQ ID NO: 10183 - protein, 672 aa, Homo sapiens
MASFVTEVLAHSGRLEKEDLGTRISRLTRRVEEIKGEVCNMISKKYSEFLPSMQSAQGLITQVDKLSEDIDLLKSRIESEVRRDLHVSTGEFTDLKQQLERDSVVLSLLKQLQEFSTAIEEYNCALTEKKYVTGAQRLEEAQKCLKLLKSRKCFDLKILKSLSMELTIQKQNILYHLGEEWQKLIVWKFPPSKDTSSLESYLQTELHLYTEQSHKEEKTPMPPISSVLLAFSVLGELHSKLKSFGQMLLKYILRPLASCPSLHAVIESQPNIVIIRFESIMTNLEYPSPSEVFTKIRLVLEVLQKQLLDLPLDTDLENEKTSTVPLAEMLGDMIWEDLSECLIKNCLVYSIPTNSSKLQQYEEIIQSTEEFENALKEMRFLKGDTTDLLKYARNINSHFANKKCQDVIVAARNLMTSEIHNTVKIIPDSKINVPELPTPDEDNKLEVQKVSNTQYHEVMNLEPENTLDQHSFSLPTCRISESVKKLMELAYQTLLEATTSSDQCAVQLFYSVRNIFHLFHDVVPTYHKENLQKLPQLAAIHHNNCMYIAHHLLTLGHQFRLRLAPILCDGTATFVDLVPGFRRLGTECFLAQMRAQKGELLERLSSARNFSNMDDEENYSAASKAVRQVLHQLKRLGIVWQDVLPVNIYCKAMGTLLNTAISEVIGKITALE

SEQ ID NO: 10184 - protein, 1837 aa, Homo sapiens
MELMFAEWEDGERFSFEDSDRFEEDSLCSFISEAESLCQNWRGWRKQSAGPNSPTGGGGGGGSGGTRMRDGLVIPLVELSAKQVAFHIPFEVVEKVYPPVPEQLQLRIAFWSFPENEEDIRLYSCLANGSADEFQRGDQLFRMRAVKDPLQIGFHLSATVVPPQMVPPKGAYNVAVMFDRCRVTSCSCTCGAGAKWCTHVVALCLFRIHNASAVCLRAPVSESLSRLQRDQLQKFAQYLISELPQQILPTAQRLLDELLSSQSTAINTVCGAPDPTAGPSASDQSTWYLDESTLTDNIKKTLHKFCGPSPVVFSDVNSMYLSSTEPPAAAEWACLLRPLRGREPEGVWNLLSIVREMFKRRDSNAAPLLEILTDQCLTYEQITGWWYSVRTSASHSSASGHTGRSNGQSEVAAHACASMCDEMVTLWRLAVLDPALSPQRRRELCTQLRQWQLKVIENVKRGQHKKTLERLFPGFRPAVEACYFNWEEAYPLPGVTYSGTDRKLALCWARALPSRPGASRSGGLEESRDRPRPLPTEPAVRPKEPGTKRKGLGEGVPSSQRGPRRLSAEGGDKALHKMGPGGGKAKALGGAGSGSKGSAGGGSKRRLSSEDSSLEPDLAEMSLDDSSLALGAEASTFGGFPESPPPCPLHGGSRGPSTFLPEPPDTYEEDGGVYFSEGPEPPTASVGPPGLLPGDVCTQDDLPSTDESGNGLPKTKEAAPAVGEEDDDYQAYYLNAQDGAGGEEEKAEGGAGEEHDLFAGLKPLEQESRMEVLFACAEALHAHGYSSEASRLTVELAQDLLANPPDLKVEPPPAKGKKNKVSTSRQTWVATNTLSKAAFLLTVLSERPEHHNLAFRVGMFALELQRPPASTKALEVKLAYQESEVAALLKKIPLGPSEMSTMRCRAEELREGTLCDYRPVLPLMLASFIFDVLCAPGSRPPSRNWNSETPGDEELGFEAAVAALGMKTTVSEAEHPLLCEGTRREKGDLALALMITYKDDQAKLKKILDKLLDRESQTHKPQTLSSFYSSSRPTTASQRSPSKHGGPSAPGALQPLTSGSAGPAQPGSVAGAGPGPTEGFTEKNVPESSPHSPCEGLPSEAALTPRPEGKVPSRLALGSRGGYNGRGWGSPGRPKKKHTGMASIDSSAPETTSDSSPTLSRRPLRGGWAPTSWGRGQDSDSISSSSSDSLGSSSSSGSRRASASGGARAKTVEVGRYKGRRPESHAPHVPNQPSEAAAHFYFELAKTVLIKAGGNSSTSIFTHPSSSGGHQGPHRNLHLCAFEIGLYALGLHNFVSPNWLSRTYSSHVSWITGQAMEIGSAALTILVECWDGHLTPPEVASLADRASRARDSNMVRAAAELALSCLPHAHALNPNEIQRALVQCKEQDNLMLEKACMAVEEAAKGGGVYPEVLFEVAHQWFWLYEQTAGGSSTAREGATSCSASGIRAGGEAGRGMPEGRGGPGTEPVTVAAAAVTAAATVVPVISVGSSLYPGPGLGHGHSPGLHPYTALQPHLPCSPQYLTHPAHPAHPMPHMPRPAVFPVPSSAYPQGVHPAFLGAQYPYSVTPPSLAATAVSFPVPSMAPITVHPYHTEPGLPLPTSVACELWGQGTVSSVHPASTFPAIQGASLPALTTQPSPLVSGGFPPPEEETHSQPVNPHSLHHLHAAYRVGMLALEMLGRRAHNDHPNNFSRSPPYTDDVKWLLGLAAKLGVNYVHQFCVGAAKGVLSPFVLQEIVMETLQRLSPAHAHNHLRAPAFHQLVQRCQQAYMQYIHHRLIHLTPADYDDFVNAIRSARSAFCLTPMGMMQFNDILQNLKRSKQTKELWQRVSLEMATFSP

SEQ ID NO: 10185 - protein, 1892 aa, Homo sapiens
MELMFAEWEDGERFSFEDSDRFEEDSLCSFISEAESLCQNWRGWRKQSAGPNSPTGGGGGGGSGGTRMRDGLVIPLVELSAKQVAFHIPFEVVEKVYPPVPEQLQLRIAFWSFPENEEDIRLYSCLANGSADEFQRGDQLFRMRAVKDPLQIGFHLSATVVPPQMVPPKGAYNVAVMFDRCRVTSCSCTCGAGAKWCTHVVALCLFRIHNASAVCLRAPVSESLSRLQRDQLQKFAQYLISELPQQILPTAQRLLDELLSSQSTAINTVCGAPDPTAGPSASDQSTWYLDESTLTDNIKKTLHKFCGPSPVVFSDVNSMYLSSTEPPAAAEWACLLRPLRGREPEGVWNLLSIVREMFKRRDSNAAPLLEILTDQCLTYEQITGWWYSVRTSASHSSASGHTGRSNGQSEVAAHACASMCDEMVTLWRLAVLDPALSPQRRRELCTQLRQWQLKVIENVKRGQHKKTLERLFPGFRPAVEACYFNWEEAYPLPGVTYSGTDRKLALCWARALPSRPGASRSGGLEESRDRPRPLPTEPAVRPKEPGTKRKGLGEGVPSSQRGPRRLSAEGGDKALHKMGPGGGKAKALGGAGSGSKGSAGGGSKRRLSSEDSSLEPDLAEMSLDDSSLALGAEASTFGGFPESPPPCPLHGGSRGPSTFLPEPPDTYEEDGGVYFSEGPEPPTASVGPPGLLPGDVCTQDDLPSTDESGNGLPKTKEAAPAVGEEDDDYQAYYLNAQDGAGGEEEKAEGGAGEEHDLFAGLKPLEQESRMEVLFACAEALHAHGYSSEASRLTVELAQDLLANPPDLKVEPPPAKGKKNKVSTSRQTWVATNTLSKAAFLLTVLSERPEHHNLAFRVGMFALELQRPPASTKALEVKLAYQESEVAALLKKIPLGPSEMSTMRCRAEELREGTLCDYRPVLPLMLASFIFDVLCAPGSRPPSRNWNSETPGDEELGFEAAVAALGMKTTVSEAEHPLLCEGTRREKGDLALALMITYKDDQAKLKKILDKLLDRESQTHKPQTLSSFYSSSRPTTASQRSPSKHGGPSAPGALQPLTSGSAGPAQPGSVAGAGPGPTEGFTEKNVPESSPHSPCEGLPSEAALTPRPEGKVPSRLALGSRGGYNGRGWGSPGRPKKKHTGMASIDSSAPETTSDSSPTLSRRPLRGGWAPTSWGRGQDSDSISSSSSDSLGSSSSSGSRRASASGGARAKTVEVGRYKGRRPESHAPHVPNQPSEAAAHFYFELAKTVLIKAGGNSSTSIFTHPSSSGGHQGPHRNLHLCAFEIGLYALGLHNFVSPNWLSRTYSSHVSWITGQAMEIGSAALTILVECWDGHLTPPEVASLADRASRARDSNMVRAAAELALSCLPHAHALNPNEIQRALVQCKEQDNLMLEKACMAVEEAAKGGGVYPEVLFEVAHQWFWLYEQTAGGSSTAREGATSCSASGIRAGGEAGRGMPEGRGGPGTEPVTVAAAAVTAAATVVPVISVGSSLYPGPGLGHGHSPGLHPYTALQPHLPCSPQYLTHPAHPAHPMPHMPRPAVFPVPSSAYPQGVHPAFLGAQYPYSVTPPSLAATAVSFPVPSMAPITVHPYHTEPGLPLPTSVALSSVHPASTFPAIQGASLPALTTQPSPLVSGGFPPPEEETHSQPVNPHSLHHLHAAYRVGMLALEMLGRRAHNDHPNNFSRSPPYTDDVKWLLGLAAKLGDRHGDAAAAESRSCPQPPACPGLPPTGAALPAGIHAVHPPPLDSPDSCGLRRLCECDPECPQRLLPDAHGHDAVQRHPTEPQAQQTDQGAVAAGLTRDGHLLPLSLSPLGSYTGTQACGYGGPSHRGSETWLDRSSSLSSLVAQTDSCSWAIAWGQDVSHPRSLGLGETALSGRGRWVASGIYLAFINI

SEQ ID NO: 10186 - protein, 1841 aa, Homo sapiens
MELMFAEWEDGERFSFEDSDRFEEDSLCSFISEAESLCQNWRGWRKQSAGPNSPTGGGGGGGSGGTRMRDGLVIPLVELSAKQVAFHIPFEVVEKVYPPVPEQLQLRIAFWSFPENEEDIRLYSCLANGSADEFQRGDQLFRMRAVKDPLQIGFHLSATVVPPQMVPPKGAYNVAVMFDRCRVTSCSCTCGAGAKWCTHVVALCLFRIHNASAVCLRAPVSESLSRLQRDQLQKFAQYLISELPQQILPTAQRLLDELLSSQSTAINTVCGAPDPTAGPSASDQSTWYLDESTLTDNIKKTLHKFCGPSPVVFSDVNSMYLSSTEPPAAAEWACLLRPLRGREPEGVWNLLSIVREMFKRRDSNAAPLLEILTDQCLTYEQITGWWYSVRTSASHSSASGHTGRSNGQSEVAAHACASMCDEMVTLWRLAVLDPALSPQRRRELCTQLRQWQLKVIENVKRGQHKKTLERLFPGFRPAVEACYFNWEEAYPLPGVTYSGTDRKLALCWARALPSRPGASRSGGLEESRDRPRPLPTEPAVRPKEPGTKRKGLGEGVPSSQRGPRRLSAEGGDKALHKMGPGGGKAKALGGAGSGSKGSAGGGSKRRLSSEDSSLEPDLAEMSLDDSSLALGAEASTFGGFPESPPPCPLHGGSRGPSTFLPEPPDTYEEDGGVYFSEGPEPPTASVGPPGLLPGDVCTQDDLPSTDESGNGLPKTKEAAPAVGEEDDDYQAYYLNAQDGAGGEEEKAEGGAGEEHDLFAGLKPLEQESRMEVLFACAEALHAHGYSSEASRLTVELAQDLLANPPDLKVEPPPAKGKKNKVSTSRQTWVATNTLSKAAFLLTVLSERPEHHNLAFRVGMFALELQRPPASTKALEVKLAYQESEVAALLKKIPLGPSEMSTMRCRAEELREGTLCDYRPVLPLMLASFIFDVLCAPVVSPTGSRPPSRNWNSETPGDEELGFEAAVAALGMKTTVSEAEHPLLCEGTRREKGDLALALMITYKDDQAKLKKVTASVFQILDKLLDRESQTHKPQTLSSFYSSSRPTTASQRSPSKHGGPSAPGALQPLTSGSAGPAQPGSVAGAGPGPTEGFTEKNVPESSPHSPCEGLPSEAALTPRPEGKVPSRLALGSRGGYNGRGWGSPGRPKKKHTGMASIDSSAPETTSDSSPTLSRRPLRGGWAPTSWGRGQDSDSISSSSSDSLGSSSSSGSRRASASGGARAKTVEVGRYKGRRPESHAPHVPNQPSEAAAHFYFELAKTVLIKAGGNSSTSIFTHPSSSGGHQGPHRNLHLCAFEIGLYALGLHNFVSPNWLSRTYSSHVSWITGQAMEIGSAALTILVECWDGHLTPPEVASLADRASRARDSNMVRAAAELALSCLPHAHALNPNEIQRALVQCKEQDNLMLEKACMAVEEAAKGGGVYPEVLFEVAHQWFWLYEQTAGGSSTAREGATSCSASGIRAGGEAGRGMPEGRGGPGTEPVTVAAAAVTAAATVVPVISVGSSLYPGPGLGHGHSPGLHPYTALQPHLPCSPQYLTHPAHPAHPMPHMPRPAVFPVPSSAYPQGVHPAFLGAQYPYSVTPPSLAATAVSFPVPSMAPITVHPYHTEPGLPLPTSVALSSVHPASTFPAIQGASLPALTTQPSPLVSGGFPPPEEETHSQPVNPHSLHHLHAAYRVGMLALEMLGRRAHNDHPNNFSRSPPYTDDVKWLLGLAAKLGVNYVHQFCVGAAKGVLSPFVLQEIVMETLQRLSPAHAHNHLRAPAFHQLVQRCQQAYMQYIHHRLIHLTPADYDDFVNAIRSARSAFCLTPMGMMQFNDILQNLKRSKQTKELWQRVSLEMATFSP

SEQ ID NO: 10187 - protein, 1842 aa, Homo sapiens
MELMFAEWEDGERFSFEDSDRFEEDSLCSFISEAESLCQNWRGWRKQSAGPNSPTGGGGGGGSGGTRMRDGLVIPLVELSAKQVAFHIPFEVVEKVYPPVPEQLQLRIAFWSFPENEEDIRLYSCLANGSADEFQRGDQLFRMRAVKDPLQIGFHLSATVVPPQMVPPKGAYNVAVMFDRCRVTSCSCTCGAGAKWCTHVVALCLFRIHNASAVCLRAPVSESLSRLQRDQLQKFAQYLISELPQQILPTAQRLLDELLSSQSTAINTVCGAPDPTAGPSASDQSTWYLDESTLTDNIKKTLHKFCGPSPVVFSDVNSMYLSSTEPPAAAEWACLLRPLRGREPEGVWNLLSIVREMFKRRDSNAAPLLEILTDQCLTYEQITGWWYSVRTSASHSSASGHTGRSNGQSEVAAHACASMCDEMVTLWRLAVLDPALSPQRRRELCTQLRQWQLKVIENVKRGQHKKTLERLFPGFRPAVEACYFNWEEAYPLPGVTYSGTDRKLALCWARALPSRPGASRSGGLEESRDRPRPLPTEPAVRPKEPGTKRKGLGEGVPSSQRGPRRLSAEGGDKALHKMGPGGGKAKALGGAGSGSKGSAGGGSKRRLSSEDSSLEPDLAEMSLDDSSLALGAEASTFGGFPESPPPCPLHGGSRGPSTFLPEPPDTYEEDGGVYFSEGPEPPTASVGPPGLLPGDVCTQDDLPSTDESGNGLPKTKEAAPAVGEEDDDYQAYYLNAQDGAGGEEEKAEGGAGEEHDLFAGLKPLEQESRMEVLFACAEALHAHGYSSEASRLTVELAQDLLANPPDLKVEPPPAKGKKNKVSTSRQTWVATNTLSKAAFLLTVLSERPEHHNLAFRVGMFALELQRPPASTKALEVKLAYQESEVAALLKKIPLGPSEMSTMRCRAEELREGTLCDYRPVLPLMLASFIFDVLCAPVVSPTGSRPPSRNWNSETPGDEELGFEAAVAALGMKTTVSEAEHPLLCEGTRREKGDLALALMITYKDDQAKLKKILDKLLDRESQTHKPQTLSSFYSSSRPTTASQRSPSKHGGPSAPGALQPLTSGSAGPAQPGSVAGAGPGPTEGFTEKNVPESSPHSPCEGLPSEAALTPRPEGKVPSRLALGSRGGYNGRGWGSPGRPKKKHTGMASIDSSAPETTSDSSPTLSRRPLRGGWAPTSWGRGQDSDSISSSSSDSLGSSSSSGSRRASASGGARAKTVEVGRYKGRRPESHAPHVPNQPSEAAAHFYFELAKTVLIKAGGNSSTSIFTHPSSSGGHQGPHRNLHLCAFEIGLYALGLHNFVSPNWLSRTYSSHVSWITGQAMEIGSAALTILVECWDGHLTPPEVASLADRASRARDSNMVRAAAELALSCLPHAHALNPNEIQRALVQCKEQDNLMLEKACMAVEEAAKGGGVYPEVLFEVAHQWFWLYEQTAGGSSTAREGATSCSASGIRAGGEAGRGMPEGRGGPGTEPVTVAAAAVTAAATVVPVISVGSSLYPGPGLGHGHSPGLHPYTALQPHLPCSPQYLTHPAHPAHPMPHMPRPAVFPVPSSAYPQGVHPAFLGAQYPYSVTPPSLAATAVSFPVPSMAPITVHPYHTEPGLPLPTSVACELWGQGTVSSVHPASTFPAIQGASLPALTTQPSPLVSGGFPPPEEETHSQPVNPHSLHHLHAAYRVGMLALEMLGRRAHNDHPNNFSRSPPYTDDVKWLLGLAAKLGVNYVHQFCVGAAKGVLSPFVLQEIVMETLQRLSPAHAHNHLRAPAFHQLVQRCQQAYMQYIHHRLIHLTPADYDDFVNAIRSARSAFCLTPMGMMQFNDILQNLKRSKQTKELWQRVSLEMATFSP

SEQ ID NO: 10188 - protein, 1829 aa, Homo sapiens
MELMFAEWEDGERFSFEDSDRFEEDSLCSFISEAESLCQNWRGWRKQSAGPNSPTGGGGGGGSGGTRMRDGLVIPLVELSAKQVAFHIPFEVVEKVYPPVPEQLQLRIAFWSFPENEEDIRLYSCLANGSADEFQRGDQLFRMRAVKDPLQIGFHLSATVVPPQMVPPKGAYNVAVMFDRCRVTSCSCTCGAGAKWCTHVVALCLFRIHNASAVCLRAPVSESLSRLQRDQLQKFAQYLISELPQQILPTAQRLLDELLSSQSTAINTVCGAPDPTAGPSASDQSTWYLDESTLTDNIKKTLHKFCGPSPVVFSDVNSMYLSSTEPPAAAEWACLLRPLRGREPEGVWNLLSIVREMFKRRDSNAAPLLEILTDQCLTYEQITGWWYSVRTSASHSSASGHTGRSNGQSEVAAHACASMCDEMVTLWRLAVLDPALSPQRRRELCTQLRQWQLKVIENVKRGQHKKTLERLFPGFRPAVEACYFNWEEAYPLPGVTYSGTDRKLALCWARALPSRPGASRSGGLEESRDRPRPLPTEPAVRPKEPGTKRKGLGEGVPSSQRGPRRLSAEGGDKALHKMGPGGGKAKALGGAGSGSKGSAGGGSKRRLSSEDSSLEPDLAEMSLDDSSLALGAEASTFGGFPESPPPCPLHGGSRGPSTFLPEPPDTYEEDGGVYFSEGPEPPTASVGPPGLLPGDVCTQDDLPSTDESGNGLPKTKEAAPAVGEEDDDYQAYYLNAQDGAGGEEEKAEGGAGEEHDLFAGLKPLEQESRMEVLFACAEALHAHGYSSEASRLTVELAQDLLANPPDLKVEPPPAKGKKNKVSTSRQTWVATNTLSKAAFLLTVLSERPEHHNLAFRVGMFALELQRPPASTKALEVKLAYQESEVAALLKKIPLGPSEMSTMRCRAEELREGTLCDYRPVLPLMLASFIFDVLCAPGSRPPSRNWNSETPGDEELGFEAAVAALGMKTTVSEAEHPLLCEGTRREKGDLALALMITYKDDQAKLKKILDKLLDRESQTHKPQTLSSFYSSSRPTTASQRSPSKHGGPSAPGALQPLTSGSAGPAQPGSVAGAGPGPTEGFTEKNVPESSPHSPCEGLPSEAALTPRPEGKVPSRLALGSRGGYNGRGWGSPGRPKKKHTGMASIDSSAPETTSDSSPTLSRRPLRGGWAPTSWGRGQDSDSISSSSSDSLGSSSSSGSRRASASGGARAKTVEVGRYKGRRPESHAPHVPNQPSEAAAHFYFELAKTVLIKAGGNSSTSIFTHPSSSGGHQGPHRNLHLCAFEIGLYALGLHNFVSPNWLSRTYSSHVSWITGQAMEIGSAALTILVECWDGHLTPPEVASLADRASRARDSNMVRAAAELALSCLPHAHALNPNEIQRALVQCKEQDNLMLEKACMAVEEAAKGGGVYPEVLFEVAHQWFWLYEQTAGGSSTAREGATSCSASGIRAGGEAGRGMPEGRGGPGTEPVTVAAAAVTAAATVVPVISVGSSLYPGPGLGHGHSPGLHPYTALQPHLPCSPQYLTHPAHPAHPMPHMPRPAVFPVPSSAYPQGVHPAFLGAQYPYSVTPPSLAATAVSFPVPSMAPITVHPYHTEPGLPLPTSVALSSVHPASTFPAIQGASLPALTTQPSPLVSGGFPPPEEETHSQPVNPHSLHHLHAAYRVGMLALEMLGRRAHNDHPNNFSRSPPYTDDVKWLLGLAAKLGVNYVHQFCVGAAKGVLSPFVLQEIVMETLQRLSPAHAHNHLRAPAFHQLVQRCQQAYMQYIHHRLIHLTPADYDDFVNAIRSARSAFCLTPMGMMQFNDILQNLKRSKQTKELWQRVSLEMATFSP

SEQ ID NO: 10189 - protein, 376 aa, Homo sapiens
MLPLSIKDDEYKPPKFNLFGKISGWFRSILSDKTSRNLFFFLCLNLSFAFVELLYGIWSNCLGLISDSFHMFFDSTAILAGLAASVISKWRDNDAFSYGYVRAEVLAGFVNGLFLIFTAFFIFSEGVERALAPPDVHHERLLLVSILGFVVNLIGIFVFKHGGHGHSHGSGHGHSHSLFNGALDQAHGHVDHCHSHEVKHGAAHSHDHAHGHGHFHSHDGPSLKETTGPSRQILQGVFLHILADTLGSIGVIASAIMMQNFGLMIADPICSILIAILIVVSVIPLLRESVGILMQRTPPLLENSLPQCYQRVQQLQGVYSLQEQHFWTLCSDVYVGTLKLIVAPDADARWILSQTHNIFTQAGVRQLYVQIDFAAM

SEQ ID NO: 10190 - protein, 799 aa, Homo sapiens
MEIPKLLPARGTLQGGGGGGIPAGGGRVHRGPDSPAGQVPTRRLLLPRGPQDGGPGRRREEASTASRGPGPSLFAPRPHQPSGGGDDFFLVLLDPVGGDVETAGSGQAAGPVLREEAKAGPGLQGDESGANPAGCSAQGPHCLSAVPTPAPISAPGPAAAFAGTVTIHNQDLLLRFENGVLTLATPPPHAWEPGAAPAQQPRCLIAPQAGFPQAAHPGDCPELRSDLLLAEPAEPAPAPAPQEEAEGLAAALGPRGLLGSGPGVVLYLCPEALCGQTFAKKHQLKMHLLTHSSSQGQRPFKCPLGGCGWTFTTSYKLKRHLQSHDKLRPFGCPAEGCGKSFTTVYNLKAHMKGHEQENSFKCEVCEESFPTQAKLGAHQRSHFEPERPYQCAFSGCKKTFITVSALFSHNRAHFREQELFSCSFPGCSKQYDKACRLKIHLRSHTGERPFLCDFDGCGWNFTSMSKLLRHKRKHDDDRRFMCPVEGCGKSFTRAEHLKGHSITHLGTKPFVCPVAGCCARFSARSSLYIHSKKHLQDVDTWKSRCPISSCNKLFTSKHSMKTHMVKRHKVGQDLLAQLEAANSLTPSSELTSQRQNDLSDAEIVSLFSDVPDSTSAALLDTALVNSGILTIDVASVSSTLAGHLPANNNNSVGQAVDPPSLMATSDPPQSLDTSLFFGTAATGFQQSSLNMDEVSSVSVGPLGSLDSLAMKNSSPEPQALTPSSKLTVDTDTLTPSSTLCENSVSELLTPAKAEWSVHPNSDFFGQEGETQFGFPNAAGNHGSQKERNLITVTGSSFLV

SEQ ID NO: 10191 - protein, 2961 aa, Homo sapiens
MGNAPSHSSEDEAAAAGGEGWGPHQDWAAVSGTTPGPGVAAPALPPAAALLEPARLREAAAALLPTPPCESLVSRHRGALFRWLEERLGRGEESVTLEQFRELLEARGAGCSSEQFEEAFAQFDAEGDGTVDAENMLEALKNSSGANLQGELSHIIRQLQACSLVPGFTDIFSESKEGLDIHSSMILRFLHRNRLSSAVMPYPMLEHCNNMCTMRSSVLKESLDQLVQKEKESPGDLTRSPEMDKLKSVAKCYAYIETSSNSADIDKMTNGETSSYWQSDGSACSHWIRLKMKPDVVLRHLSIAVAATDQSYMPQQVTVAVGRNASDLQEVRDVHIPSNVTGYVTLLENANVSQLYVQINIKRCLSDGCDTRIHGLRAVGFQRVKKSGVSVSDASAIWYWSLLTSLVTASMETNPAFVQTVLHNTQKALRHMPPLSLSPGSTDFSTFLSPNVLEEVDSFLIRITSCCSTPEVELTLLAFALARGSVAKVMSSLCTITDHLDTQYDASSLILSMASVRQNLLLKYGKPLQLTLQACDVKGKEDKSGPENLLVEPWTRDGFLTETGKTRASTIFSTGTESAFQVTQIRIMVRRGGIGAQCGLVFAYNSSSDKFCAEEHFKRFEKYDKWKLQELRQFVKSRIGCSSDDLGEDDPIGWFELEEEWDEADVKLQQCRVAKYLMVKFLCTRQESAERLGVQGLTISGYLRPARAEAEQSVTCAHCRKDTEESVCGATLLLRTLQFIQQLAHDLVQQKESGLKYKSFLDFAGLDLQIFWNFYSKLKQNPREECVSAQTLLLQLLQSCFSVLQGDVLAASEEEKAPIQSPKGVEAAKELYTHLCDVVDKVDGDSVPMEILKQEVRNTLLNGAAIFFPNRQTRRNHLFTMMNVTEQEHKQSLQLTFRSLCTYFSDKDPGGLLLLPEKNDLAKMNISEVLAVMDTLVSVAARECELLMLSGAPGEVGSVLFSLFWSVQGSLLSWCYLQLKSTDSGAKDLAVDLIEKYVGQFLASMRAILESLFSQYSGKTIVERLCNSVFSMAARQLVIFLLDFCTLDIPHCVLLREFSVLTELLKKLCSGPEGGLRKLDVETWQQEQPVVLHTWTKESAHNYENNCHEVSVFVSPGATYFEVEFDDRCETEKRYDYLEFTDARGRKTRYDTKVGTDKWPKKVTFKAGPRLQFLFHSDSSHNEWGYKFTVTACGLPDVAVSWGLDLQLLVSRLMGRLASQCMALKSVRQLGSNMVVPQAKMALVLSSPLWKPVFRHQVCPELELEASWPTHPHRNSKEVKNIPDDPCRHFLLDFAQSEPAQNFCGPYSELFKGFIQACRKQAPKTDIVAGSTIDQAVNATFAALVYRTPDLYEKLQKYVNSGGKIALSEEFAQVYSLADGIRIWMLEMKQKSLMSLGNEAEEKHSSEATEVNPESLAKECIEKSLLLLKFLPTGISSKESCEKLETADETSHLQPLNKRQRTSSVVEEHFQASVSPTEAAPPATGDQSPGLGTQPKLPSSSGLPAADVSPATAEEPLSPSTPTRRPPFTRGRLRLLSFRSMEEARLVPTVKEKYPVLKDVMDFIKDQSLSHRSVVKVLSLRKAQAQSILEVLKITQHCAESLGQPHCFHPPFILFLLELLTCQKDFTNYFGHLEGCGADLHKEIRDTYYQLVLFLVKAVKGFSSLNDRSLLPALSCVQTALLHLLDMGWEPNDLAFFVDIQLPDLLMKMSQENISVHDSVISQWSEEDELADAKQNSEWMDECQDGMFEAWYEKIAQEDPEKQRKMHMFIARYCDLLNVDISCDGCDEIAPWHRYRCLQCSDMDLCKTCFLGGVKPEGHGDDHEMVNMEFTCDHCQGLIIGRRMNCNVCDDFDLCYGCYAAKKYSYGHLPTHSITAHPMVTIRISDRQRLIQPYIHNYSWLLFAALALYSAHLASAEDVDGEKLDPQTRSSATTLRSQCMQLVGDCLMKAHQGKGLKALALLGVLPDGDSSLEDQALPVTVPTGASEEQLEKKAVQGAELSEAGNGKRAVHEEIRPVDFKQRNKADKGVSLSKDPSCQTQISDSPADASPPTGLPDAEDSEVSSQKPIEEKAVTPSPEQVFAECSQKRILGLLAAMLPPLKSGPTVPLIDLEHVLPLMFQVVISNAGHLNETYHLTLGLLGQLIIRLLPAEVDAAVIKVLSAKHNLFAAGDSSIVPDGWKTTHLLFSLGAVCLDSRVGLDWACSMAEILRSLNSAPLWRDVIATFTDHCIKQLPFQLKHTNIFTLLVLVGFPQVLCVGTRCVYMDNANEPHNVIILKHFTEKNRAVIVDVKTRKRKTVKDYQLVQKGGGQECGDSRAQLSQYSQHFAFIASHLLQSSMDSHCPEAVEATWVLSLALKGLYKTLKAHGFEEIRATFLQTDLLKLLVKKCSKGTGFSKTWLLRDLEILSIMLYSSKKEINALAEHGDLELDERGDREEEVERPVSSPGDPEQKKLDPLEGLDEPTRICFLMAHDALNAPLHILRAIYELQMKKTDYFFLEVQKRFDGDELTTDERIRSLAQRWQPSKSLRLEEQSAKAVDTDMIILPCLSRPARCDQATAESNPVTQKLISSTESELQQSYAKQRRSKSAALLHKELNCKSKRAVRDYLFRVNEATAVLYARHVLASLLAEWPSHVPVSEDILELSGPAHMTYILDMFMQLEEKHEWEKILQKVLQGCREDMLGTMALAACQFMEEPGMEVQVRESKHPYNNNTNFEDKVHIPGAIYLSIKFDSQCNTEEGCDELAMSSSSDFQQDRHSFSGSQQKWKDFELPGDTLYYRFTSDMSNTEWGYRFTVTAGHLGRFQTGFEILKQMLSEERVVPHLPLAKIWEWLVGVACRQTGHQRLKAIHLLLRIVRCCGHSDLCDLALLKPLWQLFTHMEYGLFEDVTQPGILLPLHRALTELFFVTENRAQELGVLQDYLLALTTDDHLLRCAAQALQNIAAISLAINYPNKATRLWNVEC

SEQ ID NO: 10192 - protein, 811 aa, Homo sapiens
LFLLELLTCQKDFTNYFGHLEGCGADLHKEIRDTYYQLVLFLVKAVKGFSSLNDRSLLPALSCVQTALLHLLDMGWEPNDLAFFVDIQLPDLLMKMSQENISVHDSVISQWSEEDELADAKQNSEWMDECQDGMFEAWYEKIAQEDPEKQRKMHMFIARYCDLLNVDISCDGCDEIAPWHRYRCLQCSDMDLCKTCFLGGVKPEGHGDDHEMVNMEFTCDHCQGLIIGRRMNCNVCDDFDLCYGCYAAKKYSYGHLPTHSITAHPMVTIRISDRQRLIQPYIHNYSWLLFAALALYSAHLASAEDVDGEKLDPQTRSSATTLRSQCMQLVGDCLMKAHQGKGLKALALLGVLPDGDSSLEDQALPVTVPTGASEEQLEKKAVQGAELSEAGNGKRAVHEEIRPVDFKQRNKADKGVSLSKDPSCQTQISDSPADASPPTGLPDAEDSEVSSQKPIEEKAVTPSPEQVFAECSQKRILGLLAAMLPPLKSGPTVPLIDLEHVLPLMFQVVISNAGHLNETYHLTLGLLGQLIIRLLPAEVDAAVIKVLSAKHNLFAAGDSSIVPDGWKTTHLLFSLGAVCLDSRVGLDWACSMAEILRSLNSAPLWRDVIATFTDHCIKQLPFQLKHTNIFTLLVLVGFPQVLCVGTRCVYMDNANEPHNVIILKHFTEKNRAVIVDVKTRKRKTVKDYQLVQKGGGQECGDSRAQLSQYSQHFAFIASHLLQSSMDSHCPEAVEATWVLSLALKGLYKTLKAHGFEEIRATFLQTDLLKLLVKKCSKGTGFSKTWLLRDLEVRDERDSCSSFLVQMCWPRS

SEQ ID NO: 10193 - protein, 1085 aa, Homo sapiens
MGNAPSHSSEDEAAAAGGEGWGPHQDWAAVSGTTPGPGVAAPALPPAAALLEPARLREAAAALLPTPPCESLVSRHRGALFRWLEERLGRGEESVTLEQFRELLEARGAGCSSEQFEEAFAQFDAEGDGTVDAENMLEALKNSSGANLQGELSHIIRQLQACSLVPGFTDIFSESKEGLDIHSSMILRFLHRNRLSSAVMPYPMLEHCNNMCTMRSSVLKESLDQLVQKEKESPGDLTRSPEMDKLKSVAKCYAYIETSSNSADIDKMTNGETSSYWQSDGSACSHWIRLKMKPDVVLRHLSIAVAATDQSYMPQQVTVAVGRNASDLQEVRDVHIPSNVTGYVTLLENANVSQLYVQINIKRCLSDGCDTRIHGLRAVGFQRVKKSGVSVSDASAIWYWSLLTSLVTASMETNPAFVQTVLHNTQKALRHMPPLSLSPGSTDFSTFLSPNVLEEVDSFLIRITSCCSTPEVELTLLAFALARGSVAKVMSSLCTITDHLDTQYDASSLILSMASVRQNLLLKYGKPLQLTLQACDVKGKEDKSGPENLLVEPWTRDGFLTETGKTRASTIFSTGTESAFQVTQIRIMVRRGGIGAQCGLVFAYNSSSDKFCAEEHFKRFEKYDKWKLQELRQFVKSRIGCSSDDLGEDDPIGWFELEEEWDEADVKLQQCRVAKYLMVKFLCTRQESAERLGVQGLTISGYLRPARAEAEQSVTCAHCRKDTEESVCGATLLLRTLQFIQQLAHDLVQQKESGLKYKSFLDFAGLDLQIFWNFYSKLKQNPREECVSAQTLLLQLLQSCFSVLQGDVLAASEEEKAPIQSPKGVEAAKELYTHLCDVVDKVDGDSVPMEILKQEVRNTLLNGAAIFFPNRQTRRNHLFTMMKNVTEQEHKQSLQLTFRSLCTYFSDKDPGGLLLLPEKNDLAKMNISEVLAVMDTLVSVAARECELLMLSGAPGEVGSVLFSLFWSVQGSLLSWCYLQLKSTDSGAKDLAVDLIEKYVGQFLASMRAILESLFSQYSGKTIVERLCNSVFSMAARQLVIFLLDFCTLDIPHCVLLREFSVLTELLKKLCSGPEGGLRKVTRVST

SEQ ID NO: 10194 - protein, 465 aa, Homo sapiens
MTPVRMQHSLAGQTYAVPLIQPDLRREEAVQQMADALQYLQKVSGDIFSRISQQVEQSRSQVQAIGEKVSLAQAKIEKIKGSKKAIKVFSSAKYPAPERLQEYGSIFTGAQDPGLQRRPRHRIQSKHRPLDERALQEKLKDFPVCVSTKPEPEDDAEEGLGGLPSNISSVSSLLLFNTTENLYKKYVFLDPLAGAVTKTHVMLGAETEEKLFDAPLSISKREQLEQQVPENYFYVPDLGQVPEIDVPSYLPDLPGIANDLMYIADLGPGIAPSAPGTIPELPTFHTEVAEPLKVDLQDGVLTPPPPPPPPPPAPEVLASAPPLPPSTAAPVGQGARQDDSSSSASPSVQGAPREVVDPSGGRATLLESIRQAGGIGKAKLRSMKERKLEKKKQKEQEQVRATSQGGHLMSDLFNKLVMRRKGISGKGPGAGEGPGGAFARVSDSIPPLPPPQQPQAEEDEDDWES

SEQ ID NO: 10195 - protein, 513 aa, Homo sapiens
MASVLSRRLGKRSLLGARVLGPSASEGPSAAPPSEPLLEGAAPQPFTTSDDTPCQEQPKEVLKAPSTSGLQQVAFQPGQKVYVWYGGQECTGLVEQHSWMEGQVTVWLLEQKLQVCCRVEEVWLAELQGPCPQAPPLEPGAQALAYRPVSRNIDVPKRKSDAVEMDEMMAAMVLTSLSCSPVVQSPPGTEANFSASRAACDPWKESGDISDSGSSTTSGHWSGSSGVSTPSPPHPQASPKYLGDAFGSPQTDHGFETDPDPFLLDEPAPRKRKNSVKVMYKCLWPNCGKVLRSIVGIKRHVKALHLGDTVDSDQFKREEDFYYTEVQLKEESAAAAAAAAAGTPVPGTPTSEPAPTPSMTGLPLSALPPPLHKAQSSGPEHPGPESSLPSGALSKSAPGSFWHIQADHAYQALPSFQIPVSPHIYTSVSWAAAPSAACSLSPVRSRSLSFSEPQQPAPAMKSHLIVTSPPRAQSGARKARGEAKKCRKVYGIEHRDQWCTACRWKKACQRFLD

SEQ ID NO: 10196 - protein, 674 aa, Homo sapiens
MGPLTFTDVAIEFSLEEWQCLDTAQQNLYRNVMLENYRNLVFLGIAVSKPDLITCLEKEKEPCKMKRHEMVDEPPVVCSHFAEDFWPEQDIKDSFQKVTLRRYDKRGHENLQLRKGYKTVGDCKLYKGGYNGLNQCLTLTQSKMYHCDIYVKVFYAFSNADRYKTRHTGKKPFQCKKCGKSFCMLSQLTQHKKIHIRENTYRCKEFGNAFNQSSALTNHKRIYVGEKHYRCEECGKAFNHYSTLTNHKRIHTGEKPYKCKECGKAFSRYSTLTTHKRIHSGEKPYKCDECGKTFSISSTFTKHKIIHTEEKPYKCKECGKAFNRSSTLTSHKRIHTGEKPYKCEECGKAFNWSSTLTKHKVIHTGEKPYKCEECGKAFNQSSRLTRHKKIHTGEEPYKFEKCGRVFTCSSTLTQDKKIHTGEKPYNCEECGKVFTYSSTLTRHKRIHTEEKPYKCNECGKAFNRSSHLTSHRRIHTGEKPYKCEECGKAFKQSSNLNSHKKIHSGEKPYKCEECGKAFILSSRLTQHKKIHTGEKPYKCEECGKAFNRSSRLTQHKKIHTGEKPYKCKQCDKAFTHSSNLSSHKKIHSGEKPYKCEECGKAFNRSSRLTQHKKIHTREKPYKCEECAKAFTRSSRLTQHKKIHRMGVVAHACNPSTLGGRGGRITRSGDRDRPG

SEQ ID NO: 10197 - protein, 913 aa, Homo sapiens
MTKFQEMVTFKDVAVVFTEEELGLLDSVQRKLYRDVMLENFRNLLLVAHQPFKPDLISQLEREEKLLMVETETPRDGCSGRKNQQKMESIQEVTVSYFSPKELSSRQTWQQSAGGLIRCQDFLKVFQGKNSQLQEQGNSLGQVWAGIPVQISEDKNYIFTHIGNGSNYIKSQGYPSWRAHHSWRKMYLKESHNYQCRCQQISMKNHFCKCDSVSWLSHHNDKLEVHRKENYSCHDCGEDIMKVSLLNQESIQTEEKPYPCTGYRKAFSNDSSSEVHQQFHLEGKPYTYSSCGKGCNYSSLLHIHQNIEREDDIENSHLKSYQRVHTEEKPCKCGEYGENFNHCSPLNTYELIHTGEMSYRHNIYEKAFSHSLDLNSIFRVHTRDEPHEYEENENVFNQSSCLQVHQKIHTEEKLYTDIEYGKSFICSSNLDIQHRVHMEENSYNSEECGNGFSLASHFQDLQIVHTKEQPYKRYVCSNSFSHNLYLQGHPKIHIGEKPRKEHGNGFNWSSKLKDHQRVHTGQKPYKCNICGKGFNHRSVLNVHQRVHTGEKPYKCEECDKGFSRSSYLQAHQRVHTGEKPYKCEECGKGFSRNSYLQGHQRVHTGEKPYKCEECGKGFSRSSHLQGHQRVHTGEKPFKCEECGKGFSWSFNLQIHQRVHTGEKPYKCEECGKGFSKASTLLAHQRVHTGEKPYQCDECGKSFSQRSYLQSHQSVHSGERPYICEVCGKGFSQRAYLQGHQRVHTRVKPYKCEMCGKGFSQSSRLEAHRRVHTGGKPYKCEVCTKGFSESSRLQAHQRVHVEGRPYKCEQCGKGFSGYSSLQAHHRVHTGEKPYKCEVCGKGFSQRSNLQAHQRVHTGEKPYKCDACGKGFRWSSGLLIHQRVHSSDKFYKSEDYGKDYPSSENLHRNEDSVLF

SEQ ID NO: 10198 - protein, 907 aa, Homo sapiens
MVTFKDVAVVFTEEELGLLDSVQRKLYRDVMLENFRNLLLVAHQPFKPDLISQLEREEKLLMVETETPRDGCSGRKNQQKMESIQEVTVSYFSPKELSSRQTWQQSAGGLIRCQDFLKVFQGKNSQLQEQGNSLGQVWAGIPVQISEDKNYIFTHIGNGSNYIKSQGYPSWRAHHSWRKMYLKESHNYQCRCQQISMKNHFCKCDSVSWLSHHNDKLEVHRKENYSCHDCGEDIMKVSLLNQESIQTEEKPYPCTGYRKAFSNDSSSEVHQQFHLEGKPYTYSSCGKGCNYSSLLHIHQNIEREDDIENSHLKSYQRVHTEEKPCKCGEYGENFNHCSPLNTYELIHTGEMSYRHNIYEKAFSHSLDLNSIFRVHTRDEPHEYEENENVFNQSSCLQVHQKIHTEEKLYTDIEYGKSFICSSNLDIQHRVHMEENSYNSEECGNGFSLASHFQDLQIVHTKEQPYKRYVCSNSFSHNLYLQGHPKIHIGEKPRKEHGNGFNWSSKLKDHQRVHTGQKPYKCNICGKGFNHRSVLNVHQRVHTGEKPYKCEECDKGFSRSSYLQAHQRVHTGEKPYKCEECGKGFSRNSYLQGHQRVHTGEKPYKCEECGKGFSRSSHLQGHQRVHTGEKPFKCEECGKGFSWSFNLQIHQRVHTGEKPYKCEECGKGFSKASTLLAHQRVHTGEKPYQCDECGKSFSQRSYLQSHQSVHSGERPYICEVCGKGFSQRAYLQGHQRVHTRVKPYKCEMCGKGFSQSSRLEAHRRVHTGGKPYKCEVCTKGFSESSRLQAHQRVHVEGRPYKCEQCGKGFSGYSSLQAHHRVHTGEKPYKCEVCGKGFSQRSNLQAHQRVHTGEKPYKCDACGKGFRWSSGLLIHQRVHSSDKFYKSEDYGKDYPSSENLHRNEDSVLF

SEQ ID NO: 10199 - protein, 543 aa, Homo sapiens
MVRPQDTVAYEDLSEDYTQKKWKGLALSQRALHWNMMLENDRSMASLGRNMMESSELTPKQEIFKGSESSNSTSGGLFGVVPGGTETGDVCEDTFKELEGQPSNEEGSRLESDFLEIIDEDKKKSTKDRYEEYKEVEEHPPLSSSPVEHEGVLKGQKSYRCDECGKAFYWSSHLIGHRRIHTGEKPYECNECGKTFRQTSQLIVHLRTHTGEKPYECSECGKAYRHSSHLIQHQRLHNGEKPYKCNECAKAFNQSSKLFDHQRTHTGEKPYECKECGAAFSRSKNLVRHQFLHTGKKPYKCNECGRAFCSNRNLIDHQRTHTGEKPYKCNECGKAFSRSKCLIRHQSLHTGEKPYKCSECGKAFNQISQLVEHERIHTGEKPFKCSECGKAFGLSKCLIRHQRLHTSEKPYKCNECGKSFNQNSYLIIHQRIHTGEKPYECNECGKVFSYNSSLMVHQRTHTGEKPYKCNSCGKAFSDSSQLTVHQRVHTGEKNLMNVLSVGKPLVSVPLLITTSELMLERSPQVWLGHLLKAWFSETDSKDL

SEQ ID NO: 10200 - protein, 364 aa, Homo sapiens
MERGKKKRISNKLQQTFHHSKEPTFLINQAGLLSSDSYSSLSPETESVNPGENIKTDTQKKRPGTVILSKLSSRRIISESQLSPPVIPARRPGFRVCYICGREFGSQSIAIHEPQCLQKWHIENSKLPKHLRRPEPSKPQSLSSSGSYSLQATNEAAFQSAQAQLLPCESCGRTFLPDHLLVHHRSCKPKGEGPRAPHSNSSDHLTGLKKACSGTPARPRTVICYICGKEFGTLSLPIHEPKCLEKWKMENDRLPVELHQPLPQKPQPLPNAQSSQAGPNQAQLVFCPHCSRIFTSDRLLVHQRSCKTHPYGPKYQNLNLGSKGGLKEYTNSKQQRNRAAPSVTDKVIHATQDALGEPGGALCL

SEQ ID NO: 10201 - protein, 495 aa, Homo sapiens
MAKRPGPPGSREMGLLTFRDIAIEFSLAEWQCLDHAQQNLYRDVMLENYRNLVSLGIAVSKPDLITCLEQNKEPQNIKRNEMVAKHPVTCSHFTQDLQSEQGIKDSLQKVILRRYGKCGQEDLQVKKCCKSVGECEVHKGGYNYVNQCLSATQNKTFQTHKCVKVFGKFSNSNRHKTRHTGKKHFKCKNDGKSFCMLSRLNQHQIIHTREKSYKCEECGKSFNCSSTLTRHKRIHTGEKPYRCEECGKAFSWSASLTKHKRIHTGEKPYTCEERGKVFSRSTLTNYKRIHTGEKPYTCEECGKAFSRSSTLTNHKRIHTGERPYKCEECGKAFSLSSTLKKHKIVHTGEKLYTCEECGKAFTFSSTLNTHKRIHTGEKPYTCEECGKAFSLPSTFTYHKRTHTGEKPYKCEECGKAFNCSSTLKKHKIIHTGEKLYKCKECGKAFTFSSTLNTHKRIHTGEKPYKCEECDQTFKWHSSLANHKNMHTGEKPYKYE

SEQ ID NO: 10202 - protein, 576 aa, Homo sapiens
MDDLKYGVYPLKEASGCPGAERNLLVYSYFEKETLTFRDVAIEFSLEEWECLNPAQQNLYMNVMLENYKNLVFLGVAVSKQDPVTCLEQEKEPWNMKRHEMVDEPPAMCSYFTKDLWPEQDIKDSFQQVILRRYGKCEHENLQLRKGSASVDEYKVHKEGYNELNQCLTTTQSKIFPCDKYVKVFHKFLNANRHKTRHTGKKPFKCKKCGKSFCMLLHLSQHKRIHIRENSYQCEECGKAFKWFSTLTRHKRIHTGEKPFKCEECGKAFKQSSTLTTHKIIHTGEKPYRCEECGKAFNRSSHLTTHKIIHTGEKPYKCEECGKAFNQSSTLSTHKFIHAGEKPYKCEECDKAFNRFSYLTKHKIIHTGEKSYKCEECGKGFNWSSTLTKHKRIHTGEKPYKCEVCGKAFNESSNLTTHKMIHTGEKPYKCEECGKAFNRSPQLTAHKIIHTGEKPYKCEECGKAFSQSSILTTHKRIHTGEKPYKCEECGKAFNRSSNLTKHKIIHTGEKSYKCEECGKAFNQSSTLTKHRKIHTRQKPYNCEECDNTFNQSSNLIKQNNSYWRETLQMSRMWESL

SEQ ID NO: 10203 - protein, 609 aa, Homo sapiens
MAVGLCKAMSQGLVTFRDVALDFSQEEWEWLKPSQKDLYRDVMLENYRNLVWLGLSISKPNMISLLEQGKEPWMVERKMSQGHCADWESWCEIEELSPKWFIDEDEISQEMVMERLASHGLECSSFREAWKYKGEFELHQGNAERHFMQVTAVKEISTGKRDNEFSNSGRSIPLKSVFLTQQKVPTIQQVHKFDIYDKLFPQNSVIIEYKRLHAEKESLIGNECEEFNQSTYLSKDIGIPPGEKPYESHDFSKLLSFHSLFTQHQTTHFGKLPHGYDECGDAFSCYSFFTQPQRIHSGEKPYACNDCGKAFSHDFFLSEHQRTHIGEKPYECKECNKAFRQSAHLAQHQRIHTGEKPFACNECGKAFSRYAFLVEHQRIHTGEKPYECKECNKAFRQSAHLNQHQRIHTGEKPYECNQCGKAFSRRIALTLHQRIHTGEKPFKCSECGKTFGYRSHLNQHQRIHTGEKPYECIKCGKFFRTDSQLNRHHRIHTGERPFECSKCGKAFSDALVLIHHKRSHAGEKPYECNKCGKAFSCGSYLNQHQRIHTGEKPYECSECGKAFHQILSLRLHQRIHAGEKPYKCNECGNNFSCVSALRRHQRIHNRETL

SEQ ID NO: 10204 - protein, 577 aa, Homo sapiens
MAVGLCKAMSQGLVTFRDVALDFSQEEWEWLKPSQKDLYRDVMLENYRNLVWLDWESWCEIEELSPKWFIDEDEISQEMVMERLASHGLECSSFREAWKYKGEFELHQGNAERHFMQVTAVKEISTGKRDNEFSNSGRSIPLKSVFLTQQKVPTIQQVHKFDIYDKLFPQNSVIIEYKRLHAEKESLIGNECEEFNQSTYLSKDIGIPPGEKPYESHDFSKLLSFHSLFTQHQTTHFGKLPHGYDECGDAFSCYSFFTQPQRIHSGEKPYACNDCGKAFSHDFFLSEHQRTHIGEKPYECKECNKAFRQSAHLAQHQRIHTGEKPFACNECGKAFSRYAFLVEHQRIHTGEKPYECKECNKAFRQSAHLNQHQRIHTGEKPYECNQCGKAFSRRIALTLHQRIHTGEKPFKCSECGKTFGYRSHLNQHQRIHTGEKPYECIKCGKFFRTDSQLNRHHRIHTGERPFECSKCGKAFSDALVLIHHKRSHAGEKPYECNKCGKAFSCGSYLNQHQRIHTGEKPYECSECGKAFHQILSLRLHQRIHAGEKPYKCNECGNNFSCVSALRRHQRIHNRETL

SEQ ID NO: 10205 - protein, 1327 aa, Homo sapiens
MRSFLQQDVNKTKSRLNVLNGLANNMDDLKINTDITGAKEELLDDNNFISDKESGVHKPKDCQTSFQKNNTLTLPEELSKDKSENALSGGQSSLFIHAGAPTVSSENFILPKGAAVNGPVSHSSLTKTSNMNKGSVSLTTGQPVDQPTTESCSTLKVAADLQLSTPQKASQHQVLFLLSDVAHAKNPTHSNKKLPTSASVGCDIQNSVGSNIKSDGTLINQVEVGEDGEDLLVKDDCVNTVTGISSGTDGFRSENDTNWDPQKEFIQFLMTNEETVDKAPPHSKIGLEKKRKRKMDVSKITRYTEDCFSDSNCVPNKSKMQEVDFLEQNEELQAVDSQKYALSKVKPESTDEDLESVDAFQHLIYNPDKCGEESSPVHTSTFLSNTLKKKCEESDSESPATFSTEEPSFYPCTKCNVNFREKKHLHRHMMYHLDGNSHFRHLNVPRPYACRECGRTFRDRNSLLKHMIIHQERRQKLMEEIRELKELQDEGRSARLQCPQCVFGTNCPKTFVQHAKTHEKDKRYYCCEECNFMAVTENELECHRGIAHGAVVKCPMVTSDIAQRKTQKKTFMKDSVVGSSKKSATYICKMCPFTTSAKSVLKKHTEYLHSSSCVDSFGSPLGLDKRKNDILEEPVDSDSTKTLTKQQSTTFPKNSALKQDVKRTFGSTSQSSSFSKIHKRPHRIQKARKSIAQSGVNMCNQNSSPHKNVTIKSSVDQKPKYFHQAAKEKSNAKANSHYLYRHKYENYRMIKKSGESYPVHFKKEEASSLNSLHLFSSSSNSHNNFISDPHKPDAKRPESFKDHRRVAVKRVIKESKKESSVGGEDLDSYPDFLHKMTVVVLQKLNSAEKKDSYETEDESSWDNVELGDYTTQAIEDETYSDINQEHVNLFPLFKSKVEGQEPGENATLSYDQNDGFYFEYYEDTGSNNFLHEIHDPQHLETADASLSKHSSVFHWTDLSLEKKSCPYCPATFETGVGLSNHVRGHLHRAGLSYEARHVVSPEQIATSDKMQHFKRTGTGTPVKRVRKAIEKSETTSEHTCQLCGGWFDTKIGLSNHVRGHLKRLGKTKWDAHKSPICVLNEMMQNEEKYEKILKALNSRRIIPRPFVAQKLASSDDFISQNVIPLEAYRNGLKTEALSVSASEEEGLNFLNEYDETKPELPSGKKNQSLTLIELLKNKRMGEERNSAISPQKIHNQTARKRFVQKCVLPLNEDSPLMYQPQKMDLTMHSALDCKQKKSRSRSGSKKKMLTLPHGADEVYILRCRFCGLVFRGPLSVQEDWIKHLQRHIVNANLPRTGAGMVEVTSLLKKPASITETSFSLLMAEAAS

SEQ ID NO: 10206 - protein, 1232 aa, Homo sapiens
MRSFLQQDVNKTKSRLNVLNGLANNMDDLKINTDITGAKEELLDDNNFISDKESGVHKPKDCQTSFQKNNTLTLPEELSKDKSENALSGGQSSLFIHAGAPTVSSENFILPKGAAVNGPVSHSSLTKTSNMNKGSVSLTTGQPVDQPTTESCSTLKVAADLQLSTPQKASQHQVLFLLSDVAHAKNPTHSNKKLPTSASVGCDIQNSVGSNIKSDGTLINQVEVGEDGEDLLVKDDCVNTVTGISSGTDGFRSENDTNWDPQKEFIQFLMTNEETVDKAPPHSKIGLEKKRKRKMDVSKITRYTEDCFSDSNCVPNKSKMQEVDFLEQNEELQAVDSQKYALSKVKPESTDEDLESVDAFQHLIYNPDKCGEESSPVHTSTFLSNTLKKKCEESDSESPATFSTEEPSFYPCTKCNVNFREKKHLHRHMMYHLDGNSHFRHLNVPRPYACRECGRTFRDRNSLLKHMIIHQERRQKLMEEIRELKELQDEGRSARLQCPQCVFGTNCPKTFVQHAKTHEKDKRYYCCEECNFMAVTENELECHRGIAHGAVVKCPMVTSDIAQRKTQKKTFMKDSVVGSSKKSATYICKMCPFTTSAKSVLKKHTEYLHSSSCVDSFGSPLGLDKRKNDILEEPVDSDSTKTLTKQQSTTFPKNSALKQDVKRTFGSTSQSSSFSKIHKRPHRIQKARKSIAQSGVNMCNQNSSPHKNVTIKSSVDQKPKYFHQAAKEKSNAKANSHYLYRHKYENYRMIKKSGESYPVHFKKEEASSLNSLHLFSSSSNSHNNFISDPHKPDAKRPESFKDHRRVAVKRVIKESKKESSVGGEDLDSYPDFLHKMTVVVLQKLNSAEKKDSYETEDESSWDNVELGDYTTQAIEDETYSDINQEHVNLFPLFKSKVEGQEPGENATLSYDQNDGFYFEYYEDTGSNNFLHEIHDPQHLETADASLSKHSSVFHWTDLSLEKKSCPYCPATFETGVGLSNHVRGHLHRAGLSYEARHVVSPEQIATSDKMQHFKRTGTGTPVKRVRKAIEKSETTSEHTCQLCGGWFDTKIGLSNHVRGHLKRLGKTKWDAHKSPICVLNEMMQNEEKYEKILKALNSRRIIPRPFVAQKLASSDDFISQNVIPLEAYRNGLKTEALSVSASEEEGLNFLNEYDETKPELPSGKKNQSLTLIELLKNKRMGEERNSAISPQKIHNQTARKRFVQKCVLPLNEDSPLMYQPQKMDLTMHSGLI

SEQ ID NO: 10207 - protein, 105 aa, Homo sapiens
MLIRQNLALDCKQKKSRSRSGSKKKMLTLPHGADEVYILRCRFCGLVFRGPLSVQEDWIKHLQRHIVNANLPRTGAGMVEVTSLLKKPASITETSFSLLMAEAAS

SEQ ID NO: 10208 - protein, 358 aa, Homo sapiens
MRATPLAAPAGSLSRKKRLELDDNLDTERPVQKRARSGPQPRLPPCLLPLSPPTAPDRATAVATASRLGPYVLLEPEEGGRAYQALHCPTGTEYTCKVYPVQEALAVLEPYARLPPHKHVARPTEVLAGTQLLYAFFTRTHGDMHSLVRSRHRIPEPEAAVLFRQMATALAHCHQHGLVLRDLKLCRFVFADRERKKLVLENLEDSCVLTGPDDSLWDKHACPAYVGPEILSSRASYSGKAADVWSLGVALFTMLAGHYPFQDSEPVLLFGKIRRGAYALPAGLSAPARCLVRCLLRREPAERLTATGILLHPWLRQDPMPLAPTRSHLWEAAQVVPDGLGLDEAREEEGDREVVLYG

SEQ ID NO: 10209 - protein, 242 aa, Homo sapiens
MPGPWLLLALALTLNLTGVPGGRAQPEAAQQEAVTAAEHPGLDDFLRQVERLLFLRENIQRLQGDQGEHSASQIFQSDWLSKRQHPGKREEEEEEGVEEEEEEEGGAVGPHKRQHPGRREDEASWSVDVTQHKRQHPGRRSPWLAYAVPKRQHPGRRLADPKAQRSWEEEEEEEEREEDLMPEKRQHPGKRALGGPCGPQGAYGQAGLLLGLLDDLSRSQGAEEKRQHPGRRAAWVREPLEE

SEQ ID NO: 10210 - protein, 146 aa, Homo sapiens
MSRSRLFSVTSAISTIGILCLPLFQLVLSDLPCEEDEMCVNYNDQHPNGWYIWILLLLVLVAALLCGAVVLCLQCWLRRPRIDSHRRTMAVFAVGDLDSIYGTEAAVSPTVGIHLQTQTPDLYPVPAPCFGPLGSPPPYEEIVKTT

SEQ ID NO: 10211 - protein, 612 aa, Homo sapiens
MAAAGRLPSSWALFSPLLAGLALLGVGPVPARALHNVTAELFGAEAWGTLAAFGDLNSDKQTDLFVLRERNDLIVFLADQNAPYFKPKVKVSFKNHSALITSVVPGDYDGDSQMDVLLTYLPKNYAKSELGAVIFWGQNQTLDPNNMTILNRTFQDEPLIMDFNGDLIPDIFGITNESNQPQILLGGNLSWHPALTTTSKMRIPHSHAFIDLTEDFTADLFLTTLNATTSTFQFEIWENLDGNFSVSTILEKPQNMMVVGQSAFADFDGDGHMDHLLPGCEDKNCQKSTIYLVRSGMKQWVPVLQDFSNKGTLWGFVPFVDEQQPTEIPIPITLHIGDYNMDGYPDALVILKNTSGSNQQAFLLENVPCNNASCEEARRMFKVYWELTDLNQIKDAMVATFFDIYEDGILDIVVLSKGYTKNDFAIHTLKNNFEADAYFVKVIVLSGLCSNDCPRKITPFGVNQPGPYIMYTTVDANGYLKNGSAGQLSQSAHLALQLPYNVLGLGRSANFLDHLYVGIPRPSGEKSIRKQEWTAIIPNSQLIVIPYPHNVPRSWSAKLYLTPSNIVLLTAIALIGVCVFILAIIGILHWQEKKADDREKRQEAHRFHFDAM

SEQ ID NO: 10212 - protein, 711 aa, Homo sapiens
MAALGRPGSGPRAAVPAWKREILERKRAKLAALGGGAGPGAAEPEQRVLAESLGPLRENPFMLLEAERRRGGGAAGARLLERYRRVPGVRALRADSVLIIETVPGFPPAPPAPGAAQIRAAEVLVYGAPPGRVSRLLERFDPPAAPRRRGSPERARPPPPPPPPAPPRPPPAAPSPPAAPGPRGGGASPGARRSDFLQKTGSNSFTVHPRGLHRGAGARLLSNGHSAPEPRAGPANRLAGSPPGSGQWKPKVESGDPSLHPPPSPGTPSATPASPPASATPSQRQCVSAATSTNDSFEIRPAPKPVMETIPLGDLQARALASLRANSRNSFMVIPKSKASGAPPPEGRQSVELPKGDLGPASPSQELGSQPVPGGDGAPALGKSPLEVEAQWAVEEGACPRTATALADRAIRWQRPSSPPPFLPAASEEAEPAEGLRVPGLAKNSREYVRPGLPVTFIDEVDSEEAPQAAKLPYLPHPARPLHPARPGCVAELQPRGSNTFTVVPKRKPGTLQDQHFSQANREPRPREAEEEEASCLLGPTLKKRYPTVHEIEVIGGYLALQKSCLTKAGSSRKKMKISFNDKSLQTTFEYPSESSLEQEEEVDQQEEEEEEEEEEEEEEEGSGSEEKPFALFLPRATFVSSVRPESSRLPEGSSGLSSYTPKHSVAFSKWQEQALEQAPREAEPPPVEAMLTPASQNDLSDFRSEPALYF

SEQ ID NO: 10213 - protein, 405 aa, Homo sapiens
METIPLGDLQARALASLRANSRNSFMVIPKSKASGAPPPEGRQSVELPKGDLGPASPSQELGSQPVPGGDGAPALGKSPLEVEAQWAVEEGACPRTATALADRAIRWQRPSSPPPFLPAASEEAEPAEGLRVPGLAKNSREYVRPGLPVTFIDEVDSEEAPQAAKLPYLPHPARPLHPARPGCVAELQPRGSNTFTVVPKRKPGTLQDQHFSQANREPRPREAEEEEASCLLGPTLKKRYPTVHEIEVIGGYLALQKSCLTKAGSSRKKMKISFNDKSLQTTFEYPSESSLEQEEEVDQQEEEEEEEEEEEEEEEGSGSEEKPFALFLPRATFVSSVRPESSRLPEGSSGLSSYTPKHSVAFSKWQEQALEQAPREAEPPPVEAMLTPASQNDLSDFRSEPALYF

SEQ ID NO: 10214 - protein, 433 aa, Homo sapiens
METIPLGDLQARALASLRANSRNSFMVIPKSKASGAPPPEGRQSVELPKGDLGPASPSQELGSQPVPGGDGAPALGKSPLEVEAQWAVEEGACPRTATALADRAIRWQRPSSPPPFLPAASEEAEPAEGLRVPGLAKNSREYVRPGLPVTFIDEVDSEEAPQAAKLPYLPHPARPLHPARPGCVAELQPRGSNTFTVVPKRKPGTLQDQHFSQANREPRPREAEEEEASCLLGPTLKKRYPTVHEIEVIGGYLALQKSCLTKAGSSRKKMKISFNDKSLQTTFEYPSESSLEQEEEVDQQEEEEEEEEEEEEEEEGSGSEEKPFALFLPRATFVSSVRPESSRLPEGSSGLSSYTPKHSVAFSKWQEQALEQAPREAEPPPVEAMVRCGGVERWGESDTRASPCVHILSSHFQLTPASQNDLSDFRSEPALYF

SEQ ID NO: 10215 - protein, 406 aa, Homo sapiens
MVSITGLGDLQARALASLRANSRNSFMVIPKSKASGAPPPEGRQSVELPKGDLGPASPSQELGSQPVPGGDGAPALGKSPLEVEAQWAVEEGACPRTATALADRAIRWQRPSSPPPFLPAASEEAEPAEGLRVPGLAKNSREYVRPGLPVTFIDEVDSEEAPQAAKLPYLPHPARPLHPARPGCVAELQPRGSNTFTVVPKRKPGTLQDQHFSQANREPRPREAEEEEASCLLGPTLKKRYPTVHEIEVIGGYLALQKSCLTKAGSSRKKMKISFNDKSLQTTFEYPSESSLEQEEEVDQQEEEEEEEEEEEEEEEGSGSEEKPFALFLPRATFVSSVRPESSRLPEGSSGLSSYTPKHSVAFSKWQEQALEQAPREAEPPPVEAMLTPASQNDLSDFRSEPALYF

SEQ ID NO: 10216 - protein, 118 aa, Homo sapiens
MQWALAVLLAFLSPASQKSSNLEGRTKSVIRQTGSSAEITCDLAEGSTGYIHWYLHQEGKAPQRLLYYDSYTSSVVLESGISPGKYDTYGSTRKNLRMILRNLIENDSGVYYCATWDG

SEQ ID NO: 10217 - protein, 140 aa, Homo sapiens
MPSAFSVSSFPVSIPAVLTQTDWTEPWLMGLATFHALCVLLTCLSSRSYRLQIGHFLCLVILVYCAEYINEAAAMNWRLFSKYQYFDSRGMFISIVFSAPLLVNAMIIVVMWVWKTLNVMTDLKNAQERRKEKKRRRKED

SEQ ID NO: 10218 - protein, 127 aa, Homo sapiens
MLSGYLQTDWTEPWLMGLATFHALCVLLTCLSSRSYRLQIGHFLCLVILVYCAEYINEAAAMNWRLFSKYQYFDSRGMFISIVFSAPLLVNAMIIVVMWVWKTLNVMTDLKNAQERRKEKKRRRKED

SEQ ID NO: 10219 - protein, 972 aa, Homo sapiens
MDTDLYDEFGNYIGPELDSDEDDDELGRETKDLDEMDDDDDDDDVGDHDDDHPGMEVVLHEDKKYYPTAEEVYGPEVETIVQEEDTQPLTEPIIKPVKTKKFTLMEQTLPVTVYEMDFLADLMDNSELIRNVTLCGHLHHGKTCFVDCLIEQTHPEIRKRYDQDLCYTDILFTEQERGVGIKSTPVTVVLPDTKGKSYLFNIMDTPGHVNFSDEVTAGLRISDGVVLFIDAAEGVMLNTERLIKHAVQERLAVTVCINKIDRLILELKLPPTDAYYKLRHIVDEVNGLISMYSTDENLILSPLLGNVCFSSSQYSICFTLGSFAKIYADTFGDINYQEFAKRLWGDIYFNPKTRKFTKKAPTSSSQRSFVEFILEPLYKILAQVVGDVDTSLPRTLDELGIHLTKEELKLNIRPLLRLVCKKFFGEFTGFVDMCVQHIPSPKVGAKPKIEHTYTGGVDSDLGEAMSDCDPDGPLMCHTTKMYSTDDGVQFHAFGRVLSGTIHAGQPVKVLGENYTLEDEEDSQICTVGRLWISVARYHIEVNRVPAGNWVLIEGVDQPIVKTATITEPRGNEEAQIFRPLKFNTTSVIKIAVEPVNPSELPKMLDGLRKVNKSYPSLTTKVEESGEHVILGTGELYLDCVMHDLRKMYSEIDIKVADPVVTFCETVVETSSLKCFAETPNKKNKITMIAEPLEKGLAEDIENEVVQITWNRKKLGEFFQTKYDWDLLAARSIWAFGPDATGPNILVDDTLPSEVDKALLGSVKDSIVQGFQWGTREGPLCDELIRNVKFKILDAVVAQEPLHRGGGQIIPTARRVVYSAFLMATPRLMEPYYFVEVQAPADCVSAVYTVLARRRGHVTQDAPIPGSPLYTIKAFIPAIDSFGFETDLRTHTQGQAFSLSVFHHWQIVPGDPLDKSIVIRPLEPQPAPHLAREFMIKTRRRKGLSEDVSISKFFDDPMLLELAKQDVVLNYPM

SEQ ID NO: 10220 - protein, 937 aa, Homo sapiens
MDDDDDDDDVGDHDDDHPGMEVVLHEDKKYYPTAEEVYGPEVETIVQEEDTQPLTEPIIKPVKTKKFTLMEQTLPVTVYEMDFLADLMDNSELIRNVTLCGHLHHGKTCFVDCLIEQTHPEIRKRYDQDLCYTDILFTEQERGVGIKSTPVTVVLPDTKGKSYLFNIMDTPGHVNFSDEVTAGLRISDGVVLFIDAAEGVMLNTERLIKHAVQERLAVTVCINKIDRLILELKLPPTDAYYKLRHIVDEVNGLISMYSTDENLILSPLLGNVCFSSSQYSICFTLGSFAKIYADTFGDINYQEFAKRLWGDIYFNPKTRKFTKKAPTSSSQRSFVEFILEPLYKILAQVVGDVDTSLPRTLDELGIHLTKEELKLNIRPLLRLVCKKFFGEFTGFVDMCVQHIPSPKVGAKPKIEHTYTGGVDSDLGEAMSDCDPDGPLMCHTTKMYSTDDGVQFHAFGRVLSGTIHAGQPVKVLGENYTLEDEEDSQICTVGRLWISVARYHIEVNRVPAGNWVLIEGVDQPIVKTATITEPRGNEEAQIFRPLKFNTTSVIKIAVEPVNPSELPKMLDGLRKVNKSYPSLTTKVEESGEHVILGTGELYLDCVMHDLRKMYSEIDIKVADPVVTFCETVVETSSLKCFAETPNKKNKITMIAEPLEKGLAEDIENEVVQITWNRKKLGEFFQTKYDWDLLAARSIWAFGPDATGPNILVDDTLPSEVDKALLGSVKDSIVQGFQWGTREGPLCDELIRNVKFKILDAVVAQEPLHRGGGQIIPTARRVVYSAFLMATPRLMEPYYFVEVQAPADCVSAVYTVLARRRGHVTQDAPIPGSPLYTIKAFIPAIDSFGFETDLRTHTQGQAFSLSVFHHWQIVPGDPLDKSIVIRPLEPQPAPHLAREFMIKTRRRKGLSEDVSISKFFDDPMLLELAKQDVVLNYPM

SEQ ID NO: 10221 - protein, 962 aa, Homo sapiens
MDTDLYDEFGNYIGPELDSDEDDDELGRETKDLDEMDDDDDDDDVGDHDDDHPGMEVVLHEDKKYYPTAEEVYGPEVETIVQEEDTQPLTEPIIKPVKTKKFTLMEQTLPVTVYEMDFLADLMDNSELIRNVTLCGHLHHGKTHPEIRKRYDQDLCYTDILFTEQERGVGIKSTPVTVVLPDTKGKSYLFNIMDTPGHVNFSDEVTAGLRISDGVVLFIDAAEGVMLNTERLIKHAVQERLAVTVCINKIDRLILELKLPPTDAYYKLRHIVDEVNGLISMYSTDENLILSPLLGNVCFSSSQYSICFTLGSFAKIYADTFGDINYQEFAKRLWGDIYFNPKTRKFTKKAPTSSSQRSFVEFILEPLYKILAQVVGDVDTSLPRTLDELGIHLTKEELKLNIRPLLRLVCKKFFGEFTGFVDMCVQHIPSPKVGAKPKIEHTYTGGVDSDLGEAMSDCDPDGPLMCHTTKMYSTDDGVQFHAFGRVLSGTIHAGQPVKVLGENYTLEDEEDSQICTVGRLWISVARYHIEVNRVPAGNWVLIEGVDQPIVKTATITEPRGNEEAQIFRPLKFNTTSVIKIAVEPVNPSELPKMLDGLRKVNKSYPSLTTKVEESGEHVILGTGELYLDCVMHDLRKMYSEIDIKVADPVVTFCETVVETSSLKCFAETPNKKNKITMIAEPLEKGLAEDIENEVVQITWNRKKLGEFFQTKYDWDLLAARSIWAFGPDATGPNILVDDTLPSEVDKALLGSVKDSIVQGFQWGTREGPLCDELIRNVKFKILDAVVAQEPLHRGGGQIIPTARRVVYSAFLMATPRLMEPYYFVEVQAPADCVSAVYTVLARRRGHVTQDAPIPGSPLYTIKAFIPAIDSFGFETDLRTHTQGQAFSLSVFHHWQIVPGDPLDKSIVIRPLEPQPAPHLAREFMIKTRRRKGLSEDVSISKFFDDPMLLELAKQDVVLNYPM

SEQ ID NO: 10222 - protein, 212 aa, Homo sapiens
MGPMWRMRGGATRRGSCCGGDGAADGRGPGRSGRARGGGSPSGGGGGVGWRGRADGARQQLEERFADLAASHLEAIRARDEWDRQNARLRQENARLRLENRRLKRENRSLFRQALRLPGEGGNGTPAEARRVPEEASTNRRARDSGREDEPGSPRALRARLEKLEAMYRRALLQLHLEQRGPRPSGDKEEQPLQEPDSGLRSRDSEPSGPWL

SEQ ID NO: 10223 - protein, 437 aa, Homo sapiens
MSGLDGVKRTTPLQTHSIIISDQVPSDQDAHQYLRLRDQSEATQVMAEPGEGGSETVALPPPPPSEEGGVPQDAAGRGGTPQIRVVGGRGHVAIKAGQEEGQPPAEGLAAASVVMAADRSLKKGVQGGEKALEICGAQRSASELTAGAEAEAEEVKTGKCATVSAAVAERESAEVVKEGLAEKEVMEEQMEVEEQPPEGEEIEVAEEDRLEEEAREEEGPWPLHEALRMDPLEAIQLELDTVNAQADRAFQQLEHKFGRMRRHYLERRNYIIQNIPGFWMTAFRNHPQLSAMIRGQDAEMLRYITNLEVKELRHPRTGCKFKFFFRRNPYFRNKLIVKEYEVRSSGRVVSLSTPIIWRRGHEPQSFIRRNQDLICSFFTWFSDHSLPESDKIAEIIKEDLWPNPLQYYLLREGVRRARRRPLREPVEIPRPFGFQSG

SEQ ID NO: 10224 - protein, 287 aa, Homo sapiens
MAASLWMGDLEPYMDENFISRAFATMGETVMSVKIIRNRLTGIPAGYCFVEFADLATAEKCLHKINGKPLPGATPAKRFKLNYATYGKQPDNSPEYSLFVGDLTPDVDDGMLYEFFVKVYPSCRGGKVVLDQTGVSKGYGFVKFTDELEQKRALTECQGAVGLGSKPVRLSVAIPKASRVKPVEYSQMYSYSYNQYYQQYQNYYAQWGYDQNTGSYSYSYPQYGYTQSTMQTYEEVGDDALEDPMPQLDVTEANKEFMEQSEELYDALMDCHWQPLDTVSSEIPAMM

SEQ ID NO: 10225 - protein, 177 aa, Homo sapiens
MLYEFFVKVYPSCRGGKVVLDQTGVSKGYGFVKFTDELEQKRALTECQGAVGLGSKPVRLSVAIPKASRVKPVEYSQMYSYSYNQYYQQYQNYYAQWGYDQNTGSYSYSYPQYGYTQSTMQTYEEVGDDALEDPMPQLDVTEANKEFMEQSEELYDALMDCHWQPLDTVSSEIPAMM

SEQ ID NO: 10226 - protein, 149 aa, Homo sapiens
MSFLLPKLTSKKEVDQAIKSTAEKVLVLRFGRDEDPVCLQLDDILSKTSSDLSKMAAIYLVDVDQTAVYTQYFDISYIPSTVFFFNGQHMKVDYGSPDHTKFVGSFKTKQDFIDLIEVIYRGAMRGKLIVQSPIDPKNIPKYDLLYQDI

SEQ ID NO: 10227 - protein, 246 aa, Homo sapiens
MAAAAIPALLLCLPLLFLLFGWSRARRDDPHSLCYDITVIPKFRPGPRWCAVQGQVDEKTFLHYDCGNKTVTPVSPLGKKLNVTMAWKAQNPVLREVVDILTEQLLDIQLENYTPKEPLTLQARMSCEQKAEGHSSGSWQFSIDGQTFLLFDSEKRMWTTVHPGARKMKEKWENDKDVAMSFHYISMGDCIGWLEDFLMGMDSTLEPSAGAPLAMSSGTTQLRATATTLILCCLLIILPCFILPGI

SEQ ID NO: 10228 - protein, 145 aa, Homo sapiens
MAVSTGVKVPRNFRLLEELEEGQKGVGDGTVSWGLEDDEDMTLTRWTGMIIGPPRTNYENRIYSLKVECGPKYPEAPPSVRFVTKINMNGINNSSGMVDARSIPVLAKWQNSYSIKVVLQELRRLMMSKENMKLPQPPEGQTYNN

SEQ ID NO: 10229 - protein, 320 aa, Homo sapiens
MGLPWGQPHLGLQMLLLALNCLRPSLSLGEWGSWMDASSQTQGAGGPAGVIGPWAPAPLRLGEAAPGTPTPVSVAHLLSPVATELVPYTPQITAWDLEGKVTATTFSLEQPRCVFDGLASASDTVWLVVAFSNASRGFQNPETLADIPASPQLLTDGHYMTLPLSPDQLPCGDPMAGSGGAPVLRVGHDHGCHQQPFCNAPLPGPGPYREDPRIHRHLARAAKWQHDRHYLHPLFSGRPPTLGLLGSLYHALLQPVVAGGGPGAAADRLLHGQALHDPPHPTQRGRHTAGGLQAWPGPPPQPQPLAWPLCMGLGEMGRWE

SEQ ID NO: 10230 - protein, 265 aa, Homo sapiens
MGLPWGQPHLGLQMLLLALNCLRPSLSLELVPYTPQITAWDLEGKVTATTFSLEQPRCVFDGLASASDTVWLVVAFSNASRGFQNPETLADIPASPQLLTDGHYMTLPLSPDQLPCGDPMAGSGGAPVLRVGHDHGCHQQPFCNAPLPGPGPYREDPRIHRHLARAAKWQHDRHYLHPLFSGRPPTLGLLGSLYHALLQPVVAGGGPGAAADRLLHGQALHDPPHPTQRGRHTAGGLQAWPGPPPQPQPLAWPLCMGLGEMGRWE

SEQ ID NO: 10231 - protein, 276 aa, Homo sapiens
MGLPWGQPHLGLQMLLLALNCLRPSLSLELVPYTPQITAWDLEGKVTATTFSLEQPRCVFDGLASASDTVWLVVAFSNASRGFQNPETLADIPASPQLLTDGHYMTLPLSPDQLPCGDPMAGSGGAPVLRVGHDHGCHQQPFCNAPLPGPGPYRVKFLLMDTRGSPRAETKWSDPITLHQGKTPGSIDTWPGRRSGSMIVITSILSSLAGLLLLAFLAASTMRFSSLWWPEEAPEQLRIGSFMGKRYMTHHIPPREAATLPVGCKPGLDPLPSLSP

SEQ ID NO: 10232 - protein, 1604 aa, Homo sapiens
MGAKESRIGFLSYEEALRRVTDVELKRLKDAFKRTCGLSYYMGQHCFIREVLGDGVPPKVAEVIYCSFGGTSKGLHFNNLIVGLVLLTRGKDEEKAKYIFSLFSSESGNYVIREEMERMLHVVDGKVPDTLRKCFSEGEKVNYEKFRNWLFLNKDAFTFSRWLLSGGVYVTLTDDSDTPTFYQTLAGVTHLEESDIIDLEKRYWLLKAQSRTGRFDLETFGPLVSPPIRPSLSEGLFNAFDENRDNHIDFKEISCGLSACCRGPLAERQKFCFKVFDVDRDGVLSRVELRDMVVALLEVWKDNRTDDIPELHMDLSDIVEGILNAHDTTKMGHLTLEDYQIWSVKNVLANEFLNLLFQVCHIVLGLRPATPEEEGQIIRGWLERESRYGLQAGHNWFIISMQWWQQWKEYVKYDANPVVIEPSSVLNGGKYSFGTAAHPMEQVEDRIGSSLSYVNTTEEKFSDNISTASEASETAGSGFLYSATPGADVCFARQHNTSDNNNQCLLGANGNILLHLNPQKPGAIDNQPLVTQEPVKATSLTLEGGRLKRTPQLIHGRDYEMVPEPVWRALYHWYGANLALPRPVIKNSKTDIPELELFPRYLLFLRQQPATRTQQSNIWVNMGNVPSPNAPLKRVLAYTGCFSRMQTIKEIHEYLSQRLRIKEEDMRLWLYNSENYLTLLDDEDHKLEYLKIQDEQHLVIEVRNKDMSWPEEMSFIANSSKIDRHKVPTEKGATGLSNLGNTCFMNSSIQCVSNTQPLTQYFISGRHLYELNRTNPIGMKGHMAKCYGDLVQELWSGTQKNVAPLKLRWTIAKYAPRFNGFQQQDSQELLAFLLDGLHEDLNRVHEKPYVELKDSDGRPDWEVAAEAWDNHLRRNRSIVVDLFHGQLRSQVKCKTCGHISVRFDPFNFLSLPLPMDSYMHLEITVIKLDGTTPVRYGLRLNMDEKYTGLKKQLSDLCGLNSEQILLAEVHGSNIKNFPQDNQKVRLSVSGFLCAFEIPVPVSPISASSPTQTDFSSSPSTNEMFTLTTNGDLPRPIFIPNGMPNTVVPCGTEKNFTNGMVNGHMPSLPDSPFTGYIIAVHRKMMRTELYFLSSQKNRPSLFGMPLIVPCTVHTRKKDLYDAVWIQVSRLASPLPPQEASNHAQDCDDSMGYQYPFTLRVVQKDGNSCAWCPWYRFCRGCKIDCGEDRAFIGNAYIAVDWDPTALHLRYQTSQERVVDEHESVEQSRRAQAEPINLDSCLRAFTSEEELGENEMYYCSKCKTHCLATKKLDLWRLPPILIIHLKRFQFVNGRWIKSQKIVKFPRESFDPSAFLVPRDPALCQHKPLTPQGDELSEPRILAREVKKVDAQSSAGEEDVLLSKSPSSLSANIISSPKGSPSSSRKSGTSCPSSKNSSPNSSPRTLGRSKGRLRLPQIGSKNKLSSSKENLDASKENGAGQICELADALSRGHVLGGSQPELVTPQDHEVALANGFLYEHEACGNGYSNGQLGNHSEEDSTDDQREDTRIKPIYNLYAISCHSGILGGGHYVTYAKNPNCKWYCYNDSSCKELHPDEIDTDSAYILFYEQQGIDYAQFLPKTDGKKMADTSSMDEDFESDYKKYCVLQ

SEQ ID NO: 10233 - protein, 390 aa, Homo sapiens
MGAKESRIGFLSYEEALRRVTDVELKRLKDAFKRTCGLSYYMGQHCFIREVLGDGVPPKVAEVIYCSFGGTSKGLHFNNLIVGLVLLTRGKDEEKAKYIFSLFSSESGNYVIREEMERMLHVVDGKVPDTLRKCFSEGEKVNYEKFRNWLFLNKDAFTFSRWLLSGGVYVTLTDDSDTPTFYQTLAGVTHLEESDIIDLEKRYWLLKAQSRTGRFDLETFGPLVSPPIRPSLSEGLFNAFDENRDNHIDFKEISCGLSACCRGPLAERQKFCFKVFDVDRDGVLSRVELRDMVVALLEVWKDNRTDDIPELHMDLSDIVEGILNAHDTTKMGHLTLEDYQIWSVKNVLANEFLNLLFQVCHIVLGLRPATPEEEGQIIRTLETDQIYTRN

SEQ ID NO: 10234 - protein, 259 aa, Homo sapiens
MAASRLELNLVRLLSRCEAMAAEKRDPDEWRLEKYVGALEDMLQALKVHASKPASEVINEYSWKVDFLKGMLQAEKLTSSSEKALANQFLAPGRVPTTARERVPATKTVHLQSRARYTSEMRSELLGTDSAEPEMDVRKRTGVAGSQPVSEKQLAAELDLVLQRHQNLQEKLAEEMLGLARSLKTNTLAAQSVIKKDNQTLSHSLKMADQNLEKLKTESERLEQHTQKSVNWLLWAMLIIVCFIFISMILFIRIMPKLK

SEQ ID NO: 10235 - protein, 146 aa, Homo sapiens
MAASRLELNLVRLLSRCEAMAAEKRDPDEWRLEKYVGALEDMLQALKVHASKPASEVINEYSWKVDFLKGMLQAEKLTSSSEKALANQFLAPGRVPTTARERVPATKTVHLQSRARYTSEMRSELLGTDSAEPEMDVRKRTPCHTH

SEQ ID NO: 10236 - protein, 135 aa, Homo sapiens
MAASRLELNLVRLLSRCEAMAAEKRDPDEWRLEKYVGALEDMLQALKVHASKPASEVINEYSWKVDFLKGMLQAEKLTSSSEKALANQFLAPGRVPTTARERVPATKTVHLQSRARYTSEMRSELLGTDSAGESP

SEQ ID NO: 10237 - protein, 114 aa, Homo sapiens
MKKHLTTFLVILWLYFYRGNGKNQVEQSPQSLIILEGKNCTLQCNYTVSPFSNLRWYKQDTGRGPVSLTIMTFSENTKSNGRYTATLDADTKQSSLHITASQLSDSASYICVVS

SEQ ID NO: 10238 - protein, 124 aa, Homo sapiens
MPACRLGPLAAALLLSLLLFGFTLVSGTGAEKTGVCPELQADQNCTQECVSDSECADNLKCCSAGCATFCSLPNDKEGSCPQVNINFPQLGLCRDQCQVDSQCPGQMKCCRNGCGKVSCVTPNF

SEQ ID NO: 10239 - protein, 73 aa, Homo sapiens
MLQVQVNLPVSPLPTYPYSFFYPDKEGSCPQVNINFPQLGLCRDQCQVDSQCPGQMKCCRNGCGKVSCVTPNF

SEQ ID NO: 10240 - protein, 76 aa, Homo sapiens
MPACRLGPLAAALLLSLLLFGFTLVSDKEGSCPQVNINFPQLGLCRDQCQVDSQCPGQMKCCRNGCGKVSCVTPNF

SEQ ID NO: 10241 - protein, 80 aa, Homo sapiens
MPACRLGPLAAALLLSLLLFGFTLVSGTGAEKTGVCPELQADQNCTQECVSDSECADNLKCCSAGCATFCLLCPNGQLAE

SEQ ID NO: 10242 - protein, 102 aa, Homo sapiens
MPACRLGPLAAALLLSLLLFGFTLVSGTGAEKTGVCPELQADQNCTQECVSDSECADNLKCCSAGCATFCSLPNALFHWHLKTRRLWEISGPRPRRPTWDSS

SEQ ID NO: 10243 - protein, 176 aa, Homo sapiens
MAMSFEWPWQYRFPPFFTLQPNVDTRQKQLAAWCSLVLSFCRLHKQSSMTVMEAQESPLFNNVKLQRKLPVESIQIVLEELRKKGNLEWLDKSKSSFLIMWRRPEEWGKLIYQWVSRSGQNNSVFTLYELTNGEDTEDEEFHGLDEATLLRALQALQQEHKAEIITVSDGRGVKFF

SEQ ID NO: 10244 - protein, 941 aa, Homo sapiens [sequence omitted]

SEQ ID NO: 10245 - protein, 647 aa, Homo sapiens
MVMYARKQQRLSDGCHDRRGDSQPYQALKYSSKSHPSSGDHRHEKMRDAGDPSPPNKMLRRSDSPENKYSDSTGHSKAKNVHTHRVRERDGGTSYSPQENSHNHSALHSSNSHSSNPSNNPSKTSDAPYDSADDWSEHISSSGKKYYYNCRTEVSQWEKPKEWLEREQRQKEANKMAVNSFPKDRDYRREVMQATATSGFASGMEDKHSSDASSLLPQNILSQTSRHNDRDYRLPRAETHSSSTPVQHPIKPVVHPTATPSTVPSSPFTLQSDHQPKKSFDANGASTLSKLPTPTSSVPAQKTERKESTSGDKPVSHSCTTPSTSSASGLNPTSAPPTSASAVPVSPVPQSPIPPLLQDPNLLRQLLPALQATLQLNNSNVDISKINEVLTAAVTQASLQSIIHKFLTAGPSAFNITSLISQAAQLSTQAQPSNQSPMSLTSDASSPRSYVSPRISTPQTNTVPIKPLISTPPVSSQPKVSTPVVKQGPVSQSATQQPVTADKQQGHEPVSPRSLQRSSSQRSPSPGPNHTSNSSNASNATVVPQNSSARSTCSLTPALAAHFSENLIKHVQGWPADHAEKQASRLREEAHNMGTIHMSEICTELKNLRSLVRVCEIQATLREQRILFLRQQIKELEKLKNQNSFMV

SEQ ID NO: 10246 - protein, 602 aa, Homo sapiens
MRDAGDPSPPNKMLRRSDSPENKYSDSTGHSKAKNVHTHRVRERDGGTSYSPQENSHNHSALHSSNSHSSNPSNNPSKTSDAPYDSADDWSEHISSSGKKYYYNCRTEVSQWEKPKEWLEREQRQKEANKMAVNSFPKDRDYRREVMQATATSGFASGMEDKHSSDASSLLPQNILSQTSRHNDRDYRLPRAETHSSSTPVQHPIKPVVHPTATPSTVPSSPFTLQSDHQPKKSFDANGASTLSKLPTPTSSVPAQKTERKESTSGDKPVSHSCTTPSTSSASGLNPTSAPPTSASAVPVSPVPQSPIPPLLQDPNLLRQLLPALQATLQLNNSNVDISKINEVLTAAVTQASLQSIIHKFLTAGPSAFNITSLISQAAQLSTQAQPSNQSPMSLTSDASSPRSYVSPRISTPQTNTVPIKPLISTPPVSSQPKVSTPVVKQGPVSQSATQQPVTADKQQGHEPVSPRSLQRSSSQRSPSPGPNHTSNSSNASNATVVPQNSSARSTCSLTPALAAHFSENLIKHVQGWPADHAEKQASRLREEAHNMGTIHMSEICTELKNLRSLVRVCEIQATLREQRILFLRQQIKELEKLKNQNSFMV

SEQ ID NO: 10247 - protein, 436 aa, Homo sapiens
MRDAGDPSPPNKMLRRSDSPENKYSDSTGHSKAKNVHTHRVRERDGGTSYSPQENSHNHSALHSSNSHSSNPSNNPSKTSDAPYDSADDWSEHISSSGKKYYYNCRTEVSQWEKPKEWLEREQRQKEANKMAVNSFPKDRDYRREVMQATATSGFASGMEDKHSSDASSLLPQNILSQTSRHNDRDYRLPRAETHSSSTPVQHPIKPVVHPTATPSTVPSSPFTLQSDHQPKKSFDANGASTLSKLPTPTSSVPAQKTERKESTSGDKPVSHSCTTPSTSSASGLNPTSAPPTSASAVPVSPVPQSPIPPLLQDPNLLRQLLPALQATLQLNNSNVDISKINEVLTAAVTQASLQSIIHKFLTAGPSAFNITSLISQAAQLSTQDIPLHEGIQMERDTHRSKWEVKGSLCQKADKQQECLVWNGSIMVQRLLQPSG

SEQ ID NO: 10248 - protein, 544 aa, Homo sapiens
MVMYARKQQRLSDGCHDRRGDSQPYQALKYSSKSHPSSGDHRHEKMRDAGDPSPPNKMLRRSDSPENKYSDSTGHSKAKNVHTHRVRERDGGTSYSPQENSHNHSALHSSNSHSSNPSNNPSKTSDAPYDSADDWSEHISSSGKKYYYNCRTEVSQWEKPKEWLEREQRQKEANKMAVNSFPKDRDYRREVMQATATSGFASGKSTSGDKPVSHSCTTPSTSSASGLNPTSAPPTSASAVPVSPVPQSPIPPLLQDPNLLRQLLPALQATLQLNNSNVDISKINEVLTAAVTQASLQSIIHKFLTAGPSAFNITSLISQAAQLSTQAQPSNQSPMSLTSDASSPRSYVSPRISTPQTNTVPIKPLISTPPVSSQPKVSTPVVKQGPVSQSATQQPVTADKQQGHEPVSPRSLQRSSSQRSPSPGPNHTSNSSNASNATVVPQNSSARSTCSLTPALAAHFSENLIKHVQGWPADHAEKQASRLREEAHNMGTIHMSEICTELKNLRSLVRVCEIQATLREQRILFLRQQIKELEKLKNQNSFMV

SEQ ID NO: 10249 - protein, 156 aa, Homo sapiens
WASQVSENRPVCKAIIQGKQFEGLVDTGADVSIIALNQWPKNWPKQKAVTGLVGIGTASEVYQSMEILHCLGPDNQESTVQPMITSIPLNLWGRDLLQQWGAEITMPAPLYSPTSQKIMTKMGYIPGKGLGKNEDGIKVPVEAKINQEREGIGYPF

SEQ ID NO: 10250 - protein, 498 aa, Homo sapiens
MESPRGWTLQVAPEEGQVLCNVKTATRGLSEGAVSGGWGAWENSTEVPREAGDGQRQQATLGAADEQGGPGRELGPADGGRDGAGPRSEPADRALRPSPLPEEPGCRCGECGKAFSQGSYLLQHRRVHTGEKPYTCPECGKAFAWSSNLSQHQRIHSGEKPYACRECGKAFRAHSQLIHHQETHSGLKPFRCPDCGKSFGRSTTLVQHRRTHTGEKPYECPECGKAFSWNSNFLEHRRVHTGARPHACRDCGKAFSQSSNLAEHLKIHAGARPHACPDCGKAFVRVAGLRQHRRTHSSEKPFPCAECGKAFRESSQLLQHQRTHTGERPFECAECGQAFVMGSYLAEHRRVHTGEKPHACAQCGKAFSQRSNLLSHRRTHSGAKPFACADCGKAFRGSSGLAHHRLSHTGERPFACAECGKAFRGSSELRQHQRLHSGERPFVCAHCSKAFVRKSELLSHRRTHTGERPYACGECGKPFSHRCNLNEHQKRHGGRAAP

SEQ ID NO: 10251 - protein, 218 aa, Homo sapiens
MMRREDEEEEGTMMKAKGDLEMKEEEEISETGELVGPFVSAMPTPMPHNKGTRFSEAWEYFHLAPARAGHHPNQYATCRLCGRQVSRGPGVNVGTTALWKHLKSMHREELEKSGHGQAGQRQDPRPHGPQLPTGIEGNWGRLLEQVGTMALWASQREKEVLRRERAVEWRERAVEKRERALEEVERAILEMKWKVRAEKEACQREKELPAAVHPFHFV

SEQ ID NO: 10252 - protein, 623 aa, Homo sapiens
MEAEETMECLQEFPEHHKMILDRLNEQREQDRFTDITLIVDGHHFKAHKAVLAACSKFFYKFFQEFTQEPLVEIEGVSKMAFRHLIEFTYTAKLMIQGEEEANDVWKAAEFLQMLEAIKALEVRNKENSAPLEENTTGKNEAKKRKIAETSNVITESLPSAESEPVEIEVEIAEGTIEVEDEGIETLEEVASAKQSVKYIQSTGSSDDSALALLADITSKYRQGDRKGQIKEDGCPSDPTSKQVEGIEIVELQLSHVKDLFHCEKCNRSFKLFYHFKEHMKSHSTESFKCEICNKRYLRESAWKQHLNCYHLEEGGVSKKQRTGKKIHVCQYCEKQFDHFGHFKEHLRKHTGEKPFECPNCHERFARNSTLKCHLTACQTGVGAKKGRKKLYECQVCNSVFNSWDQFKDHLVIHTGDKPNHCTLCDLWFMQGNELRRHLSDAHNISERLVTEEVLSVETRVQTEPVTSMTIIEQVGKVHVLPLLQVQVDSAQVTVEQVHPDLLQDSQVHDSHMSELPEQVQVSYLEVGRIQTEEGTEVHVEELHVERVNQMPVEVQTELLEADLDHVTPEIMNQEERESSQADAAEAAREDHEDAEDLETKPTVDSEAEKAENEDRTALPVLE

SEQ ID NO: 10253 - protein, 589 aa, Homo sapiens
MEAEETMECLQEFPEHHKMILDRLNEQREQDRFTDITLIVDGHHFKAHKAVLAACSKFFYKFFQEFTQEPLVEIEGVSKMAFRHLIEFTYTAKLMIQGEEEANDVWKAAEFLQMLEAIKALEVRNKENSAPLEENTTGKNEAKKRKIAETSNVITESLPSAESEPVEIEVEIAEGTIEVEDEGIETLEEVASAKQSVKYIQSTGSSDDSALALLADITSKYRQGDRKGQIKEDGCPSDPTSKQEHMKSHSTESFKCEICNKRYLRESAWKQHLNCYHLEEGGVSKKQRTGKKIHVCQYCEKQFDHFGHFKEHLRKHTGEKPFECPNCHERFARNSTLKCHLTACQTGVGAKKGRKKLYECQVCNSVFNSWDQFKDHLVIHTGDKPNHCTLCDLWFMQGNELRRHLSDAHNISERLVTEEVLSVETRVQTEPVTSMTIIEQVGKVHVLPLLQVQVDSAQVTVEQVHPDLLQDSQVHDSHMSELPEQVQVSYLEVGRIQTEEGTEVHVEELHVERVNQMPVEVQTELLEADLDHVTPEIMNQEERESSQADAAEAAREDHEDAEDLETKPTVDSEAEKAENEDRTALPVLE

SEQ ID NO: 10254 - protein, 545 aa, Homo sapiens
MAREPRKNAALDAQSAEDQTGLLTVKVEKEEASALTAEVRAPCSPARGPERSRQRFRGFRYPEAAGPREALSRLRELCGQWLQPEMHSKEQILELLVLEQFLTILPGNLQSWVREQHPESGEEVVVLLEYLERQLDEPAPQVPVGDQGQELLCCKMALLTQTQGSQSSQCQPMKALFKHESLGSQPLHDRVLQVPGLAQGGCCREDAMVASRLTPGSQGLLKMEDVALTLTPGWTQLDSSQVNLYRDEKQENHSSLVSLGGEIQTKSRDLPPVKKLPEKEHGKICHLREDIAQIPTHAEAGEQEGRLQRKQKNAIGSRRHYCHECGKSFAQSSGLTKHRRIHTGEKPYECEDCGKTFIGSSALVIHQRVHTGEKPYECEECGKVFSHSSNLIKHQRTHTGEKPYECDDCGKTFSQSCSLLEHHKIHTGEKPYQCNMCGKAFRRNSHLLRHQRIHGDKNVQNPEHGESWESQGRTESQWENTEAPVSYKCNECERSFTRNRSLIEHQKIHTGEKPYQCDTCGKGFTRTSYLVQHQRSHVGKKTLSQ

SEQ ID NO: 10255 - protein, 475 aa, Homo sapiens
MAEGSVMFSDVSIDFSQEEWDCLDPVQRDLYRDVMLENYGNLVSMGLYTPKPQVISLLEQGKEPWMVGRELTRGLCSDLESMCETKLLSLKKEVYEIELCQREIMGLTKHGLEYSSFGDVLEYRSHLAKQLGYPNGHFSQEIFTPEYMPTFIQQTFLTLHQIINNEDRPYECKKCGKAFSQNSQFIQHQRIHIGEKSYECKECGKFFSCGSHVTRHLKIHTGEKPFECKECGKAFSCSSYLSQHQRIHTGKKPYECKECGKAFSYCSNLIDHQRIHTGEKPYECKVCGKAFTKSSQLFQHARIHTGEKPYECKECGKAFTQSSKLVQHQRIHTGEKPYECKECGKAFSSGSALTNHQRIHTGEKPYDCKECGKAFTQSSQLRQHQRIHAGEKPFECLECGKAFTQNSQLFQHQRIHTDEKPYECNECGKAFNKCSNLTRHLRIHTGEKPYNCKECGKAFSSGSDLIRHQGIHTNK

SEQ ID NO: 10256 - protein, 422 aa, Homo sapiens
MLLGPASGAPSPLLASLPLPTRPLQPPLDFKHLLAFHFNGAAPLSLFPNFSTMDPVQKAVISHTFGVPSPLKKKLFISCNICHLRFNSANQAEAHYKGHKHARKLKAVEAAKSKQRPHTQAQDGAVVSPIPTLASGAPGEPQSKVPAAPPLGPPLQPPPTPDPTCREPAHSELLDAASSSSSSSCPPCSPEPGREAPGPEPAAAAVGSSMSGEGRSEKGHLYCPTCKVTVNSASQLQAHNTGAKHRWMMEGQRGAPRRSRGRPVSRGGAGHKAKRVTGGRGGRQGPSPAFHCALCQLQVNSETQLKQHMSSRRHKDRLAGKTPKPSSQHSKLQKHAALAVSILKSKLALQKQLTKTLAARFLPSPLPTAATAICALPGPLALRPAPTAATTLFPAPILGPALFRTPAGAVRPATGPIVLAPY

SEQ ID NO: 10257 - protein, 174 aa, Homo sapiens
MEGQRGAPRRSRGRPVSRGGAGHKAKRVTGGRGGRQGPSPAFHCALCQLQVNSETQLKQHMSSRRHKDRLAGKTPKPSSQHSKLQKHAALAVSILKSKLALQKQLTKTLAARFLPSPLPTAATAICALPGPLALRPAPTAATTLFPAPILGPALFRTPAGAVRPATGPIVLAPY

SEQ ID NO: 10258 - protein, 731 aa, Homo sapiens
MMQAQESLTLEDVAVDFTWEEWQFLSPAQKDLYRDVMLENYSNLVAVGYQASKPDALSKLERGEETCTTEDEIYSRICSEIRKIDDPLQHHLQNQSIQKSVKQCHEQNMFGNIVNQNKGHFLLKQDCDTFDLHEKPLKSNLSFENQKRSSGLKNSAEFNRDGKSLFHANHKQFYTEMKFPAIAKPINKSQFIKQQRTHNIENAHVCSECGKAFLKLSQFIDHQRVHTGEKPHVCSMCGKAFSRKSRLMDHQRTHTELKHYECTECDKTFLKKSQLNIHQKTHMGGKPYTCSQCGKAFIKKCRLIYHQRTHTGEKPHGCSVCGKAFSTKFSLTTHQKTHTGEKPYICSECGKGFIEKRRLTAHHRTHTGEKPFICNKCGKGFTLKNSLITHQQTHTGEKLYTCSECGKGFSMKHCLMVHQRTHTGEKPYKCNECGKGFALKSPLIRHQRTHTGEKPYVCTECRKGFTMKSDLIVHQRTHTAEKPYICNDCGKGFTVKSRLIVHQRTHTGEKPYVCGECGKGFPAKIRLMGHQRTHTGEKPYICNECGKGFTEKSHLNVHRRTHTGEKPYVCSECGKGLTGKSMLIAHQRTHTGEKPYICNECGKGFTMKSTLSIHQQTHTGEKPYKCNECDKTFRKKTCLIQHQRFHTGKTSFACTECGKFSLRKNDLITHQRIHTGEKPYKCSDCGKAFTTKSGLNVHQRKHTGERPYGCSDCGKAFAHLSILVKHRRIHR

SEQ ID NO: 10259 - protein, 742 aa, Homo sapiens
MMQAQESLTLEDVAVDFTWEEWQFLSPAQKDLYRDVMLENYSNLVAVGYQASKPDALSKLERGEETCTTEDEIYSRICSDSGGASGGAYAEIRKIDDPLQHHLQNQSIQKSVKQCHEQNMFGNIVNQNKGHFLLKQDCDTFDLHEKPLKSNLSFENQKRSSGLKNSAEFNRDGKSLFHANHKQFYTEMKFPAIAKPINKSQFIKQQRTHNIENAHVCSECGKAFLKLSQFIDHQRVHTGEKPHVCSMCGKAFSRKSRLMDHQRTHTELKHYECTECDKTFLKKSQLNIHQKTHMGGKPYTCSQCGKAFIKKCRLIYHQRTHTGEKPHGCSVCGKAFSTKFSLTTHQKTHTGEKPYICSECGKGFIEKRRLTAHHRTHTGEKPFICNKCGKGFTLKNSLITHQQTHTGEKLYTCSECGKGFSMKHCLMVHQRTHTGEKPYKCNECGKGFALKSPLIRHQRTHTGEKPYVCTECRKGFTMKSDLIVHQRTHTAEKPYICNDCGKGFTVKSRLIVHQRTHTGEKPYVCGECGKGFPAKIRLMGHQRTHTGEKPYICNECGKGFTEKSHLNVHRRTHTGEKPYVCSECGKGLTGKSMLIAHQRTHTGEKPYICNECGKGFTMKSTLSIHQQTHTGEKPYKCNECDKTFRKKTCLIQHQRFHTGKTSFACTECGKFSLRKNDLITHQRIHTGEKPYKCSDCGKAFTTKSGLNVHQRKHTGERPYGCSDCGKAFAHLSILVKHRRIHR

SEQ ID NO: 10260 - protein, 738 aa, Homo sapiens
MESLTLEDVAVDFTWEEWQFLSPAQKDLYRDVMLENYSNLVAVGYQASKPDALSKLERGEETCTTEDEIYSRICSDSGGASGGAYAEIRKIDDPLQHHLQNQSIQKSVKQCHEQNMFGNIVNQNKGHFLLKQDCDTFDLHEKPLKSNLSFENQKRSSGLKNSAEFNRDGKSLFHANHKQFYTEMKFPAIAKPINKSQFIKQQRTHNIENAHVCSECGKAFLKLSQFIDHQRVHTGEKPHVCSMCGKAFSRKSRLMDHQRTHTELKHYECTECDKTFLKKSQLNIHQKTHMGGKPYTCSQCGKAFIKKCRLIYHQRTHTGEKPHGCSVCGKAFSTKFSLTTHQKTHTGEKPYICSECGKGFIEKRRLTAHHRTHTGEKPFICNKCGKGFTLKNSLITHQQTHTGEKLYTCSECGKGFSMKHCLMVHQRTHTGEKPYKCNECGKGFALKSPLIRHQRTHTGEKPYVCTECRKGFTMKSDLIVHQRTHTAEKPYICNDCGKGFTVKSRLIVHQRTHTGEKPYVCGECGKGFPAKIRLMGHQRTHTGEKPYICNECGKGFTEKSHLNVHRRTHTGEKPYVCSECGKGLTGKSMLIAHQRTHTGEKPYICNECGKGFTMKSTLSIHQQTHTGEKPYKCNECDKTFRKKTCLIQHQRFHTGKTSFACTECGKFSLRKNDLITHQRIHTGEKPYKCSDCGKAFTTKSGLNVHQRKHTGERPYGCSDCGKAFAHLSILVKHRRIHR

SEQ ID NO: 10261 - protein, 638 aa, Homo sapiens
MAGGSATTWGYPVALLLLVATLGLGRWLQPDPGLPGLRHSYDCGIKGMQLLVFPRPGQTLRFKVVDEFGNRFDVNNCSICYHWVTSRPQEPAVFSADYRGCHVLEKDGRFHLRVFMEAVLPNGRVDVAQDATLICPKPDPSRTLDSQLAPPAMFSVSTPQTLSFLPTSGHTSQGSGHAFPSPLDPGHSSVHPTPALPSPGPGPTLATLAQPHWGTLEHWDVNKRDYIGTHLSQEQCQVASGHLPCIVRRTSKEACQQAGCCYDNTREVPCYYGNTATVQCFRDGYFVLVVSQEMALTHRITLANIHLAYAPTSCSPTQHTEAFVVFYFPLTHCGTTMQVAGDQLIYENWLVSGIHIQKGPQGSITRDSTFQLHVRCVFNASDFLPIQASIFPPPSPAPMTQPGPLRLELRIAKDETFSSYYGEDDYPIVRLLREPVHVEVRLLQRTDPNLVLLLHQCWGAPSANPFQQPQWPILSDGCPFKGDSYRTQMVALDGATPFQSHYQRFTVATFALLDSGSQRALRGLVYLFCSTSACHTSGLETCSTACSTGTTRQRRSSGHRNDTARPQDIVSSPGPVGFEDSYGQEPTLGPTDSNGNSSLRPLLWAVLLLPAVALVLGFGVFVGLSQTWAQKLWESNRQ

SEQ ID NO: 10262 - protein, 510 aa, Homo sapiens
MLPLEKAFASPRSSPAPPDLPTPGSAAGVQQEEPETIPERTPADLEFSRLRFREFVYQEAAGPHQTLARLHELCRQWLMPEARSKEQMLELLVLEQFLGILPDKVRPWVVAQYPESCKKAASLVEGLADVLEEPGMLLGSPAGSSSILSDGVYERHMDPLLLPGELASPSQALGAGEIPAPSETPWLSPDPLFLEQRRVREAKTEEDGPANTEQKLKSFPEDPQHLGEWGHLDPAEENLKSYRKLLLWGYQLSQPDAASRLDTEELRLVERDPQGSSLPEGGRRQESAGCACEEAAPAGVLPELPTEAPPGDALADPPSGTTEEEEEQPGKAPDPQDPQDAESDSATGSQRQSVIQQPAPDRGTAKLGTKRPHPEDGDGQSLEGVSSSGDSAGLEAGQGPGADEPGLSRGKPYACGECGEAFAWLSHLMEHHSSHGGRKRYACQGCWKTFHFSLALAEHQKTHEKEKSYALGGARGPQPSTREAQAGARAGGPPESVEGEAPPAPPEAQR

SEQ ID NO: 10263 - protein, 509 aa, Homo sapiens
MLPLEKAFASPRSSPAPPDLPTPGSAAGVQQEEPETIPERTPADLEFSRLRFREFVYQEAAGPHQTLARLHELCRQWLMPEARSKEQMLELLVLEQFLGILPDKVRPWVVAQYPESCKKAASLVEGLADVLEEPGMLLGSPAGSSSILSDGVYERHMDPLLLPGELASPSQALGAGEIPAPSETPWLSPDPLFLEQRRVREAKTEEDGPANTEQKLKSFPEDPQHLGEWGHLDPAEENLKSYRKLLLWGYQLSQPDAASRLDTEELRLVERDPQGSSLPGGRRQESAGCACEEAAPAGVLPELPTEAPPGDALADPPSGTTEEEEEQPGKAPDPQDPQDAESDSATGSQRQSVIQQPAPDRGTAKLGTKRPHPEDGDGQSLEGVSSSGDSAGLEAGQGPGADEPGLSRGKPYACGECGEAFAWLSHLMEHHSSHGGRKRYACQGCWKTFHFSLALAEHQKTHEKEKSYALGGARGPQPSTREAQAGARAGGPPESVEGEAPPAPPEAQR

SEQ ID NO: 10264 - protein, 566 aa, Homo sapiens
MRRVGGRADEDATAAGSLWVLAPPEPTGHLVIPGTSPLEPPCPWLDSHIFQCRFGKMLPLEKAFASPRSSPAPPDLPTPGSAAGVQQEEPETIPERTPADLEFSRLRFREFVYQEAAGPHQTLARLHELCRQWLMPEARSKEQMLELLVLEQFLGILPDKVRPWVVAQYPESCKKAASLVEGLADVLEEPGMLLGSPAGSSSILSDGVYERHMDPLLLPGELASPSQALGAGEIPAPSETPWLSPDPLFLEQRRVREAKTEEDGPANTEQKLKSFPEDPQHLGEWGHLDPAEENLKSYRKLLLWGYQLSQPDAASRLDTEELRLVERDPQGSSLPEGGRRQESAGCACEEAAPAGVLPELPTEAPPGDALADPPSGTTEEEEEQPGKAPDPQDPQDAESDSATGSQRQSVIQQPAPDRGTAKLGTKRPHPEDGDGQSLEGVSSSGDSAGLEAGQGPGADEPGLSRGKPYACGECGEAFAWLSHLMEHHSSHGGRKRYACQGCWKTFHFSLALAEHQKTHEKEKSYALGGARGPQPSTREAQAGARAGGPPESVEGEAPPAPPEAQR

SEQ ID NO: 10265 - protein, 374 aa, Homo sapiens
MLLGSPAGSSSILSDGVYERHMDPLLLPGELASPSQALGAGEIPAPSETPWLSPDPLFLEQRRVREAKTEEDGPANTEQKLKSFPEDPQHLGEWGHLDPAEENLKSYRKLLLWGYQLSQPDAASRLDTEELRLVERDPQGSSLPGGRRQESAGCACEEAAPAGVLPELPTEAPPGDALADPPSGTTEEEEEQPGKAPDPQDPQDAESDSATGSQRQSVIQQPAPDRGTAKLGTKRPHPEDGDGQSLEGVSSSGDSAGLEAGQGPGADEPGLSRGKPYACGECGEAFAWLSHLMEHHSSHGGRKRYACQGCWKTFHFSLALAEHQKTHEKEKSYALGGARGPQPSTREAQAGARAGGPPESVEGEAPPAPPEAQR

SEQ ID NO: 10266 - protein, 155 aa, Homo sapiens
MASLKCSTVVCVICLEKPKYRCPACRVPYCSVVCFRKHKEQCNPETRPVEKKIRSALPTKTVKPVENKDDDDSIADFLNSDEEEDRVSLQNLKNLGESATLRSLLLNPHLRQLMVNLDQGEDKAKLMRAYMQEPLFVEFADCCLGIVEPSQNEES

SEQ ID NO: 10267 - protein, 148 aa, Homo sapiens
MASLKCSTVVCVICLEKPKYRCPACRVPYCSVVCFRKHKEQCNPETRPVEKKIRSALPTKTVKPVENKDDDDSIADFLNSDEEEDRVSLQNLKNLDGLSSCHPGWSAAAQSRLTATSPSQIQAILMPQPPEQLGLQAPATTPNQFLYF

SEQ ID NO: 10268 - protein, 199 aa, Homo sapiens
MALNGAEVDDFSWEPPTEAETKVLQARRERQDRISRLMGDYLLRGYRMLGETCADCGTILLQDKQRKIYCVACQELDSDVDKDNPALNAQAALSQAREHQLASASELPLGSRPAPQPPVPRPEHCEGAAAGLKAAQGPPAPAVPPNTDVMACTQTALLQKLTWASAELGSSTSLETSIQLCGLIRACAEALRSLQQLQH

SEQ ID NO: 10269 - protein, 1349 aa, Homo sapiens
MIWYVATFIASVIGTRGLAAEGAHGLREEPEFVTARAGESVVLRCDVIHPVTGQPPPYVVEWFKFGVPIPIFIKFGYYPPHVDPEYAGRASLHDKASLRLEQVRSEDQGWYECKVLMLDQQYDTFHNGSWVHLTINAPPTFTETPPQYIEAKEGGSITMTCTAFGNPKPIVTWLKEGTLLGASGKYQVSDGSLTVTSVSREDRGAYTCRAYSIQGEAVHTTHLLVQGPPFIVSPPENITVNISQDALLTCRAEAYPGNLTYTWYWQDENVYFQNDLKLRVRILIDGTLIIFRVKPEDSGKYTCVPSNSLGRSPSASAYLTVQYPARVLNMPPVIYVPVGIHGYIRCPVDAEPPATVVKWNKDGRPLQVEKNLGWTLMEDGSIRIEEATEEALGTYTCVPYNTLGTMGQSAPARLVLKDPPYFTVLPGWEYRQEAGRELLIPCAAAGDPFPVITWRKVGKPSRSKHSALPSGSLQFRALSKEDHGEWECVATNVVTSITASTHLTVIGTSPHAPGSVRVQVSMTTANVSWEPGYDGGYEQTFSVWMKRAQFGPHDWLSLPVPPGPSWLLVDTLEPETAYQFSVLAQNKLGTSAFSEVVTVNTLAFPITTPEPLVLVTPPRCLIANRTQQGVLLSWLPPANHSFPIDRYIMEFRVAERWELLDDGIPGTEGEFFAKDLSQDTWYEFRVLAVMQDLISEPSNIAGVSSTDIFPQPDLTEDGLARPVLAGIVATICFLAAAILFSTLAACFVNKQRKRKLKRKKDPPLSITHCRKSLESPLSSGKVSPESIRTLRAPSESSDDQGQPAAKRMLSPTREKELSLYKKTKRAISSKKYSVAKAEAEAEATTPIELISRGPDGRFVMDPAEMEPSLKSRRIEGFPFAEETDMYPEFRQSDEENEDPLVPTSVAALKSQLTPLSSSQESYLPPPAYSPRFQPRGLEGPGGLEGRLQATGQARPPAPRPFHHGQYYGYLSSSSPGEVEPPPFYVPEVGSPLSSVMSSPPLPTEGPFGHPTIPEENGENASNSTLPLTQTPTGGRSPEPWGRPEFPFGGLETPAMMFPHQLPPCDVPESLQPKAGLPRGLPPTSLQVPAAYPGILSLEAPKGWAGKSPGRGPVPAPPAAKWQDRPMQPLVSQGQLRHTSQGMGIPVLPYPEPAEPGAHGGPSTFGLDTRWYEPQPRPRPSPRQARRAEPSLHQVVLQPSRLSPLTQSPLSSRTGSPELAARARPRPGLLQQAEMSEITLQPPAAVSFSRKSTPSTGSPSQSSRSGSPSYRPAMGFTTLATGYPSPPPGPAPAGPGDSLDVFGQTPSPRRTGEELLRPETPPPTLPTSGKLQRDRPAPATSPPERALSKL

SEQ ID NO: 10270 - protein, 1437 aa, Homo sapiens
MIWYVATFIASVIGTRGLAAEGAHGLREEPEFVTARAGESVVLRCDVIHPVTGQPPPYVVEWFKFGVPIPIFIKFGYYPPHVDPEYAGRASLHDKASLRLEQVRSEDQGWYECKVLMLDQQYDTFHNGSWVHLTINAPPTFTETPPQYIEAKEGGSITMTCTAFGNPKPIVTWLKEGTLLGASGKYQVSDGSLTVTSVSREDRGAYTCRAYSIQGEAVHTTHLLVQGPPFIVSPPENITVNISQDALLTCRAEAYPGNLTYTWYWQDENVYFQNDLKLRVRILIDGTLIIFRVKPEDSGKYTCVPSNSLGRSPSASAYLTVQYPARVLNMPPVIYVPVGIHGYIRCPVDAEPPATVVKWNKDGRPLQVEKNLGWTLMEDGSIRIEEATEEALGTYTCVPYNTLGTMGQSAPARLVLKDPPYFTVLPGWEYRQEAGRELLIPCAAAGDPFPVITWRKVGKPSRSKHSALPSGSLQFRALSKEDHGEWECVATNVVTSITASTHLTVIGTSPHAPGSVRVQVSMTTANVSWEPGYDGGYEQTFSVWMKRAQFGPHDWLSLPVPPGPSWLLVDTLEPETAYQFSVLAQNKLGTSAFSEVVTVNTLAFPITTPEPLVLVTPPRCLIANRTQQGVLLSWLPPANHSFPIDRYIMEFRVAERWELLDDGIPGTEGEFFAKDLSQDTWYEFRVLAVMQDLISEPSNIAGVSSTDIFPQPDLTEDGLARPVLAGIVATICFLAAAILFSTLAACFVNKQRKRKLKRKKDPPLSITHCRKSLESPLSSGKVSPESIRTLRAPSESSDDQGQPAAKRMLSPTREKELSLYKKTKRAISSKKYSVAKAEAEAEATTPIELISRGPDGRFVMDPAEMEPSLKSRRIEGFPFAEETDMYPEFRQSDEENEDPLVPTSVAALKSQLTPLSSSQESYLPPPAYSPRFQPRGLEGPGGLEGRLQATGQARPPAPRPFHHGQYYGYLSSSSPGEVEPPPFYVPEVGSPLSSVMSSPPLPTEGPFGHPTIPEENGENASNSTLPLTQTPTGGRSPEPWGRPEFPFGGLETPAMMFPHQLPPCDVPESLQPKAGLPRGLPPTSLQVPAAYPGILSLEAPKGWAGKSPGRGPVPAPPAAKWQDRPMQPLVSQGQLRHTSQGMGIPVLPYPEPAEPGAHGGPSTFGLDTRWYEPQPRPRPSPRQARRAEPSLHQVVLQPSRLSPLTQSPLSSRTGSPELAARARPRPGLLQQAEMSEITLQPPAAVSFSRKSTPSTGSPSQSSRSGSPSYRPAMGFTTLATGYPSPPPGPAPAGPGDSLDVFGQTPSPRRTGEELLRPETPPPTLPTSGTLPPAPGNAAAPERLEALKYQRIKKPKKSSKGSSKSKKRSDDSASQTQQLPNSQVLWPDEAVCLRKKKRHSRPDPFARLSDLCHRQLPEDQTAILNSVDHDDPGHATLL

SEQ ID NO: 10271 - protein, 667 aa, Homo sapiens
MAGMKTASGDYIDSSWELRVFVGEEDPEAESVTLRVTGESHIGGVLLKIVEQINRKQDWSDHAIWWEQKRQWLLQTHWTLDKYGILADARLFFGPQHRPVILRLPNRRALRLRASFSQPLFQAVAAICRLLSIRHPEELSLLRAPEKKEKKKKEKEPEEELYDLSKVVLAGGVAPALFRGMPAHFSDSAQTEACYHMLSRPQPPPDPLLLQRLPRPSSLSDKTQLHSRWLDSSRCLMQQGIKAGDALWLRFKYYSFFDLDPKTDPVRLTQLYEQARWDLLLEEIDCTEEEMMVFAALQYHINKLSQSGEVGEPAGTDPGLDDLDVALSNLEVKLEGSAPTDVLDSLTTIPELKDHLRIFRIPRRPRKLTLKGYRQHWVVFKETTLSYYKSQDEAPGDPIQQLNLKGCEVVPDVNVSGQKFCIKLLVPSPEGMSEIYLRCQDEQQYARWMAGCRLASKGRTMADSSYTSEVQAILAFLSLQRTGSGGPGNHPHGPDASAEGLNPYGLVAPRFQRKFKAKQLTPRILEAHQNVAQLSLAEAQLRFIQAWQSLPDFGISYVMVRFKGSRKDEILGIANNRLIRIDLAVGDVVKTWRFSNMRQWNVNWDIRQVAIEFDEHINVAFSCVSASCRIVHEYIGGYIFLSTRERARGEELDEDLFLQLTGGHEAF

SEQ ID NO: 10272 - protein, 663 aa, Homo sapiens
MAGMKTASGDYIDSSWELRVFVGEEDPEAESVTLRVTGESHIGGVLLKIVEQINRKQDWSDHAIWWEQKRQWLLQTHWTLDKYGILADARLFFGPQHRPVILRLPNRRALRLRASFSQPLFQAVAAICRLLSIRHPEELSLLRAPEKKEKKKKEKEPEEELYDLSKVVLAGGVAPALFRGMPAHFSDSAQTEACYHMLSRPQPPPDPLLLQRLPRPSSLSDKTQLHSRWLDSSRCLMQQGIKAGDALWLRFKYYSFFDLDPKTDPVRLTQLYEQARWDLLLEEIDCTEEEMMVFAALQYHINKLSQSGEVGEPAGTDPGLDDLDVALSNLEVKLEGSAPTDVLDSLTTIPELKDHLRIFRPRKLTLKGYRQHWVVFKETTLSYYKSQDEAPGDPIQQLNLKGCEVVPDVNVSGQKFCIKLLVPSPEGMSEIYLRCQDEQQYARWMAGCRLASKGRTMADSSYTSEVQAILAFLSLQRTGSGGPGNHPHGPDASAEGLNPYGLVAPRFQRKFKAKQLTPRILEAHQNVAQLSLAEAQLRFIQAWQSLPDFGISYVMVRFKGSRKDEILGIANNRLIRIDLAVGDVVKTWRFSNMRQWNVNWDIRQVAIEFDEHINVAFSCVSASCRIVHEYIGGYIFLSTRERARGEELDEDLFLQLTGGHEAF

SEQ ID NO: 10273 - protein, 109 aa, Homo sapiens
MVLKFSVSILWIQLAWVSTQLLEQSPQFLSIQEGENLTVYCNSSSVFSSLQWYRQEPGEGPVLLVTVVTGGEVKKLKRLTFQFGDARKDSSLHITAAQTGDTGLYLCAG

SEQ ID NO: 10274 - protein, 172 aa, Homo sapiens
MRRQPAKVAALLLGLLLECTEAKKHCWYFEGLYPTYYICRSYEDCCGSRCCVRALSIQRLWYFWFLLMMGVLFCCGAGFFIRRRMYPPPLIEEPAFNVSYTRQPPNPGPGAQQPGPPYYTDPGGPGMNPVGNSMAMAFQVPPNSPQGSVACPPPPAYCNTPPPPYEQVVKAK

SEQ ID NO: 10275 - protein, 163 aa, Homo sapiens
MRRTGSHAQCTEAKKHCWYFEGLYPTYYICRSYEDCCGSRCCVRALSIQRLWYFWFLLMMGVLFCCGAGFFIRRRMYPPPLIEEPAFNVSYTRQPPNPGPGAQQPGPPYYTDPGGPGMNPVGNSMAMAFQVPPNSPQGSVACPPPPAYCNTPPPPYEQVVKAK

SEQ ID NO: 10276 - protein, 169 aa, Homo sapiens
MLSETLGYLSSVLLQCTEAKKHCWYFEGLYPTYYICRSYEDCCGSRCCVRALSIQRLWYFWFLLMMGVLFCCGAGFFIRRRMYPPPLIEEPAFNVSYTRQPPNPGPGAQQPGPPYYTDPGGPGMNPVGNSMAMAFQVPPNSPQGSVACPPPPAYCNTPPPPYEQVVKAK

SEQ ID NO: 10277 - protein, 155 aa, Homo sapiens
MCTEAKKHCWYFEGLYPTYYICRSYEDCCGSRCCVRALSIQRLWYFWFLLMMGVLFCCGAGFFIRRRMYPPPLIEEPAFNVSYTRQPPNPGPGAQQPGPPYYTDPGGPGMNPVGNSMAMAFQVPPNSPQGSVACPPPPAYCNTPPPPYEQVVKAK

SEQ ID NO: 10278 - protein, 504 aa, Homo sapiens
MDPGQQPPPQPAPQGQGQPPSQPPQGQGPPSGPGQPAPAATQAAPQAPPAGHQIVHVRGDSETDLEALFNAVMNPKTANVPQTVPMRLRKLPDSFFKPPEPKSHSRQASTDAGTAGALTPQHVRAHSSPASLQLGAVSPGTLTPTGVVSGPAATPTAQHLRQSSFEIPDDVPLPAGWEMAKTSSGQRYFLNHIDQTTTWQDPRKAMLSQMNVTAPTSPPVQQNMMNSASGPLPDGWEQAMTQDGEIYYINHKNKTTSWLDPRLDPRFAMNQRISQSAPVKQPPPLAPQSPQGGVMGGSNSNQQQQMRLQQLQMEKERLRLKQQELLRQAMRNINPSTANSPKCQELALRSQLPTLEQDGGTQNPVSSPGMSQELRTMTTNSSDPFLNSGTYHSRDESTDSGLSMSSYSVPRTPDDFLNSVDEMDTGDTINQSTLPSQQNRFPDYLEAIPGTNVDLGTLEGDGMNIEGEELMPSLQEALSSDILNDMESVLAATKLDKESFLTWL

SEQ ID NO: 10279 - protein, 488 aa, Homo sapiens
MDPGQQPPPQPAPQGQGQPPSQPPQGQGPPSGPGQPAPAATQAAPQAPPAGHQIVHVRGDSETDLEALFNAVMNPKTANVPQTVPMRLRKLPDSFFKPPEPKSHSRQASTDAGTAGALTPQHVRAHSSPASLQLGAVSPGTLTPTGVVSGPAATPTAQHLRQSSFEIPDDVPLPAGWEMAKTSSGQRYFLNHIDQTTTWQDPRKAMLSQMNVTAPTSPPVQQNMMNSASGPLPDGWEQAMTQDGEIYYINHKNKTTSWLDPRLDPRFAMNQRISQSAPVKQPPPLAPQSPQGGVMGGSNSNQQQQMRLQQLQMEKERLRLKQQELLRQELALRSQLPTLEQDGGTQNPVSSPGMSQELRTMTTNSSDPFLNSGTYHSRDESTDSGLSMSSYSVPRTPDDFLNSVDEMDTGDTINQSTLPSQQNRFPDYLEAIPGTNVDLGTLEGDGMNIEGEELMPSLQEALSSDILNDMESVLAATKLDKESFLTWL

SEQ ID NO: 10280 - protein, 454 aa, Homo sapiens
MDPGQQPPPQPAPQGQGQPPSQPPQGQGPPSGPGQPAPAATQAAPQAPPAGHQIVHVRGDSETDLEALFNAVMNPKTANVPQTVPMRLRKLPDSFFKPPEPKSHSRQASTDAGTAGALTPQHVRAHSSPASLQLGAVSPGTLTPTGVVSGPAATPTAQHLRQSSFEIPDDVPLPAGWEMAKTSSGQRYFLNHIDQTTTWQDPRKAMLSQMNVTAPTSPPVQQNMMNSASAMNQRISQSAPVKQPPPLAPQSPQGGVMGGSNSNQQQQMRLQQLQMEKERLRLKQQELLRQVRPQELALRSQLPTLEQDGGTQNPVSSPGMSQELRTMTTNSSDPFLNSGTYHSRDESTDSGLSMSSYSVPRTPDDFLNSVDEMDTGDTINQSTLPSQQNRFPDYLEAIPGTNVDLGTLEGDGMNIEGEELMPSLQEALSSDILNDMESVLAATKLDKESFLTWL

SEQ ID NO: 10281 - protein, 326 aa, Homo sapiens
MAKTSSGQRYFLNHIDQTTTWQDPRKAMLSQMNVTAPTSPPVQQNMMNSASGPLPDGWEQAMTQDGEIYYINHKNKTTSWLDPRLDPRFAMNQRISQSAPVKQPPPLAPQSPQGGVMGGSNSNQQQQMRLQQLQMEKERLRLKQQELLRQAMRNINPSTANSPKCQELALRSQLPTLEQDGGTQNPVSSPGMSQELRTMTTNSSDPFLNSGTYHSRDESTDSGLSMSSYSVPRTPDDFLNSVDEMDTGDTINQSTLPSQQNRFPDYLEAIPGTNVDLGTLEGDGMNIEGEELMPSLQEALSSDILNDMESVLAATKLDKESFLTWL

SEQ ID NO: 10282 - protein, 450 aa, Homo sapiens
MDPGQQPPPQPAPQGQGQPPSQPPQGQGPPSGPGQPAPAATQAAPQAPPAGHQIVHVRGDSETDLEALFNAVMNPKTANVPQTVPMRLRKLPDSFFKPPEPKSHSRQASTDAGTAGALTPQHVRAHSSPASLQLGAVSPGTLTPTGVVSGPAATPTAQHLRQSSFEIPDDVPLPAGWEMAKTSSGQRYFLNHIDQTTTWQDPRKAMLSQMNVTAPTSPPVQQNMMNSASAMNQRISQSAPVKQPPPLAPQSPQGGVMGGSNSNQQQQMRLQQLQMEKERLRLKQQELLRQELALRSQLPTLEQDGGTQNPVSSPGMSQELRTMTTNSSDPFLNSGTYHSRDESTDSGLSMSSYSVPRTPDDFLNSVDEMDTGDTINQSTLPSQQNRFPDYLEAIPGTNVDLGTLEGDGMNIEGEELMPSLQEALSSDILNDMESVLAATKLDKESFLTWL

SEQ ID NO: 10283 - protein, 466 aa, Homo sapiens
MDPGQQPPPQPAPQGQGQPPSQPPQGQGPPSGPGQPAPAATQAAPQAPPAGHQIVHVRGDSETDLEALFNAVMNPKTANVPQTVPMRLRKLPDSFFKPPEPKSHSRQASTDAGTAGALTPQHVRAHSSPASLQLGAVSPGTLTPTGVVSGPAATPTAQHLRQSSFEIPDDVPLPAGWEMAKTSSGQRYFLNHIDQTTTWQDPRKAMLSQMNVTAPTSPPVQQNMMNSASAMNQRISQSAPVKQPPPLAPQSPQGGVMGGSNSNQQQQMRLQQLQMEKERLRLKQQELLRQAMRNINPSTANSPKCQELALRSQLPTLEQDGGTQNPVSSPGMSQELRTMTTNSSDPFLNSGTYHSRDESTDSGLSMSSYSVPRTPDDFLNSVDEMDTGDTINQSTLPSQQNRFPDYLEAIPGTNVDLGTLEGDGMNIEGEELMPSLQEALSSDILNDMESVLAATKLDKESFLTWL

SEQ ID NO: 10284 - protein, 470 aa, Homo sapiens
MDPGQQPPPQPAPQGQGQPPSQPPQGQGPPSGPGQPAPAATQAAPQAPPAGHQIVHVRGDSETDLEALFNAVMNPKTANVPQTVPMRLRKLPDSFFKPPEPKSHSRQASTDAGTAGALTPQHVRAHSSPASLQLGAVSPGTLTPTGVVSGPAATPTAQHLRQSSFEIPDDVPLPAGWEMAKTSSGQRYFLNHIDQTTTWQDPRKAMLSQMNVTAPTSPPVQQNMMNSASAMNQRISQSAPVKQPPPLAPQSPQGGVMGGSNSNQQQQMRLQQLQMEKERLRLKQQELLRQVRPQAMRNINPSTANSPKCQELALRSQLPTLEQDGGTQNPVSSPGMSQELRTMTTNSSDPFLNSGTYHSRDESTDSGLSMSSYSVPRTPDDFLNSVDEMDTGDTINQSTLPSQQNRFPDYLEAIPGTNVDLGTLEGDGMNIEGEELMPSLQEALSSDILNDMESVLAATKLDKESFLTWL

SEQ ID NO: 10285 - protein, 492 aa, Homo sapiens
MDPGQQPPPQPAPQGQGQPPSQPPQGQGPPSGPGQPAPAATQAAPQAPPAGHQIVHVRGDSETDLEALFNAVMNPKTANVPQTVPMRLRKLPDSFFKPPEPKSHSRQASTDAGTAGALTPQHVRAHSSPASLQLGAVSPGTLTPTGVVSGPAATPTAQHLRQSSFEIPDDVPLPAGWEMAKTSSGQRYFLNHIDQTTTWQDPRKAMLSQMNVTAPTSPPVQQNMMNSASGPLPDGWEQAMTQDGEIYYINHKNKTTSWLDPRLDPRFAMNQRISQSAPVKQPPPLAPQSPQGGVMGGSNSNQQQQMRLQQLQMEKERLRLKQQELLRQVRPQELALRSQLPTLEQDGGTQNPVSSPGMSQELRTMTTNSSDPFLNSGTYHSRDESTDSGLSMSSYSVPRTPDDFLNSVDEMDTGDTINQSTLPSQQNRFPDYLEAIPGTNVDLGTLEGDGMNIEGEELMPSLQEALSSDILNDMESVLAATKLDKESFLTWL

SEQ ID NO: 10286 - protein, 508 aa, Homo sapiens
MDPGQQPPPQPAPQGQGQPPSQPPQGQGPPSGPGQPAPAATQAAPQAPPAGHQIVHVRGDSETDLEALFNAVMNPKTANVPQTVPMRLRKLPDSFFKPPEPKSHSRQASTDAGTAGALTPQHVRAHSSPASLQLGAVSPGTLTPTGVVSGPAATPTAQHLRQSSFEIPDDVPLPAGWEMAKTSSGQRYFLNHIDQTTTWQDPRKAMLSQMNVTAPTSPPVQQNMMNSASGPLPDGWEQAMTQDGEIYYINHKNKTTSWLDPRLDPRFAMNQRISQSAPVKQPPPLAPQSPQGGVMGGSNSNQQQQMRLQQLQMEKERLRLKQQELLRQVRPQAMRNINPSTANSPKCQELALRSQLPTLEQDGGTQNPVSSPGMSQELRTMTTNSSDPFLNSGTYHSRDESTDSGLSMSSYSVPRTPDDFLNSVDEMDTGDTINQSTLPSQQNRFPDYLEAIPGTNVDLGTLEGDGMNIEGEELMPSLQEALSSDILNDMESVLAATKLDKESFLTWL

SEQ ID NO: 10287 - protein, 196 aa, Homo sapiens
MPSGEERRDRQKGRRAGCDTSSTPSNTAPRIPEPGAHPTAARPATAQPPRSLLPPVCSKTIALPASAAAASGSDTAGMRGLGKAPHSGEGHERGRGNSKMKACNNYQYGYLAKPDTSFWIKCRRWLLADAGRHTQRPFWTFRVSHSPLLEAEAGRPSDVSQLQLGSDLKPKMRRPAGELFSPKDAGWELDPAEKSE

SEQ ID NO: 10288 - protein, 323 aa, Homo sapiens
MSERKVLNKYYPPDFDPSKIPKLKLPKDRQYVVRLMAPFNMRCKTCGEYIYKGKKFNARKETVQNEVYLGLPIFRFYIKCTRCLAEITFKTDPENTDYTMEHGATRNFQAEKLLEEEEKRVQKEREDEELNNPMKVLENRTKDSKLEMEVLENLQELKDLNQRQAHVDFEAMLRQHRLSEEERRRQQQEEDEQETAALLEEARKRRLLEDSDSEDEAAPSPLQPALRPNPTAILDEAPKPKRKVEVWEQSVGSLGSRPPLSRLVVVKKAKADPDCSNGQPQAAPTPGAPQNRKEANPTPLTPGASSLSQLGAYLDSDDSNGSN

SEQ ID NO: 10289 - protein, 920 aa, Homo sapiens
MNSMNPMKPALPPAPHGDGSFAYESVPWQQSATQPAGSLSVVTTVWGVGNATQSQVLGNPMGPAGSPSGSSMMPGVAGGSSALTSPQCLGQQAFAEGGANKGYVQQGVYSRGGYPGAPGFTTGYAGGPGGLGLPSHAARPSTDFTQAAAAAAVAAAAATATATATATVAALQEKQSQELSQYGAMGAGQSFNSQFLQHGGPRGPSVPAGMNPTGIGGVMGPSGLSPLAMNPTRAAGMTPLYAGQRLPQHGYPGPPQAQPLPRQGVKRTYSEVYPGQQYLQGGQYAPSTAQFAPSPGQPPAPSPSYPGHRLPLQQGMTQSLSVPGPTGLHYKPTEQFNGQGASFNGGSVSYSQPGLSGPTRSIPGYPSSPLPGNPTPPMTPSSSVPYMSPNQEVKSPFLPDLKPNLNSLHSSPSGSGPCDELRLTFPVRDGVVLEPFRLQHNLAVSNHVFQLRDSVYKTLIMRPDLELQFKCYHHEDRQMNTNWPASVQVSVNATPLTIERGDNKTSHKPLYLKHVCQPGRNTIQITVTACCCSHLFVLQLVHRPSVRSVLQGLLKKRLLPAEHCITKIKRNFSSGTIPGTPGPNGEDGVEQTAIKVSLKCPITFRRIQLPARGHDCRHIQCFDLESYLQLNCERGTWRCPVCNKTALLEGLEVDQYMLGILIYIQNSDYEEITIDPTCSWKPVPVKPDMHIKEEPDGPALKRCRTVSPAHVLMPSVMEMIAALGPGAAPFAPLQPPSVPAPSDYPGQGSSFLGPGTFPESFPPTTPSTPTLAEFTPGPPPISYQSDIPSSLLTSEKSTACLPSQMAPAGHLDPTHNPGTPGLHTSNLGAPPGPQLHHSNPPPASRQSLGQASLGPTGELAFSPATGVMGPPSMSGAGEAPEPALDLLPELTNPDELLSYLGPPDLPTNNNDDLLSLFENN

SEQ ID NO: 10290 - protein, 894 aa, Homo sapiens
MNSMNPMKPALPPAPHGDGSFAYESVPWQQSATQPAGSLSVVTTVWGVGNATQSQVLGNPMGPAGSPSGSSMMPGVAGGSSALTSPQCLGQQAFAEGGANKGYVQQGVYSRGGYPGAPGFTTGYAGGPGGLGLPSHAARPSTDFTQAAAAAAVAAAAATATATATATVAALQEKQSQELSQYGAMGAGQSFNSQFLQHGGPRGPSVPAGMNPTGIGGVMGPSGLSPLAMNPTRAAGMTPLYAGQRLPQHGYPGPPQAQPLPRQGVKRTYSEVYPGQQYLQGGQYAPSTAQFAPSPGQPPAPSPSYPGHRLPLQQGMTQSLSVPGPTGLHYKPTRSIPGYPSSPLPGNPTPPMTPSSSVPYMSPNQEVKSPFLPDLKPNLNSLHSSPSGSGPCDELRLTFPVRDGVVLEPFRLQHNLAVSNHVFQLRDSVYKTLIMRPDLELQFKCYHHEDRQMNTNWPASVQVSVNATPLTIERGDNKTSHKPLYLKHVCQPGRNTIQITVTACCCSHLFVLQLVHRPSVRSVLQGLLKKRLLPAEHCITKIKRNFSSGTIPGTPGPNGEDGVEQTAIKVSLKCPITFRRIQLPARGHDCRHIQCFDLESYLQLNCERGTWRCPVCNKTALLEGLEVDQYMLGILIYIQNSDYEEITIDPTCSWKPVPVKPDMHIKEEPDGPALKRCRTVSPAHVLMPSVMEMIAALGPGAAPFAPLQPPSVPAPSDYPGQGSSFLGPGTFPESFPPTTPSTPTLAEFTPGPPPISYQSDIPSSLLTSEKSTACLPSQMAPAGHLDPTHNPGTPGLHTSNLGAPPGPQLHHSNPPPASRQSLGQASLGPTGELAFSPATGVMGPPSMSGAGEAPEPALDLLPELTNPDELLSYLGPPDLPTNNNDDLLSLFENN

SEQ ID NO: 10291 - protein, 862 aa, Homo sapiens
MNSMNPMKPALPPAPHGDGSFAYESVPWQQSATQPAGSLSVVTTVWGVGNATQSQCLGQQAFAEGGANKGYVQQGVYSRGGYPGAPGFTTGYAGGPGGLGLPSHAARPSTDFTQAAAAAAVAAAAATATATATATVAALQEKQSQELSQYGAMGAGQSFNSQFLQHGGPRGPSVPAGMNPTGIGGVMGPSGLSPLAMNPTRAAGMTPLYAGQRLPQHGYPGPPQAQPLPRQGVKRTYSEVYPGQQYLQGGQYAPSTAQFAPSPGQPPAPSPSYPGHRLPLQQGMTQSLSVPGPTGLHYKPTRSIPGYPSSPLPGNPTPPMTPSSSVPYMSPNQEVKSPFLPDLKPNLNSLHSSPSGSGPCDELRLTFPVRDGVVLEPFRLQHNLAVSNHVFQLRDSVYKTLIMRPDLELQFKCYHHEDRQMNTNWPASVQVSVNATPLTIERGDNKTSHKPLYLKHVCQPGRNTIQITVTACCCSHLFVLQLVHRPSVRSVLQGLLKKRLLPAEHCITKIKRNFSSGTIPGTPGPNGEDGVEQTAIKVSLKCPITFRRIQLPARGHDCRHIQCFDLESYLQLNCERGTWRCPVCNKTALLEGLEVDQYMLGILIYIQNSDYEEITIDPTCSWKPVPVKPDMHIKEEPDGPALKRCRTVSPAHVLMPSVMEMIAALGPGAAPFAPLQPPSVPAPSDYPGQGSSFLGPGTFPESFPPTTPSTPTLAEFTPGPPPISYQSDIPSSLLTSEKSTACLPSQMAPAGHLDPTHNPGTPGLHTSNLGAPPGPQLHHSNPPPASRQSLGQASLGPTGELAFSPATGVMGPPSMSGAGEAPEPALDLLPELTNPDELLSYLGPPDLPTNNNDDLLSLFENN

SEQ ID NO: 10292 - protein, 540 aa, Homo sapiens
MEREALPWGLEPQDVQSSDEMRSPEGYLRGNMSENEEEEISQQEGSGDYEVEEIPFGLEPQSPGFEPQSPEFEPQSPRFEPESPGFESRSPGLVPPSPEFAPRSPESDSQSPEFESQSPRYEPQSPGYEPRSPGYEPRSPGYESESSRYESQNTELKTQSPEFEAQSSKFQEGAEMLLNPEEKSPLNISVGVHPLDSFTQGFGEQPTGDLPIGPPFEMPTGALLSTPQFEMLQNPLGLTGALRGPGRRGGRARGGQGPRPNICGICGKSFGRGSTLIQHQRIHTGEKPYKCEVCSKAFSQSSDLIKHQRTHTGERPYKCPRCGKAFADSSYLLRHQRTHSGQKPYKCPHCGKAFGDSSYLLRHQRTHSHERPYSCTECGKCYSQNSSLRSHQRVHTGQRPFSCGICGKSFSQRSALIPHARSHAREKPFKCPECGKRFGQSSVLAIHARTHLPGRTYSCPDCGKTFNRSSTLIQHQRSHTGERPYRCAVCGKGFCRSSTLLQHHRVHSGERPYKCDDCGKAFSQSSDLIRHQRTHAAGRR

SEQ ID NO: 10293 - protein, 372 aa, Homo sapiens
MASSASARTPAGKRVINQEELRRLMKEKQRLSTSRKRIESPFAKYNRLGQLSCALCNTPVKSELLWQTHVLGKQHREKVAELKGAKEASQGSSASSAPHSVKRKAPDADDQDVKRAKATLVPQVQPSTSAWTTNFDKIGKEFIRATPSKPSGLSLLPDYEDEEEEEEEEEGDGERKRGDASKPLSDAQGKEHSVSSSREVTSSVLPNDFFSTNPPKAPIIPHSGSIEKAEIHEKVVERRENTAEALPEGFFDDPEVDARVRKVDAPKDQMDKEWDEFQKAMRQVNTISEAIVAEEDEEGRLDRQIGEIDEQIECYRRVEKLRNRQDEIKNKLKEILTIKELQKKEEENADSDDEGELQDLLSQDWRVKGALL

SEQ ID NO: 10294 - protein, 151 aa, Homo sapiens
MHAGKRSPLTQSISCVCLPELGALWEIESARVNLRVSGREASREMESSPRPHRIAGVKRFLKHAGKWSLRWFLSPRWILQFRRWARKWSRFTRSSFQVRWAAVPAGKCSQHQGLSAVATASPGVFWEMEFDVSSPLTEGAGSPMSSKHAGE

SEQ ID NO: 10295 - protein, 412 aa, Homo sapiens
MSRRKQTNPNKVHWDQVFAGLEEQARQAMMKTDFPGDLGSQRQAIQQLRDQDSSSSDSEGDEEETTQDEVSSHTSEEDGGVVKVEKELENTEQPVGGNEVVEHEVTGNLNSDPLLELCQCPLCQLDCGSREQLIAHVYQHTAAVVSAKSYMCPVCGRALSSPGSLGRHLLIHSEDQRSNCAVCGARFTSHATFNSEKLPEVLNMESLPTVHNEGPSSAEGKDIAFSPPVYPAGILLVCNNCAAYRKLLEAQTPSVRKWALRRQNEPLEVRLQRLERERTAKKSRRDNETPEEREVRRMRDREAKRLQRMQETDEQRARRLQRDREAMRLKRANETPEKRQARLIREREAKRLKRRLEKMDMMLRAQFGQDPSAMAALAAEMNFFQLPVSGVELDSQLLGKMAFEEQNSSSLH

SEQ ID NO: 10296 - protein, 370 aa, Homo sapiens
MSRRKQTNPNKVHWDSEGDEEETTQDEVSSHTSEEDGGVVKVEKELENTEQPVGGNEVVEHEVTGNLNSDPLLELCQCPLCQLDCGSREQLIAHVYQHTAAVVSAKSYMCPVCGRALSSPGSLGRHLLIHSEDQRSNCAVCGARFTSHATFNSEKLPEVLNMESLPTVHNEGPSSAEGKDIAFSPPVYPAGILLVCNNCAAYRKLLEAQTPSVRKWALRRQNEPLEVRLQRLERERTAKKSRRDNETPEEREVRRMRDREAKRLQRMQETDEQRARRLQRDREAMRLKRANETPEKRQARLIREREAKRLKRRLEKMDMMLRAQFGQDPSAMAALAAEMNFFQLPVSGVELDSQLLGKMAFEEQNSSSLH

SEQ ID NO: 10297 - protein, 119 aa, Homo sapiens
MVRISKPKTFQAYLDDCHRRYSCAHCRAHLANHDDLISKSFQGSQGRAYLFNSVVNVGCGPAEERVLLTGLHAVADIHCENCKTTLGWKYEQAFESSQKYKEGKYIIELNHMIKDNGWD

SEQ ID NO: 10298 - protein, 157 aa, Homo sapiens
MCVAQVLTAHLLPPRQALGSLCSPWAAPRVGPLPPAPAMVRISKPKTFQAYLDDCHRRYSCAHCRAHLANHDDLISKSFQGSQGRAYLFNSVVNVGCGPAEERVLLTGLHAVADIHCENCKTTLGWKYEQAFESSQKYKEGKYIIELNHMIKDNGWD

SEQ ID NO: 10299 - protein, 612 aa, Homo sapiens
MAAGQREARPQVSLTFEDVAVLFTWDEWRKLAPSQRNLYRDVMLENYRNLVSLGLSFTKPKVISLLQQGEDPWEVEKDSSGVSSLGCKSTPKMTKSTQTQDSFQEQIRKRLKRDEPWNFISERSCIYEEKLKKQQDKNENLQIISVAHTKILTVDRSHKNVEFGQNFYLKSVFIKQQRFAKEKTPSKCEIQRNSFKQNSNLLNQSKIKTAEKRYKCSTCEKAFIHNSSLRKHQKNHTGEKLFKCKECLKAFSQSSALIQHQRTHTGEKPYICKECGKAFSHSASLCKHLRTHTVEKCYRCKECGKSFSRRSGLFIHQKIHAQENPHKYNPGRKASSYSTSLSGSQKIHLRKKSYLCNECGNTFKSSSSLRYHQRIHTGEKPFKCSECGRAFSQSASLIQHERIHTGEKPYRCNECGKGFTSISRLNRHRIIHTGEKLYNCNECGKALSSHSTLIIHERIHTGEKPCKCKVCGKAFRQSSALIQHQRMHTGERPYKCNECDKTFRCNSSLSNHQRIHTGEKPYRCLECGMSFGQSAALIQHQRIHTGEKPFKCNTCGKTFRQSSSLIAHQRIHTGEKPYECNACGKLFSQRSSLTNHYKIHIEEDSLKADLHV

SEQ ID NO: 10300 - protein, 738 aa, Homo sapiens
MTMLQESFSFDDLSVDFTQKEWQLLDPSQKNLYKDVMLENYSSLVSLGYEVMKPDVIFKLEQGEEPWVGDGEIPSSDSPEVWKVDGNMMWHQDNQDKLKIIKRGHECDAFGKNFNLNMNFVPLRKSNSEGDLDGLILKHHLDLLIPKGDYGKAESDDFNVFDNFFLHSKPEDTDTWLKYYDCDKYKESYKKSQIIIYHRNRLGEKLYECSECRKRFSKKPSLIKHQSRHIRDIAFGCGNCGKTFPQKSQFITHHRTHTGEKPYNCSQCGKAFSQKSQLTSHQRTHTGEKPYECGECGKAFSRKSHLISHWRTHTGEKPYGCNECGRAFSEKSNLINHQRIHTGEKPFECRECGKAFSRKSQLVTHHRTHTGTKPFGCSDCRKAFFEKSELIRHQTIHTGEKPYECSECRKAFRERSSLINHQRTHTGEKPHGCIQCGKAFSQKSHLISHQMTHTGEKPFICSKCGKAFSRKSQLVRHQRTHTGEKPYECSECGKAFSEKLSLTNHQRIHTGEKPYVCSECGKAFCQKSHLISHQRTHTGEKPYECSECGKAFGEKSSLATHQRTHTGEKPYECRDCEKAFSQKSQLNTHQRIHTGEKPYECSLCRKAFFEKSELIRHLRTHTGEKPYECNECRKAFREKSSLINHQRIHTGEKPFECSECGKAFSRKSHLIPHQRTHTGEKPYGCSECRKAFSQKSQLVNHQRIHTGEKPYRCIECGKAFSQKSQLINHQRTHTVKKS

SEQ ID NO: 10301 - protein, 591 aa, Homo sapiens
MWERLNCAAEDFYSRLLQKFNEEKKGIRKDPFLYEADVQVQLISKGQPNPLKNILNENDIVFIVEKVPLEKEETSHIEELQSEETAISDFSTGENVGPLALPVGKARQLIGLYTMAHNPNMTHLKINLPVTALPPLWVRCDSSDPEGTCWLGAELITTNNSITGIVLYVVSCKADKNYSVNLENLKNLHKKRHHLSTVTSKGFAQYELFKSSALDDTITASQTAIALDISWSPVDEILQIPPLSSTATLNIKVESGEPRGPLNHLYRELKFLLVLADGLRTGVTEWLEPLEAKSAVELVQEFLNDLNKLDGFGDSTKKDTEVETLKHDTAAVDRSVKRLFKVRSDLDFAEQLWCKMSSSVISYQDLVKCFTLIIQSLQRGDIQPWLHSGSNSLLSKLIHQSYHGTMDTVSLSGTIPVQMLLEIGLDKLKKDYISFFIGQELASLNHLEYFIAPSVDIQEQVYRVQKLHHILEILVSCMPFIKSQHELLFSLTQICIKYYKQNPLDEQHIFQLPVRPTAVKNLYQSEKPQKWRVEIYSGQKKIKTVWQLSDSSPIDHLNFHKPDFSELTLNGSLEERIFFTNMVTCSQVHFK

SEQ ID NO: 10302 - protein, 477 aa, Homo sapiens
MAHNPNMTHLKINLPVTALPPLWVRCDSSDPEGTCWLGAELITTNNSITGIVLYVVSCKADKNYSVNLENLKNLHKKRHHLSTVTSKGFAQYELFKSSALDDTITASQTAIALDISWSPVDEILQIPPLSSTATLNIKVESGEPRGPLNHLYRELKFLLVLADGLRTGVTEWLEPLEAKSAVELVQEFLNDLNKLDGFGDSTKKDTEVETLKHDTAAVDRSVKRLFKVRSDLDFAEQLWCKMSSSVISYQDLVKCFTLIIQSLQRGDIQPWLHSGSNSLLSKLIHQSYHGTMDTVSLSGTIPVQMLLEIGLDKLKKDYISFFIGQELASLNHLEYFIAPSVDIQEQVYRVQKLHHILEILVSCMPFIKSQHELLFSLTQICIKYYKQNPLDEQHIFQLPVRPTAVKNLYQSEKPQKWRVEIYSGQKKIKTVWQLSDSSPIDHLNFHKPDFSELTLNGSLEERIFFTNMVTCSQVHFK

SEQ ID NO: 10303 - protein, 641 aa, Homo sapiens
MGRRSTSSTKSGKFMNPTDQARKEARKRELKKNKKQRMMVRAAVLKMKDPKQIIRDMEKLDEMEFNPVQQPQLNEKVLKDKRKKLRETFERILRLYEKENPDIYKELRKLEVEYEQKRAQLSQYFDAVKNAQHVEVESIPLPDMPHAPSNILIQDIPLPGAQPPSILKKTSAYGPPTRAVSILPLLGHGVPRLPPGRKPPGPPPGPPPPQVVQMYGRKVGFALDLPPRRRDEDMLYSPELAQRGHDDDVSSTSEDDGYPEDMDQDKHDDSTDDSDTDKSDGESDGDEFVHRDNGERDNNEEKKSGLSVRFADMPGKSRKKKKNMKELTPLQAMMLRMAGQEIPEEGREVEEFSEDDDEDDSDDSEAEKQSQKQHKEESHSDGTSTASSQQQAPPQSVPPSQIQAPPMPGPPPLGPPPAPPLRPPGPPTGLPPGPPPGAPPFLRPPGMPGLRGPLPRLLPPGPPPGRPPGPPPGPPPGLPPGPPPRGPPPRLPPPAPPGIPPPRPGMMRPPLVPPLGPAPPGLFPPAPLPNPGVLSAPPNLIQRPKADDTSAATIEKKATATISAKPQITNPKAEITRFVPTALRVRRENKGATAAPQRKSEDDSAVPLAKAAPKSGPSVPVSVQTKDDVYEAFMKEMEGLL

SEQ ID NO: 10304 - protein, 191 aa, Homo sapiens
MGKQNSKLAPEVMEDLVKSTEFNEHELKQWYKGFLKDCPSGRLNLEEFQQLYVKFFPYGDASKFAQHAFRTFDKNGDGTIDFREFICALSITSRGSFEQKLNWAFNMYDLDGDGKITRVEMLEIIEAIYKMVGTVIMMKMNEDGLTPEQRVDKIFSKMDKNKDDQITLDEFKEAAKSDPSIVLLLQCDIQK

SEQ ID NO: 10305 - protein, 341 aa, Homo sapiens
MRLCLIPRNTGTPQRVLRPVVWSPPSRKKPVLSPHNSIMFGHLSPVRIPCLRGKFNLQLPSLDDQVIPARLPKTEVSAEEPKEATEVKDQVETQGQEDNKRGPCSNGEAASTSRPLETQGNLTSSWYNPRPLEGNVHLKSLTEKNQTDKAQVHAVSFYSKGHGVASSHSPAGGILPFGKPDPLPTVLPAPVPGCSLWPEKAALKVLGEDHLPSSPGLLMVGEDMQPKDPAALGSSRSSPPRAAGHRSHKRKLSGPPLQLQPTPPLQLRCDRDERPPPAKLPCLSPEALLVGQASQREGRLQHGNMRKNMRVLSRISKFRRLRQLLRRRKKTRQGRRGGSCL

SEQ ID NO: 10306 - protein, 128 aa, Homo sapiens
MARVHIWPQHTAVNPRLLENQARAMIHHHLMAATPAVFLVSSGPDGSQAKAAAASYLAEPPGSPTPGPFSYTKASVVLFLPNPRPNIFKLHSKEQLAECHQYLQSNMRWDFSFAIKTRMLFLPCSDNV

SEQ ID NO: 10307 - protein, 208 aa, Homo sapiens
MGTGGSLLCGCSLVLSCLCPSASLPDPGNSTWPPGAQAGLPAALALPLPRLPRILFPMAGRPARPSSDFVGCAQGMCCHGRQGTVHIHTSSVSCWTPCPVTGTGGTAVSRKDRVLPHRRQVSLACVCAVGERAGQLWSQKPVQMARPSARHLLPRGSSPNSQAVLLPSVCPVPWPPVGPSPGQGEGLSPAFPGVGTDRGDSWALVLQV

SEQ ID NO: 10308 - protein, 570 aa, Homo sapiens
MGVKTFTHSSSSHSQEMLGKLNMLRNDGHFCDITIRVQDKIFRAHKVVLAACSDFFRTKLVGQAEDENKNVLDLHHVTVTGFIPLLEYAYTATLSINTENIIDVLAAASYMQMFSVASTCSEFMKSSILWNTPNSQPEKGLDAGQENNSNCNFTSRDGSISPVSSECSVVERTIPVCRESRRKRKSYIVMSPESPVKCGTQTSSPQVLNSSASYSENRNQPVDSSLAFPWTFPFGIDRRIQPEKVKQAENTRTLELPGPSETGRRMADYVTCESTKTTLPLGTEEDVRVKVERLSDEEVHEEVSQPVSASQSSLSDQQTVPGSEQVQEDLLISPQSSSIGSVDEGVSEGLPTLQSTSSTNAPPDDDDRLENVQYPYQLYIAPSTSSTERPSPNGPDRPFQCPTCGVRFTRIQNLKQHMLIHSGIKPFQCDRCGKKFTRAYSLKMHRLKHEGKRCFRCQICSATFTSFGEYKHHMRVSRHIIRKPRIYECKTCGAMLTNSGNLIVHLRSLNHEASELANYFQSSDFLVPDYLNQEQEETLVQYDLGEHGFESNSSVQMPVISQYHSKGKEP

SEQ ID NO: 10309 - protein, 474 aa, Homo sapiens
MGVKTFTHSSSSHSQEMLGKLNMLRNDGHFCDITIRVQDKIFRAHKVVLAACSDFFRTKLVGQAEDENKNVLDLHHVTVTGFIPLLEYAYTATLSINTENIIDVLAAASYMQMFSVASTCSEFMKSSILWNTPNSQPEKGLDAGQENNSNCNFTSRDGSISPVSSECSVVERTIPVCRESRRKRKSYIVMSPESPVKCGTQTSSPQVLNSSASYSENRNQPVDSSLAFPWTFPFGIDRRIQPEKVKQAENTRTLELPGPSETGRRMADYVTCESTKTTLPLGTEEDVRVKVERLSDEEVHEEVSQPVSASQSSLSDQQTVPGSEQVQEDLLISPQSSSIGSVDEGVSEGLPTLQSTSSTNAPPDDDDRLENVQYPYQLYIAPSTSSTERPSPNGPDRPFQCPTCGVRFTRIQNLKQHMLIHSGIKPFQCDRCGKKFTRAYSLKMHRLKHEVPLQRQGTMIDNSQAVDEMTRNGE

SEQ ID NO: 10310 - protein, 453 aa, Homo sapiens
MGVKTFTHSSSSHSQEMLGKLNMLRNDGHFCDITIRVQDKIFRAHKVVLAACSDFFRTKLVGQAEDENKNVLDLHHVTVTGFIPLLEYAYTATLSINTENIIDVLAAASYMQMFSVASTCSEFMKSSILWNTPNSQPEKGLDAGQENNSNCNFTSRDGSISPVSSECSVVERTIPVCRESRRKRKSYIVMSPESPVKCGTQTSSPQVLNSSASYSENRNQPVDSSLAFPWTFPFGIDRRIQPEKVKQAENTRTLELPGPSETGRRMADYVTCESTKTTLPLGTEEDVRVKVERLSDEEVHEEVSQPVSASQSSLSDQQTVPGSEQVQEDLLISPQSSSIGSVDEGVSEGLPTLQSTSSTNAPPDDDDRLENVQYPYQLYIAPSTSSTERPSPNGPDRPFQCPTCGVRFTRIQNLKQHMLIHSGIKPFQCDRCGKKFTRAYSLKMHRLKHEVIS

SEQ ID NO: 10311 - protein, 467 aa, Homo sapiens
MGVKTFTHSSSSHSQEMLGKLNMLRNDGHFCDITIRVQDKIFRAHKVVLAACSDFFRTKLVGQAEDENKNVLDLHHVTVTGFIPLLEYAYTATLSINTENIIDVLAAASYMQMFSVASTCSEFMKSSILWNTPNSQPEKGLDAGQENNSNCNFTSRDGSISPVSSECSVVERTIPVCRESRRKRKSYIVMSPESPVKCGTQTSSPQVLNSSASYSENRNQPVDSSLAFPWTFPFGIDRRIQPEKVKQAENTRTLELPGPSETGRRMADYVTCESTKTTLPLGTEEDVRVKVERLSDEEVHEEVSQPVSASQSSLSDQQTVPGSEQVQEDLLISPQSSSIGSVDEGVSEGLPTLQSTSSTNAPPDDDDRLENVQYPYQLYIAPSTSSTERPSPNGPDRPFQCPTCGVRFTRIQNLKQHMLIHSGIKPFQCDRCGKKFTRAYSLKMHRLKHEGHPRKSASRSSSATNCC

SEQ ID NO: 10312 - protein, 638 aa, Homo sapiens
MLLAQINRDSQGMTEFPGGGMEAQHVTLCLTEAVTVADGDNLENMEGVSLQAVTLADGSTAYIQHNSKDAKLIDGQVIQLEDGSAAYVQHVPIPKSTGDSLRLEDGQAVQLEDGTTAFIHHTSKDSYDQSALQAVQLEDGTTAYIHHAVQVPQSDTILAIQADGTVAGLHTGDATIDPDTISALEQYAAKVSIDGSESVAGTGMIGENEQEKKMQIVLQGHATRVTAKSQQSGEKAFRCEYDGCGKLYTTAHHLKVHERSHTGDRPYQCEHAGCGKAFATGYGLKSHVRTHTGEKPYRCSEDNCTKSFKTSGDLQKHIRTHTGERPFKCPFEGCGRSFTTSNIRKVHVRTHTGERPYYCTEPGCGRAFASATNYKNHVRIHTGEKPYVCTVPGCDKRFTEYSSLYKHHVVHTHSKPYNCNHCGKTYKQISTLAMHKRTAHNDTEPIEEEQEAFFEPPPGQGEDVLKGSQITYVTGVEGDDVVSTQVATVTQSGLSQQVTLISQDGTQHVNISQADMQAIGNTITMVTQDGTPITVPAHDAVISSAGTHSVAMVTAEGTEGEQVAIVAQDLAAFHTASSEMGHQQHSHHLVTTETRPLTLVATSNGTQIAVQLGEQPSLEEAIRIASRIQQGETPGLDD

SEQ ID NO: 10313 - protein, 607 aa, Homo sapiens
MLLAQINRDSQGMTEFPGGGMEAQHVTLCLTEAVTVADAKLIDGQVIQLEDGSAAYVQHVPIPKSTGDSLRLEDGQAVQLEDGTTAFIHHTSKDSYDQSALQAVQLEDGTTAYIHHAVQVPQSDTILAIQADGTVAGLHTGDATIDPDTISALEQYAAKVSIDGSESVAGTGMIGENEQEKKMQIVLQGHATRVTAKSQQSGEKAFRCEYDGCGKLYTTAHHLKVHERSHTGDRPYQCEHAGCGKAFATGYGLKSHVRTHTGEKPYRCSEDNCTKSFKTSGDLQKHIRTHTGERPFKCPFEGCGRSFTTSNIRKVHVRTHTGERPYYCTEPGCGRAFASATNYKNHVRIHTGEKPYVCTVPGCDKRFTEYSSLYKHHVVHTHSKPYNCNHCGKTYKQISTLAMHKRTAHNDTEPIEEEQEAFFEPPPGQGEDVLKGSQITYVTGVEGDDVVSTQVATVTQSGLSQQVTLISQDGTQHVNISQADMQAIGNTITMVTQDGTPITVPAHDAVISSAGTHSVAMVTAEGTEGEQVAIVAQDLAAFHTASSEMGHQQHSHHLVTTETRPLTLVATSNGTQIAVQLGEQPSLEEAIRIASRIQQGETPGLDD

SEQ ID NO: 10314 - protein, 637 aa, Homo sapiens
MLLAQINRDSQGMTEFPGGGMEAQHVTLCLTEAVTVADGDNLENMEGVSLQAVTLADGSTAYIQHNSKDAKLIDGQVIQLEDGSAAYVQHVPIPKSRDSLRLEDGQAVQLEDGTTAFIHHTSKDSYDQSALQAVQLEDGTTAYIHHAVQVPQSDTILAIQADGTVAGLHTGDATIDPDTISALEQYAAKVSIDGSESVAGTGMIGENEQEKKMQIVLQGHATRVTAKSQQSGEKAFRCEYDGCGKLYTTAHHLKVHERSHTGDRPYQCEHAGCGKAFATGYGLKSHVRTHTGEKPYRCSEDNCTKSFKTSGDLQKHIRTHTGERPFKCPFEGCGRSFTTSNIRKVHVRTHTGERPYYCTEPGCGRAFASATNYKNHVRIHTGEKPYVCTVPGCDKRFTEYSSLYKHHVVHTHSKPYNCNHCGKTYKQISTLAMHKRTAHNDTEPIEEEQEAFFEPPPGQGEDVLKGSQITYVTGVEGDDVVSTQVATVTQSGLSQQVTLISQDGTQHVNISQADMQAIGNTITMVTQDGTPITVPAHDAVISSAGTHSVAMVTAEGTEGEQVAIVAQDLAAFHTASSEMGHQQHSHHLVTTETRPLTLVATSNGTQIAVQLGEQPSLEEAIRIASRIQQGETPGLDD

SEQ ID NO: 10315 - protein, 364 aa, Homo sapiens
MSVMVVRKKVTRKWEKLPGRNTFCCDGRVMMARQKGIFYLTLFLILGTCTLFFAFECRYLAVQLSPAIPVFAAMLFLFSMATLLRTSFSDPGVIPRALPDEAAFIEMEIEATNGAVPQGQRPPPRIKNFQINNQIVKLKYCYTCKIFRPPRASHCSICDNCVERFDHHCPWVGNCVGKRNYRYFYLFILSLSLLTIYVFAFNIVYVALKSLKIGFLETLKETPGTVLEVLICFFTLWSVVGLTGFHTFLVALNQTTNEDIKGSWTGKNRVQNPYSHGNIVKNCCEVLCGPLPPSVLDRRGILPLEESGSRPPSTQETSSSLLPQSPAPTEHLNSNEMPEDSSTPEEMPPPEPPEPPQEAAEAEK

SEQ ID NO: 10316 - protein, 527 aa, Homo sapiens
MEHPSKMEFFQKLGYDREDVLRVLGKLGEGALVNDVLQELIRTGSRPGALEHPAAPRLVPRGSCGVPDSAQRGPGTALEEDFRTLASSLRPIVIDGSNVAMSHGNKETFSCRGIKLAVDWFRDRGHTYIKVFVPSWRKDPPRADTPIREQHVLAELERQAVLVYTPSRKVHGKRLVCYDDRYIVKVAYEQDGVIVSNDNYRDLQSENPEWKWFIEQRLLMFSFVNDRFMPPDDPLGRHGPSLSNFLSRKPKPPEPSWQHCPYGKKCTYGIKCKFYHPERPHHAQLAVADELRAKTGARPGAGAEEQRPPRAPGGSAGARAAPREPFAHSLPPARGSPDLAALRGSFSRLAFSDDLGPLGPPLPVPACSLTPRLGGPDWVSAGGRVPGPLSLPSPESQFSPGDLPPPPGLQLQPRGEHRPRDLHGDLLSPRRPPDDPWARPPRSDRFPGRSVWAEPAWGDGATGGLSVYATEDDEGDARARARIALYSVFPRDQVDRVMAAFPELSDLARLILLVQRCQSAGAPLGKP

SEQ ID NO: 10317 - protein, 227 aa, Homo sapiens
MEHPSKMEFFQKLGYDREDVLRVLGKLGEGALVNDVLQELIRTGSRPGALEHPAAPRLVPRGSCGVPDSAQRGPGTALEEDFRTLASSLRPIVIDGSNVAMSHGNKETFSCRGIKLAVDWFRDRGHTYIKVFVPSWRKDPPRADTPIREQHVLAELERQAVLVYTPSRKVHGKRLVCYDDRYIVKVAYEQDGVIVSNDNYRDLQSENPEWKWFIEQRLLMFSFVNDR

SEQ ID NO: 10318 - protein, 321 aa, Homo sapiens
MEHPSKMEFFQKLGYDREDVLRVLGKLGEGALVNDVLQELIRTGSRPGALEHPAAPRLVPRGSCGVPDSAQRGPGTALEEDFRTLASSLRPIVIDGSNVAMSHGNKETFSCRGIKLAVDWFRDRGHTYIKVFVPSWRKDPPRADTPIREQHVLAELERQAVLVYTPSRKVHGKRLVCYDDRYIVKVAYEQDGVIVSNDNYRDLQSENPEWKWFIEQRLLMFSFVNDRFMPPDDPLGRHGPSLSNFLSRKPKPPEPSWQHCPYGKKCTYGIKCKFYHPERPHHAQLAVADELRAKTGARPVLPGRPPASARPAAPAAGRTPP

SEQ ID NO: 10319 - protein, 570 aa, Homo sapiens
MPGETEEPRPPEQQDQEGGEAAKAAPEEPQQRPPEAVAAAPAGTTSSRVLRGGRDRGRAAAAAAAAAVSRRRKAEYPRRRRSSPSARPPDVPGQQPQAAKSPSPVQGKKSPRLLCIEKVTTDKDPKEEKEEEDDSALPQEVSIAASRPSRGWRSSRTSVSRHRDTENTRSSRSKTGSLQLICKSEPNTDQLDYDVGEEHQSPGGISSEEEEEEEEEMLISEEEIPFKDDPRDETYKPHLERETPKPRRKSGKVKEEKEKKEIKVEVEVEVKEEENEIREDEEPPRKRGRRRKDDKSPRLPKRRKKPPIQYVRCEMEGCGTVLAHPRYLQHHIKYQHLLKKKYVCPHPSCGRLFRLQKQLLRHAKHHTDQRDYICEYCARAFKSSHNLAVHRMIHTGEKPLQCEICGFTCRQKASLNWHMKKHDADSFYQFSCNICGKKFEKKDSVVAHKAKSHPEVLIAEALAANAGALITSTDILGTNPESLTQPSDGQGLPLLPEPLGNSTSGECLLLEAEGMSKSYCSGTERVSLMADGKIFVGSGSSGGTEGLVMNSDILGATTEVLIEDSDSAGP

SEQ ID NO: 10320 - protein, 529 aa, Homo sapiens
MPGETEEPRPPEQQDQEGGEAAKAAPEEPQQRPPEAVAAAPAGTTSSRVLRGGRDRGRAAAAAAAAAVSRRRKAEYPRRRRSSPSARPPDVPGQQPQAAKSPSPVQGKKSPRLLCIEKVTTDKDPKEEKEEEDDSALPQEVSIAASRPSRGWRSSRTSVSRHRDTENTRSSRSKTGSLQLICKSEPNTDQLDYDVGEEHQSPGGISSEEEEEEEEEMLISEEEIPFKDDPRDETYKPHLERETPKPRRKSGKVKEEKEKKEIKVEVEVEVKEEENEIREDEEPPRKRGRRRKDDKSPRLPKRRKKPPIQYVRCEMEGCGTVLAHPRYLQHHIKYQHLLKKKYVCPHPSCGRLFRLQKQLLRHAKHHTDQRDYICEYCARAFKSSHNLAVHRMIHTGEKPLQCEICGFTCRQKASLNWHMKKHDADSFYQFSCNICGKKFEKKDSVVAHKAKSHPEVLIAEALAANAGALITSTDILGTNPESLTQPSDGQGLPLLPEPLGNSTSGECLLLEAEGMSKSYCSGTERSIHR

SEQ ID NO: 10321 - protein, 1668 aa, Homo sapiens
MSKIRRKVTVENTKTISDSTSRRPSVFERLGPSTGSTAETQCRNWLKTGNCLYGNTCRFVHGPSPRGKGYSSNYRRSPERPTGDLRERMKNKRQDVDTEPQKRNTEESSSPVRKESSRGRHREKEDIKITKERTPESEEENVEWETNRDDSDNGDINYDYVHELSLEMKRQKIQRELMKLEQENMEKREEIIIKKEVSPEVVRSKLSPSPSLRKSSKSPKRKSSPKSSSASKKDRKTSAVSSPLLDQQRNSKTNQSKKKGPRTPSPPPPIPEDIALGKKYKEKYKVKDRIEEKTRDGKDRGRDFERQREKRDKPRSTSPAGQHHSPISSRHHSSSSQSGSSIQRHSPSPRRKRTPSPSYQRTLTPPLRRSASPYPSHSLSSPQRKQSPPRHRSPMREKGRHDHERTSQSHDRRHERREDTRGKRDREKDSREEREYEQDQSSSRDHRDDREPRDGRDRRDARDTRDRRELRDSRDMRDSREMRDYSRDTKESRDPRDSRSTRDAHDYRDREGRDTHRKEDTYPEESRSYGRNHLREESSRTEIRNESRNESRSEIRNDRMGRSRGRVPELPEKGSRGSRGSQIDSHSSNSNYHDSWETRSSYPERDRYPERDNRDQARDSSFERRHGERDRRDNRERDQRPSSPIRHQGRNDELERDERREERRVDRVDDRRDERARERDRERERDRERERERERERDREREKERELERERAREREREREKERDRERDRDRDHDRERERERERDREKEREREREERERERERERERERERERERERARERDKERERQRDWEDKDKGRDDRREKREEIREDRNPRDGHDERKSKKRYRNEGSPSPRQSPKRRREHSPDSDAYNSGDDKNEKHRLLSQVVRPQESRSLSPSHLTEDRQGRWKEEDRKPERKESSRRYEEQELKEKVSSVDKQREQTEILESSRMRAQDIIGHHQSEDRETSDRAHDENKKKAKIQKKPIKKKKEDDVGIERGNIETTSEDGQVFSPKKGQKKKSIEKKRKKSKGDSDISDEEAAQQSKKKRGPRTPPITTKEELVEMCNGKNGILEDSQKKEDTAFSDWSDEDVPDRTEVTEAEHTATATTPGSTPSPLSSLLPPPPPVATATATTVPATLAATTAAAATSFSTSAITISTSATPTNTTNNTFANEDSHRKCHRTRVEKVETPHVTIEDAQHRKPMDQKRSSSLGSNRSNRSHTSGRLRSPSNDSAHRSGDDQSGRKRVLHSGSRDREKTKSLEITGERKSRIDQLKRGEPSRSTSSDRQDSRSHSSRRSSPESDRQVHSRSGSFDSRDRLQERDRYEHDRERERERRDTRQREWDRDADKDWPRNRDRDRLRERERERERDKRRDLDRERERLISDSVERDRDRDRDRTFESSQIESVKRCEAKLEGEHERDLESTSRDSLALDKERMDKDLGSVQGFEETNKSERTESLEGDDESKLDDAHSLGSGAGEGYEPISDDELDEILAGDAEKREDQQDEEKMPDPLDVIDVDWSGLMPKHPKEPREPGAALLKFTPGAVMLRVGISKKLAGSELFAKVKETCQRLLEKPKDADNLFEHELGALNMAALLRKEERASLLSNLGPCCKALCFRRDSAIRKQLVKNEKGTIKQAYTSAPMVDNELLRLSLRLFKRKTTCHAPGHEKTEDNKLSQSSIQQELCVS

SEQ ID NO: 10322 - protein, 1564 aa, Homo sapiens
MSKIRRKVTVENTKTISDSTSRRPSVFERLGPSTGSTAETQCRNWLKTGNCLYGNTCRFVHGPSPRGKGYSSNYRRSPERPTGDLRERMKNKRQDVDTEPQKRNTEESSSPVRKESSRGRHREKEDIKITKERTPESEEENVEWETNRDDSDNGDINYDYVHELSLEMKRQKIQRELMKLEQENMEKREEIIIKKEVSPEVVRSKLSPSPSLRKSSKSPKRKSSPKSSSASKKDRKTSAVSSPLLDQQRNSKTNQSKKKGPRTPSPPPPIPEDIALGKKYKEKYKVKDRIEEKTRDGKDRGRDFERQREKRDKPRSTSPAGQHHSPISSRHHSSSSQSGSSIQRHSPSPRRKRTPSPSYQRTLTPPLRRSASPYPSHSLSSPQRKQSPPRHRSPMREKGRHDHERTSQSHDRRHERREDTRGKRDREKDSREEREYEQDQSSSRDHRDDREPRDGRDRRDARDTRDRRELRDSRDMRDSREMRDYSRDTKESRDPRDSRSTRDAHDYRDREGRDTHRKEDTYPEESRSYGRNHLREESSRTEIRNESRNESRSEIRNDRMGRSRGRVPELPEKGSRGSRGSQIDSHSSNSNYHDSWETRSSYPERDRYPERDNRDQARDSSFERRHGERDRRDNRERDQRPSSPIRHQGRNDELERDERREERRVDRVDDRRDERARERDRERERDRERERERERERDREREKERELERERAREREREREKERDRERDRDRDHDRERERERERDREKEREREREERERERERERERERERERERERARERDKERERQRDWEDKDKGRDDRREKREEIREDRNPRDGHDERKSKKRYRNEGSPSPRQSPKRRREHSPDSDAYNSGDDKNEKHRLLSQVVRPQESRSLSPSHLTEDRQGRWKEEDRKPERKESSRRYEEQELKEKVSSVDKQREQTEILESSRMRAQDIIGHHQSEDRETSDRAHDENKKKAKIQKKPIKKKKEDDVGIERGNIETTSEDGQVFSPKKGQKKKSIEKKRKKSKGDSDISDEEAAQQSKKKRGPRTPPITTKEELVEMCNGKNGILEDSQKKEDTAFSDWSDEDVPDRTEVTEAEHTATATTPGSTPSPLSSLLPPPPPVATATATTVPATLAATTAAAATSFSTSAITISTSATPTNTTNNTFANEDSHRKCHRTRVEKVETPHVTIEDAQHRKPMDQKRSSSLGSNRSNRSHTSGRLRSPSNDSAHRSGDDQSGRKRVLHSGSRDREKTKSLEITGERKSRIDQLKRGEPSRSTSSDRQDSRSHSSRRSSPESDRQVHSRSGSFDSRDRLQERDRYEHDRERERERRDTRQREWDRDADKDWPRNRDRDRLRERERERERDKRRDLDRERERLISDSVERDRDRDRDRTFESSQIESVKRCEAKLEGEHERDLESTSRDSLALDKERMDKDLGSVQGFEETNKSERTESLEAGDDESKLDDAHSLGSGAGEGYEPISDDELDEILAGDAEKREDQQDEEKMPDPLDVIDVDWSGLMPKHPKEPREPGAALLKFTPGAVMLRVGISKKLAGSELFAKVKETCQRLLEKPKGSFILL

SEQ ID NO: 10323 - protein, 132 aa, Homo sapiens
MSFEYRHYKREAKICTCRGGWAHVLLCIGVSQGACAEHLPHRPAVEKDVPGAGEVLFMCSWRIFPVASASPSSSISGLAGHSVFLVPGLAAHPGSHSDQPPGVPSRRKSRLERWSPSVSRSTSPPTEAPFCL

SEQ ID NO: 10324 - protein, 335 aa, Homo sapiens
MSAKLGKSSSLLTQTSEECNGILTEKMEEEEQTCDPDSSLHWSSSYSPETFRQQFRQFGYQDSPGPHEALSRLWELCHLWLRPEVHTKEQILELLVLEQFLAILPKELQAWVQKHHPENGEETVTMLEDVERELDGPKQIFFGRRKDMIAEKLAPSEITEELPSSQLMPVKKQLQGASWELQSLRPHDEDIKTTNVKSASRQKTSLGIELHCNVSNILHMNGSQSSTYRGTYEQDGRFEKRQGNPSWKKQQKCDECGKIFSQSSALILHQRIHSGKKPYACDECAKAFSRSAILIQHRRTHTGEKPYKCHDCGKAFSQSSNLFRHRKRHIRKKVP

SEQ ID NO: 10325 - protein, 210 aa, Homo sapiens
MSAKLGKSSSLLTQTSEECNGILTEKMEEEEQTCDPDSSLHWSSSYSPETFRQQFRQFGYQDSPGPHEALSRLWELCHLWLRPEVHTKEQILELLVLEQFLAILPKELQAWVQKHHPENGEETVTMLEDVERELDGPKQIFFGRRKDMIAEKLAPSEITEELPSSQLMPVKKQLQGASWELQSLRPHGEGAGFSSCWKVWGPSAHHTHLS

SEQ ID NO: 10326 - protein, 333 aa, Homo sapiens
MSAKLGKSSSLLTQTSEECNGILTEKMEEEEQTCDPDSSLHWSSSYSPETFRQQFRQFGYQDSPGPHEALSRLWELCHLWLRPEVHTKEQILELLVLEQFLAILPKELQAWVQKHHPENGEETVTMLEDVERELDGPKQIFFGRRKDMIAEKLAPSEITEELPSSQLMPVKKQLQGASWELQSLRPHDEDIKTTNVKSASRQKTSLGIELHCNVSNILHMNGSQSSTYRGTYEQDGRFEKRQGNPSWKKQQKCDECGKIFSQSSALILHQRIHSGKKPYACDECAKAFSRSAILIQHRRTHTDSKYEHAIAEAQKNMYFKTRLKCPRSLSGGR

SEQ ID NO: 10327 - protein, 294 aa, Homo sapiens
MEYPAPATVQAADGGAAGPYSSSELLEGQEPDGVRFDRERARRLWEAVSGAQPVGREEVEHMIQKNQCLFTNTQCKVCCALLISESQKLAHYQSKKHANKVKRYLAIHGMETLKGETKKLDSDQKSSRSKDKNQCCPICNMTFSSPVVAQSHYLGKTHAKNLKLKQQSTKVEALHQNREMIDPDKFCSLCHATFNDPVMAQQHYVGKKHRKQETKLKLMARYGRLADPAVTDFPAGKGYPCKTCKIVLNSIEQYQAHVSGFKHKNQSPKTVASSLGQIPMQRQPIQKDSTTLED

SEQ ID NO: 10328 - protein, 319 aa, Homo sapiens
MEYPAPATVQAADGGAAGPYSSSELLEGQEPDGVRFDRERARRLWEAVSGAQPVGREEAQFFPHSRTVIPILVLSETYSLCHPVEHMIQKNQCLFTNTQCKVCCALLISESQKLAHYQSKKHANKVKRYLAIHGMETLKGETKKLDSDQKSSRSKDKNQCCPICNMTFSSPVVAQSHYLGKTHAKNLKLKQQSTKVEALHQNREMIDPDKFCSLCHATFNDPVMAQQHYVGKKHRKQETKLKLMARYGRLADPAVTDFPAGKGYPCKTCKIVLNSIEQYQAHVSGFKHKNQSPKTVASSLGQIPMQRQPIQKDSTTLED

SEQ ID NO: 10329 - protein, 262 aa, Homo sapiens
MEYPAPATVQAADGGAAGPYSSSELLEGQEPDGVRFDRERARRLWEAVSGAQPVGREEVEHMIQKNQCLFTNTQCKVCCALLISESQKLAHYQSSRSKDKNQCCPICNMTFSSPVVAQSHYLGKTHAKNLKLKQQSTKVEALHQNREMIDPDKFCSLCHATFNDPVMAQQHYVGKKHRKQETKLKLMARYGRLADPAVTDFPAGKGYPCKTCKIVLNSIEQYQAHVSGFKHKNQSPKTVASSLGQIPMQRQPIQKDSTTLED

SEQ ID NO: 10330 - protein, 953 aa, Homo sapiens
MDVAESPERDPHSPEDEEQPQGLSDDDILRDSGSDQDLDGAGVRASDLEDEESAARGPSQEEEDNHSDEEDRASEPKSQDQDSEVNELSRGPTSSPCEEEGDEGEEDRTSDLRDEASSVTRELDEHELDYDEEVPEEPAPAVQEDEAEKAGAEDDEEKGEGTPREEGKAGVQSVGEKESLEAAKEKKKEDDDGEIDDGEIDDDDLEEGEVKDPSDRKVRPRPTCRFFMKGNCTWGMNCRFIHPGVNDKGNYSLITKADPFPPNGAPPLGPHPLMPANPWGGPVVDEILPPPPPEPPTESAWERGLRHAKEVLKKATIRKEQEPDFEEKRFTVTIGEDEREFDKENEVFRDWNSRIPRDVRDTVLEPYADPYYDYEIERFWRGGQYENFRVQYTETEPYHNYRERERERERENRQRERERERERDRERERRQRERERERERERDKERQRRKEEWERERAKRDEKDRQHRDRDREKEREKEKGKPKPRSPQPPSRQAEPPKKEAATTGPQVKRADEWKDPWRRSKSPKKKLGVSVSPSRARRRRKTSASSASASNSSRSSSRSSSYSGSGSSRSRSRSSSYSSYSSRSSRHSSFSGSRSRSRSFSSSPSPSPTPSPHRPSIRTKGEPAPPPGKAGEKSVKKPAPPPAPPQATKTTAPVPEPTKPGDPREARRKERPARTPPRRRTLSGSGSGSGSSYSGSSSRSRSLSVSSVSSVSSATSSSSSAHSVDSEDMYADLASPVSSASSRSPAPAQTRKEKGKSKKEDGVKEEKRKRDSSTQPPKSAKPPAGGKSSQQPSTPQQAPPGQPQQGTFVAHKEIKLTLLNKAADKGSRKRYEPSDKDRQSPPPAKRPNTSPDRGSRDRKSGGRLGSPKPERQRGQNSKAPAAPADRKRQLSPQSKSSSKVTSVPGKASDPGAASTKSGKASTLSRREELLKQLKAVEDAIARKRAKIPGKA

SEQ ID NO: 10331 - protein, 468 aa, Homo sapiens
MAQLRRGHLTFRDVAIEFSQEEWKCLDPVQKALYRDVMLENYRNLVSLGICLPDLSIISMMKQRTEPWTVENEMKVAKNPDRWEGIKDINTGRSCAVRSKAGNKPITNQLGLTFQLPLPELEIFQGEGKIYECNQVQKFISHSSSVSPLQRIYSGVKTHIFNKHRNDFVDFPLLSQEQKAHIRRKPYECNEQGKVFRVSSSLPNHQVIHTADKPNRCHECGKTVRDKSGLAEHWRIRTGEKPYKCKECGKLFNRIAYLARHEKVHTGESPYKCNECGKVFSRITYLVRHQKIHTREKPHKCNKCGKVYSSSSYLAQHWRIHTGEKLYKCNKCGKEFSGHSSLTTHLLIHTGEKPYKCKECDKAFRHKFSLTVHQRNHNGEKPYKCHECGKVFTQVSHLARHQKIHTGEKPYKCNECGKVFTQNSHLANHQRIHTGEKPYKCHVCGKVFRHSSWFVQHQRSVHERVLTN

SEQ ID NO: 10332 - protein, 727 aa, Homo sapiens
MDNRKEPPFFNDDNMGPFYYRLHFCDTMELFIETLTGTCFELRVSPFETVISVKAKIRRLEGIPICRQHLIWNNMELENDYCLNDYNISEGCTLKLVLAMRGGPINTRRVPTDDPLRKMAEYLDSSRVEVWEKTSCSKQVTFLVYQEGDQLNFFPAVDRGDGTLTPLSDSSKKIDFHLHVLRRKGEHRMSGGSMYNSDTDEDEETEPSSSGQQIIENSITMNKMKLLKAKMKNMNLSKKPKKAVKIKPHPPVAPRPSSGSTAPSRHRLLRVLPNIGQSCSPAFGNAYPPEISRNGISSLATQLSAERYISSITGEFLKEDNSWENNTLSHFSSNVKLPPQIPHLELGNDQELADSVLHLGSSLPRQTKHFLGNLPSSNGNIVLPSEECVTEQSLLPKVGSLASFAEGNADEQSSGLEGACKVNLELLLTNADKGLKAPEQHLKHVAGVLNGESVETSVLNYRELSPHKNRLLSPLRCSAPMSLHNSLVKPERQSKCFEFGKLQPSSSQSLDVQNITDSSFSRTTCFQGVKVDSLGKRSDVISKVEARDITEMTNKASKEPVGCVNNISFLASLAGSTSRNRLQSTRGAGRLQNSGTGLSTNLQHFQEENFRKSSPQLEHTGVFLSTHGVGMNGNNAAAGKSVGECTTHHLPPVKAPLQTKKKTTNHCFLCGKKTGLASSYECRCGNNFCASHRYAETHGCTYDYKSAGRRYLHEANPVVNAPKLPKI

SEQ ID NO: 10333 - protein, 79 aa, Homo sapiens
MVWQENEDLRKQLVEASELLKSQAKELKDAHQQQKLALQDFLELCELVAELCSQKQKVWDKEGEMEVAMQKVNTMWQES

SEQ ID NO: 10334 - protein, 619 aa, Homo sapiens
MGPLTFMDVAIEFSVEEWQCLDTAQQNLYRNVMLENYRNLVFLGIAVSKPDLITCLEQGKEPWNMERHEMVAKPPGMCCYFAQDLRPEQSIKASLQRIILRKYEKCGHHNLQLKKGYKSVDEYKVHKGSYNGFNQCLTTTQSKIFQCDKYVKDFHKFSNSNRHKTEKNPFKCKECGKSFCVLSHLTQHKRIHTTVNSYKLEECGKAFNVSSTLSQHKRIHTGQKHYKCEECGIAFNKSSHLNTHKIIHTGEKSYKREECGKAFNISSHLTTHKIIHTGENAYKCKECGKAFNQSSTLTRHKIIHAGEKPYICEHCGRAFNQSSNLTKHKRIHTGDKPYKCEECGKAFNVSSTLTQHKRIHTGEKPYKCEECGKAFNVSSTLTQHKRIHTGEKPYKCEECGKAFNTSSHLTTHKRIHTGEKPYKCEECGKAFNQFSQLTTHKIIHTGEKPYKCKECGKAFKRSSNLTEHRIIHTGEKPYKCEECGKAFNLSSHLTTHKKIHTGEKPYKCKECGKAFNQSSTLARHKIIHAGEKPYKCEECGKAFYQYSNLTQHKIIHTGEKPYKCEECGKAFNWSSTLTKHKVIHTGEKPYKCKECGKAFNQCSNLTTHKKIHAVEKSDK

SEQ ID NO: 10335 - protein, 41 aa, Homo sapiens
MTRNVVRQEFEAPGKPQDSSQQDACLILVKGNWTTNEMEVK

SEQ ID NO: 10336 - protein, 471 aa, Homo sapiens
MNMANFLRGFEEKGIKNDRPEDQLSKEKKKILFSFCEVCNIQLNSAAQAQVHSNGKSHRKRVKQLSDGQPPPPAQASPSSNSSTGSTCHTTTLPALVRTPTLMMQPSLDIKPFMSFPVDSSSAVGLFPNFNTMDPVQKAVINHTFGVSIPPKKKQVISCNVCQLRFNSDSQAEAHYKGSKHAKKVKALDATKNKPKMVPSKDSAKANPSCSITPITGNNSDKSEDKGKLKASSSSQPSSSESGSFLLKSGTTPLPPGAATSPSKSTNGAPGTVVESEEEKAKKLLYCSLCKVAVNSLSQLEAHNTGSKHKTMVEARNGAGPIKSYPRPGSRLKMQNGSKGSGLQNKTFHCEICDVHVNSEIQLKQHISSRRHKDRVAGKPLKPKYSPYNKLQRSPSILAAKLAFQKDMMKPLAPAFLSSPLAAAAAVSSALSLPPRPSASLFQAPAIPPALLRPGHGPIRATPASILFAPY

SEQ ID NO: 10337 - protein, 395 aa, Homo sapiens
MWSGLPSRGSTCHTTTLPALVRTPTLMMQPSLDIKPFMSFPVDSSSAVGLFPNFNTMDPVQKAVINHTFGVSIPPKKKQVISCNVCQLRFNSDSQAEAHYKGSKHAKKVKALDATKNKPKMVPSKDSAKANPSCSITPITGNNSDKSEDKGKLKASSSSQPSSSESGSFLLKSGTTPLPPGAATSPSKSTNGAPGTVVESEEEKAKKLLYCSLCKVAVNSLSQLEAHNTGSKHKTMVEARNGAGPIKSYPRPGSRLKMQNGSKGSGLQNKTFHCEICDVHVNSEIQLKQHISSRRHKDRVAGKPLKPKYSPYNKLQRSPSILAAKLAFQKDMMKPLAPAFLSSPLAAAAAVSSALSLPPRPSASLFQAPAIPPALLRPGHGPIRATPASILFAPY

SEQ ID NO: 10338 - protein, 369 aa, Homo sapiens
MMQPSLDIKPFMSFPVDSSSAVGLFPNFNTMDPVQKAVINHTFGVSIPPKKKQVISCNVCQLRFNSDSQAEAHYKGSKHAKKVKALDATKNKPKMVPSKDSAKANPSCSITPITGNNSDKSEDKGKLKASSSSQPSSSESGSFLLKSGTTPLPPGAATSPSKSTNGAPGTVVESEEEKAKKLLYCSLCKVAVNSLSQLEAHNTGSKHKTMVEARNGAGPIKSYPRPGSRLKMQNGSKGSGLQNKTFHCEICDVHVNSEIQLKQHISSRRHKDRVAGKPLKPKYSPYNKLQRSPSILAAKLAFQKDMMKPLAPAFLSSPLAAAAAVSSALSLPPRPSASLFQAPAIPPALLRPGHGPIRATPASILFAPY

SEQ ID NO: 10339 - protein, 172 aa, Homo sapiens
MVPSKDSAKANPSCSITPITGNNSDKSEDKGKLKASSSSQPSSSESGSFLLKSGTTPLPPGAATSPSKSTNGAPGTVVESEEEKAKKLLYCSLCKVAVNSLSQLEAHNTGSKHKTMVEARNGAGPIKSYPRPGSRLKMQNGSKGSGLQNKTFHCEICDVHVNSEIQLKQPKA

SEQ ID NO: 10340 - protein, 421 aa, Homo sapiens
MRYSLSPDNHLEDGIMNMANFLRGFEEKGIKNDRPEDQLSKEKKKILFSFCEVCNIQLNSAAQAQVHSNGKSHRKRVKQLSDGQPPPPAQASPSSNSSTGSTCHTTTLPALVRTPTLMMQPSLDIKPFMSFPVDSSSAVGLFPNFNTMDPVQKAVINHTFGVSIPPKKKQVISCNVCQLRFNSDSQAEAHYKGSKHAKKVKALDATKNKPKMVPSKDSAKANPSCSITPITGNNSDKSEDKGKLKASSSSQPSSSESGSFLLKSGTTPLPPGAATSPSKSTNGAPGTVVESEEEKAKKLLYCSLCKVAVNSLSQLEAHNTGSKHKTMVEARNGAGPIKSYPRPGSRLKMQNGSKGSGLQNKTFHCEICDVHVNSEIQLKQHISSRRHKDRVAGKPLKPKYTPCKVIGLLPKPLPPANRQLS

SEQ ID NO: 10341 - protein, 666 aa, Homo sapiens
MDLVAFEDVAVNFTQEEWSLLDPSQKNLYREVMQETLRNLASIGEKWKDQNIEDQYKNPRNNLRSLLGERVDENTEENHCGETSSQIPDDTLNKKTSPGVKSCESSVCGEVFVGHSSLNRHIRADTAHKPSEYQEYGQEPYKCQQRKKAFRCHPSFQMQEKAHTGEKLYDCKECGKTFISHSSIQRHMIMHNGDGTYKCKFCGKACPCLSIYLIHERVHTGEKPYKCKQCGKAFSYSTSLQIHERTHTGEKPYECKECGKAFGSPNSLYEHRRTHTGEKPYECKQCGKAFRWFHSFQIHERTHSEEKAYECTKCGKAFKCPSYLCRHEVTHSGKKPCECKQCGKALSYLNFQRHMKMHTRMRPYKCKTVEKPLILPVRFEDMKELTLERNLMNASTVVKPSIVPVPFTIMKGLTLERNPMNVSSVVKPSFLPLPFDIMKGLTLERNRMSVSNVGKPSDLPHTFKCMEGLTLKRNPMNVSSVVKPSFFPLPFDIMKGLTLERNPMSVSNVGKPSHLPHTFKCMKGLTLESNCMNLNNVKKPLDLSETFKFMKRHTLERNPIRNMEKHSTISLPFKYMQQCTEDRMPMNVKSVTKHSYLPRSFEYMQEHTLERNPMNVRNAEKRSIIFLLCVYTKGCTLERNHINVRIVGKHSVCLVPFVDIKGLTLE

SEQ ID NO: 10342 - protein, 545 aa, Homo sapiens
MKQEDNQGVCAHQDSEDKGMGSDFEDSEDREGDPEEREMGSNPHDTNKREGHPEPEMGSNPQDSRHREAVPDICTEGQLSEEEGVSVRGEEDDQSGVADMAMFPGLSESDSISRSLREDDDESAGENRLEEEEEQPAPPVLPWRRHLSLGSRHRGDKPAHRRFHRLHHPMAVDLGELDSLVASIMDAPTICPDCGESFSPGAAFLQHQRIHRLAEAAAAASLEPFGLAGECDAMVGMMGVGVAGGFGAGPPLARPPREKPFRCGECGKGFSRNTYLTNHLRLHTGERPNLCADCGKSFSWRADLLKHRRLHTGEKPYPCPECGEAFSLSSHLLSHRRAHAAASGAGAAALRPFACGECGKGFVRRSHLANHQRIHTGEKPHGCGECGKRFSWRSDLVKHQRVHTGEKPYMCSECGETFSVSSHLFTHKRTHSGERPYVCRECGKGFGRNSHLVNHLRVHTGEKPFRCGQCEKRFSDFSTLTQHQRTHTGEKPYTCIECGKSFIQSSHLIRHRRIHTGNKPHKCAGCGKGFRYKTHLAQHQKLHLC

SEQ ID NO: 10343 - protein, 262 aa, Homo sapiens
MKRHEMVVAKHSALCSRFAQDLWLEQNIKDSFQKVTLSRYGKYGHKNLQLRKGCKSVDECKGHQGGFNGLNQCLKITTSKIFQCNKYVKVMHKFSNSNRHKIRHTENKHFRCKECDKSLCMLSRLTQHKKIHTRENFYKCEECGKTFNWSTNLSKPKKIHTGEKPYKCEVCGKAFHQSSILTKHKIIRTGEKPYKCAHCGKAFKQSSHLTRHKIIHTEEKPYKCEQCGKVFKQSPTLTKHQIIYTGEEPYKCEECGKAFNLS

SEQ ID NO: 10344 - protein, 293 aa, Homo sapiens
MGPLTFMDVAIEFSLEEWQCLDTAQRNVYRHVMLENYRNLVFLALCSRFAQDLWLEQNIKDSFQKVTLSRYGKYGHKNLQLRKGCKSVDECKGHQGGFNGLNQCLKITTSKIFQCNKYVKVMHKFSNSNRHKIRHTENKHFRCKECDKSLCMLSRLTQHKKIHTRENFYKCEECGKTFNWSTNLSKPKKIHTGEKPYKCEVCGKAFHQSSILTKHKIIRTGEKPYKCAHCGKAFKQSSHLTRHKIIHTEEKPYKCEQCGKVFKQSPTLTKHQIIYTGEEPYKCEECGKAFNLS

SEQ ID NO: 10345 - protein, 126 aa, Homo sapiens
MGPLTFMDVAIEFSLEEWQCLDTAQRNVYRHVMLENYRNLVFLDLITCLEQGKEPWNMKRHEMVVAKHSAVAFTYDLSGLNILSFQSILPFVSALYVMGNRNQCLQKHLEARNKDLCVLVLPKTFG

SEQ ID NO: 10346 - protein, 537 aa, Homo sapiens
MESGLAGNGTGAGLVMKVKQEKPERLLQTLAPQAMLVEKDKENIFQQHRGLPPRQTMGRPRALGGQEESGSPRWAPPTEQDAGLAGRAPGSASGPLSPSLSSGEGHFVCLDCGKRFSWWSSLKIHQRTHTGEKPYLCGKCGKSFSQKPNLARHQRHHTGERPFCCPECARRFSQKQHLLKHQKTHSRPATHSCPECERCFRHQVGLRIHQRAHARDRQGSRAGLHELIQDAAARRACRLQPGPPRGRPEWAWLGLCQGWWGQPGARAAVSGPEGPGEPRQFICNECGKSFTWWSSLNIHQRIHTGERPYACPECGRRFSQKPNLTRHLRNHTGERPHPCPHCGRGFRQKQHLLKHLRTHLPGAQAAPCPSCGKSCRSRAALRAHQRAHAVAEPAVPAGEPGDQPQAEAIPGLAARPRSSQRSPGARDTLWGRGQAGLAGPGEPRQFICNECGKSFSWWSALTIHQRIHTGERPYPCPECGRRFSQKPNLTRHRRNHTGERPYLCPACGRGFSQKQHLLKHQRVHRAAPACSPKEEAR

SEQ ID NO: 10347 - protein, 504 aa, Homo sapiens
MPSPDSMTFEDIIVDFTQEEWALLDTSQRKLFQDVMLENISHLVSIGKQLCKSVVLSQLEQVEKLSTQRISLLQGREVGIKHQEIPFIQHIYQKGTSTISTMRSHTQEDPFLCNDLGEDFTQHIALTQNVITYMRTKHFVSKKFGKIFSDWLSFNQHKEIHTKCKSYGSHLFDYAFIQNSALRPHSVTHTREITLECRVCGKTFSKNSNLRRHEMIHTGEKPHGCHLCGKAFTHCSDLRKHERTHTGEKPYGCHLCGKAFSKSSNLRRHEMIHTREKAQICHLCGKAFTHCSDLRKHERTHLGDKPYGCLLCGKAFSKCSYLRQHERTHNGEKPYECHLCGKAFSHCSHLRQHERSHNGEKPHGCHLCGKAFTESSVLKRHERIHTGEKPYECHVCGKAFTESSDLRRHERTHTGEKPYECHLCGKAFNHSSVLRRHERTHTGEKPYECNICGKAFNRSYNFRLHRRVHTGEKPYVCPLCGKAFSKFFNLRQHERTHTKKAMNM

SEQ ID NO: 10348 - protein, 434 aa, Homo sapiens
MPSPDSMTFEDIIVDFTQEEWALLDTSQRKLFQDVMLENISHLVSIGEDFTQHIALTQNVITYMRTKHFVSKKFGKIFSDWLSFNQHKEIHTKCKSYGSHLFDYAFIQNSALRPHSVTHTREITLECRVCGKTFSKNSNLRRHEMIHTGEKPHGCHLCGKAFTHCSDLRKHERTHTGEKPYGCHLCGKAFSKSSNLRRHEMIHTREKAQICHLCGKAFTHCSDLRKHERTHLGDKPYGCLLCGKAFSKCSYLRQHERTHNGEKPYECHLCGKAFSHCSHLRQHERSHNGEKPHGCHLCGKAFTESSVLKRHERIHTGEKPYECHVCGKAFTESSDLRRHERTHTGEKPYECHLCGKAFNHSSVLRRHERTHTGEKPYECNICGKAFNRSYNFRLHRRVHTGEKPYVCPLCGKAFSKFFNLRQHERTHTKKAMNM

SEQ ID NO: 10349 - protein, 139 aa, Homo sapiens
MRSHTQEDPFLCNDLGEDFTQHIALTQNVITYMRTKHFVSKKFGKIFSDWLSFNQHKEIHTKCKSYGSHLFDYAFIQNSALRPHSVTHTREITLECRVCGKTFSKNSNLRRHEMIHTGEKPHGCHLCGKAFTHLIIVNT

SEQ ID NO: 10350 - protein, 464 aa, Homo sapiens
MVSGLRLASRSGEEGWLKPAVARLGPPRHRLRNLRTESPWRSRGSVLFCSGPGRAGRAAEPLHPVCTCGRHFRRPEPCREPLASPIQDSVAFEDVAVNFTQEEWALLDSSQKNLYREVMQETCRNLASVGSQWKDQNIEDHFEKPGKDIRNHIVQRLCESKEDGQYGEVVSQIPNLDLNENISTGLKPCECSICGKVFVRHSLLNRHILAHSGYKPYGEKQYKCEQCGKFFVSVPGVRRHMIMHSGNPAYKCTICGKAFYFLNSVERHQRTHTGEKPYKCKQCGKAFTVSGSCLIHERTHTGEKPYECKECGKTFRFSCSFKTHERTHTGERPYKCTKCDKAFSCSTSLRYHGSIHTGERPYECKQCGKAFSRLSSLCNHRSTHTGEKPYECKQCDQAFSRLSSLHLHERIHTGEKPYECKKCGKAYTRSSHLTRHERSHDIEAGCSDSAYNPSTLGGQGVWIA

SEQ ID NO: 10351 - protein, 378 aa, Homo sapiens
MDSVAFEDVAVNFTQEEWALLDSSQKNLYREVMQETCRNLASVGSQWKDQNIEDHFEKPGKDIRNHIVQRLCESKEDGQYGEVVSQIPNLDLNENISTGLKPCECSICGKVFVRHSLLNRHILAHSGYKPYGEKQYKCEQCGKFFVSVPGVRRHMIMHSGNPAYKCTICGKAFYFLNSVERHQRTHTGEKPYKCKQCGKAFTVSGSCLIHERTHTGEKPYECKECGKTFRFSCSFKTHERTHTGERPYKCTKCDKAFSCSTSLRYHGSIHTGERPYECKQCGKAFSRLSSLCNHRSTHTGEKPYECKQCDQAFSRLSSLHLHERIHTGEKPYECKKCGKAYTRSSHLTRHERSHDIEAGCSDSAYNPSTLGGQGVWIA

SEQ ID NO: 10352 - protein, 188 aa, Homo sapiens
MTETREPAETGGYASLEEDDEDLSPGPEHSSDSEYTLSEPDSEEEEDEEEEEEETTDDPEYDPGYKVKQRLGGGRGGPSRRAPRAAQPPAQPCQLCGRSPLGEAPPGTPPCRLCCPATAPQEAPAPEGRALGEEEEEPPRAGEGRPAGREEEEEEEEEGTYHCTECEDSFDNLGELHGHFMLHARGEV

SEQ ID NO: 10353 - protein, 79 aa, Homo sapiens
MQDVHTKSIACDGDLLPVLQENSISFQMLSLEMSGSFHSSPALENATITILHVSLLSFFRGIQAPCRGSPLLVTDSPGG

SEQ ID NO: 10354 - protein, 153 aa, Homo sapiens
MGGFGSRFWQEGVWDRDLEKSTRLEEDAMESEPLAGTKTRGRGRRRWEARHGWTLPAHASQPSPRTVVATATGAEVSACAGRSAGTRVARPESQLSHLYGWDKYSNPRPSRRARAVARVHALEQAPILCRALRWGLTQFLRGTSPVTQSVPFS

SEQ ID NO: 10355 - protein, 218 aa, Homo sapiens
MQTCSGKGIKMAFLDVQSSSTPQSLPLLLFSHREGGGRGAGDPGAPAVVPAPVSAPRPASSPARSESRSPPLTLISRHITCCSCESPGDVLLSGRGGGGGGGGGARTGGGEGEDRRPRPDFSRVTAVAIPGWMEVESPPHPPPQPQVCPTPSQGAPGHGRAGLPEGKGPGGRDWLRSQSSRCSRATLFGHRAPSPAAPRRGRLPAPGFPSLHSAVSLF

SEQ ID NO: 10356 - protein, 1013 aa, Homo sapiens
MPPPAEVTDPSHAPAVLRQLNEQRLRGLFCDVTLIAGDTKFPAHRSVLAASSPFFREALLTSAPLPLPPATGGAAPNPATTTAASSSSSSSSSSSSSSSSASSSSSSSSSSPPPASPPASSPPRVLELPGVPAAAFSDVLNFIYSARLALPGGGGDGAAVAEIGALGRRLGISRLQGLGEGGDAWVPPTPAPMATSQPEEDSFGPGPRPAGEWEGDRAEAQAPDLQCSLPRRPLPCPQCGKSFIHPKRLQTHEAQCRRGASTRGSTGLGAGGAGPGGPAGVDASALPPPVGFRGGPEHVVKVVGGHVLYVCAACERSYVTLSSLKRHSNVHSWRRKYPCRYCEKVFALAEYRTKHEVWHTGERRYQCIFCWETFVTYYNLKTHQRAFHGISPGLLASEKTPNGGYKPKLNTLKLYRLLPMRAAKRPYKTYSQGAPEAPLSPTLNTPAPVAMPASPPPGPPPAPEPGPPPSVITFAHPAPSVIVHGGSSSGGGGSGTASTGGSQAASVITYTAPPRPPKKREYPPPPPEPAATPTSPATAVSPATAAGPAMATTTEEAKGRNPRAGRTLTYTAKPVGGIGGGGGPPTGAGRGPSQLQAPPPLCQITVRIGEEAIVKRRISETDLRPGELSGEEMEESEEDEEEEDEEEEEEDEEESKAGGEDQLWRPYYSYKPKRKAGAAGGASVGGSGLPRGRRPPRWRQKLERRSWEETPAAESPAGRARTERRHRCGDCAQTFTTLRKLRKHQEAHGGGSHSSRAGRRPSTRFTCPHCAKVCKTAAALSRHGQRHAAERPGGTPTPVIAYSKGSAGTRPGDVKEEAPQEMQVSSSSGEAGGGSTAAEEASETASLQDPIISGGEEPPVVASGGSYVYPPVQEFPLALIGGGREPGGGRGKSGSEGPVGAGEGDRMEGIGAAKVTFYPEPYPLVYGPQLLAAYPYNFSNLAALPVALNMVLPDEKGAGALPFLPGVFGYAVNPQAAPPAPPTPPPPTLPPPIPPKGEGERAGVERTQKGDVG

SEQ ID NO: 10357 - protein, 435 aa, Homo sapiens
MDTASHSLVLLQQLNMQREFGFLCDCTVAIGDVYFKAHRAVLAAFSNYFKMIFIHQTSECIKIQPTDIQPDIFSYLLHIMYTGKGPKQIVDHSRLEEGIRFLHADYLSHIATEMNQVFSPETVQSSNLYGIQISTTQKTVVKQGLEVKEAPSSNSGNRAAVQGDHPQLQLSLAIGLDDGTADQQRACPATQALEEHQKPPVSIKQERCDPESVISQSHPSPSSEVTGPTFTENSVKIHLCHYCGERFDSRSNLRQHLHTHVSGSLPFGVPASILESNDLGEVHPLNENSEALECRRLSSFIVKENEQQPDHTNRGTTEPLQISQVSLISKDTEPVELNCNFSFSRKRKMSCTICGHKFPRKSQLLEHMYTHKGKSYRYNRCQRFGNALAQRFQPYCDSWSDVSLKSSRLSQEHLDLPCALESELTQENVDTILVE

SEQ ID NO: 10358 - protein, 722 aa, Homo sapiens
MEGSRPRAPSGHLAPSPPAFDGELDLQRYSNGPAVSAGSLGMGAVSWSESRAGERRFPCPVCGKRFRFNSILALHLRAHPGAQAFQCPHCGHRAAQRALLRSHLRTHQPERPRSPAARLLLELEERALLREARLGRARSSGGMQATPATEGLARPQAPSSSAFRCPYCKGKFRTSAERERHLHILHRPWKCGLCSFGSSQEEELLHHSLTAHGAPERPLAATSAAPPPQPQPQPPPQPEPRSVPQPEPEPEPEREATPTPAPAAPEEPPAPPEFRCQVCGQSFTQSWFLKGHMRKHKASFDHACPVCGRCFKEPWFLKNHMKVHASKLGPLRAPGPASGPARAPQPPDLGLLAYEPLGPALLLAPAPTPAERREPPSLLGYLSLRAGEGRPNGEGAEPGPGRSFGGFRPLSSALPARARRHRAEEPEEEEEVVEAEEETWARGRSLGSLASLHPRPGEGPGHSASAAGAQARSTATQEENGLLVGGTRPEGGRGATGKDCPFCGKSFRSAHHLKVHLRVHTGERPYKCPHCDYAGTQSGSLKYHLQRHHREQRSGAGPGPPPEPPPPSQRGSAPQSGAKPSPQPATWVEGASSPRPPSSGAGPGSRRKPASPGRTLRNGRGGEAEPLDLSLRAGPGGEAGPGGALHRCLFCPFATGAPELMALHLQVHHSRRARGRRPPQADASPPYARVPSGETPPSPSQEGEEGSGLSRPGEAGLGGQER

SEQ ID NO: 10359 - protein, 413 aa, Homo sapiens
MGTFCSVIKFENLQELKRLCHWGPIIALGVIAICSTMAMIDSVLWYWPLHTTGGSVNFIMLINWTVMILYNYFNAMFVGPGFVPLGWKPEISQDTMYLQYCKVCQAYKAPRSHHCRKCNRCVMKMDHHCPWINNCCGYQNHASFTLFLLLAPLGCIHAAFIFVMTMYTQLYHRLSFGWNTVKIDMSAARRDPLPIVPFGLAAFATTLFALGLALGTTIAVGMLFFIQMKIILRNKTSIESWIEEKAKDRIQYYQLDEVFVFPYDMGSRWRNFKQVFTWSGVPEGDGLEWPVREGCHQYSLTIEQLKQKADKRVRSVRYKVIEDYSGACCPLNKGIKTFFTSPCTEEPRIQLQKGEFILATRGLRYWLYGDKILDDSFIEGVSRIRGWFPRKCVEKCPCDAETDQAPEGEKKNR

SEQ ID NO: 10360 - protein, 409 aa, Homo sapiens
MGTFCSVIKFENLQELKRLCHWGPIIALGVIAICSTMAMIDSVLWYWPLHTTGGSVNFIMLINWTVMILYNYFNAMFVGPGFVPLGWKPDTMYLQYCKVCQAYKAPRSHHCRKCNRCVMKMDHHCPWINNCCGYQNHASFTLFLLLAPLGCIHAAFIFVMTMYTQLYHRLSFGWNTVKIDMSAARRDPLPIVPFGLAAFATTLFALGLALGTTIAVGMLFFIQMKIILRNKTSIESWIEEKAKDRIQYYQLDEVFVFPYDMGSRWRNFKQVFTWSGVPEGDGLEWPVREGCHQYSLTIEQLKQKADKRVRSVRYKVIEDYSGACCPLNKGIKTFFTSPCTEEPRIQLQKGEFILATRGLRYWLYGDKILDDSFIEGVSRIRGWFPRKCVEKCPCDAETDQAPEGEKKNR

SEQ ID NO: 10361 - protein, 411 aa, Homo sapiens
MQTSEREGSGPELSPSVMPEAPLESPPFPTKSPAFDLFNLVLSYKRLEIYLEPLKDAGDGVRYLLRWQMPLCSLLTCLGLNVLFLTLNEGAWYSVGALMISVPALLGYLQEVCRARLPDSELMRRKYHSVRQEDLQRGRLSRPEAVAEVKSFLIQLEAFLSRLCCTCEAAYRVLHWENPVVSSQFYGALLGTVCMLYLLPLCWVLTLLNSTLFLGNVEFFRVVSEYRASLQQRMNPKQEEHAFESPPPPDVGGKDGLMDSTPALTPTEDLTPGSVEEAEEAEPDEEFKDAIEETHLVVLEDDEGAPCPAEDELALQDNGFLSKNEVLRSKVSRLTERLRKRYPTNNFGNCTGCSATFSVLKKRRSCSNCGNSFCSRCCSFKVPKSSMGATAPEAQRETVFVCASCNQTLSK

SEQ ID NO: 10362 - protein, 404 aa, Homo sapiens
MQTSEREGSGPELSPSVMPEAPLESPPFPTKSPAFDLFNLVLSYKRLEIYLEPLKDAGDGVRYLLRWQMPLCSLLTCLGLNVLFLTLNEGAWYSVGALMISVPALLGYLQEVCRARLPDSELMRRKYHSVRQEDLQRGRLSRPEAVAEVKSFLIQLEAFLSRLCCTCEAAYRVLHWENPVVSSQFYGALLGTVCMLYLLPLCWVLTLLNSTLFLGNVEFFRVVSEYRASLQQRMNPKQEEHAFESPPPPDVGGKDGLMDSTPALTPTEDLTPGSVEEAEEAEPDEEFKDAIEEDDEGAPCPAEDELALQDNGFLSKNEVLRSKVSRLTERLRKRYPTNNFGNCTGCSATFSVLKKRRSCSNCGNSFCSRCCSFKVPKSSMGATAPEAQRETVFVCASCNQTLSK

SEQ ID NO: 10363 - protein, 416 aa, Homo sapiens
MQTSEREGSGPELSPSVMPEAPLESPPFPTKSPAFDLFNLVLSYKRLEIYLEPLKDAGDGVRYLLRWQMPLCSLLTCLGLNVLFLTLNEGAWYSVGALMISVPALLGYLQEVCRARLPDSELMRRKYHSVRQEDLQRGRLSRPEAVAEVKSFLIQLEAFLSRLCCTCEAAYRVLHWENPVVSSQFYGALLGTVCMLYLLPLCWVLTLLNSTLFLGNVEFFRVVSEYRASLQQRMNPKQEEHAFESPPPPDVGGKDGLMDSTPALTPTESLSSQDLTPGSVEEAEEAEPDEEFKDAIEETHLVVLEDDEGAPCPAEDELALQDNGFLSKNEVLRSKVSRLTERLRKRYPTNNFGNCTGCSATFSVLKKRRSCSNCGNSFCSRCCSFKVPKSSMGATAPEAQRETVFVCASCNQTLSK

SEQ ID NO: 10364 - protein, 285 aa, Homo sapiens
MPLCSLLTCLGLNVLFLTLNEGAWYSVGALMISVPALLGYLQEVCRARLPDSELMRRKYHSVRQEDLQRGRLSRPEAVAEVKSFLIQLEAFLSRLCCTCEAAYRVLHWENPVVSSQFYGALLGTVCMLYLLPLCWVLTLLNSTLFLGNVEFFRVVSEYRASLQQRMNPKQEEHAFESPPPPDVGGKDGLMDSTPALTPTESLSSQDLTPGSVEEAEEAEPDEEFKDAIEEDDEGAPCPAEDELALQDNGFLSKNEVLRSKVSRLTERLRKRYPTNNFGVTGAGSS

SEQ ID NO: 10365 - protein, 318 aa, Homo sapiens
MQTSEREGSGPELSPSVMPEAPLESPPFPTKSPAFDLFNLVLSYKRLEIYLEPLKDAGDGVRYLLSLIQLEAFLSRLCCTCEAAYRVLHWENPVVSSQFYGALLGTVCMLYLLPLCWVLTLLNSTLFLGNVEFFRVVSEYRASLQQRMNPKQEEHAFESPPPPDVGGKDGLMDSTPALTPTEDLTPGSVEEAEEAEPDEEFKDAIEEDDEGAPCPAEDELALQDNGFLSKNEVLRSKVSRLTERLRKRYPTNNFGNCTGCSATFSVLKKRRSCSNCGNSFCSRCCSFKVPKSSMGATAPEAQRETVFVCASCNQTLSK

SEQ ID NO: 10366 - protein, 286 aa, Homo sapiens
MQTSEREGSGPELSPSVMPEAPLESPPFPTKSPAFDLFNLVLSYKRLEIYLEPLKDAGDGVRYLLRFYGALLGTVCMLYLLPLCWVLTLLNSTLFLGNVEFFRVVSEYRASLQQRMNPKQEEHAFESPPPPDVGGKDGLMDSTPALTPTEDLTPGSVEEAEEAEPDEEFKDAIEEDDEGAPCPAEDELALQDNGFLSKNEVLRSKVSRLTERLRKRYPTNNFGNCTGCSATFSVLKKRRSCSNCGNSFCSRCCSFKVPKSSMGATAPEAQRETVFVCASCNQTLSK

SEQ ID NO: 10367 - protein, 311 aa, Homo sapiens
MISVPALLGYLQEVCRARLPDSELMRRKYHSVRQEDLQRGRLSRPEAVAEVKSFLIQLEAFLSRLCCTCEAAYRVLHWENPVVSSQFYGALLGTVCMLYLLPLCWVLTLLNSTLFLGNVEFFRVVSEYRASLQQRMNPKQEEHAFESPPPPDVGGKDGLMDSTPALTPTESLSSQDLTPGSVEEAEEAEPDEEFKDAIEEDDEGAPCPAEDELALQDNGFLSKNEVLRSKVSRLTERLRKRYPTNNFGNCTGCSATFSVLKKRRSCSNCGNSFCSRCCSFKVPKSSMGATAPEAQRETVFVCASCNQTLSK

SEQ ID NO: 10368 - protein, 372 aa, Homo sapiens
MQTSEREGSGPELSPSVMPEAPLESPPFPTKSPAFDLFNLVLSYKRLEIYLEPLKDAGAWYSVGALMISVPALLGYLQEVCRARLPDSELMRRKYHSVRQEDLQRGRLSRPEAVAEVKSFLIQLEAFLSRLCCTCEAAYRVLHWENPVVSSQFYGALLGTVCMLYLLPLCWVLTLLNSTLFLGNVEFFRVVSEYRASLQQRMNPKQEEHAFESPPPPDVGGKDGLMDSTPALTPTEDLTPGSVEEAEEAEPDEEFKDAIEEDDEGAPCPAEDELALQDNGFLSKNEVLRSKVSRLTERLRKRYPTNNFGNCTGCSATFSVLKKRRSCSNCGNSFCSRCCSFKVPKSSMGATAPEAQRETVFVCASCNQTLSK

SEQ ID NO: 10369 - protein, 568 aa, Homo sapiens
MGLLTFRDVAIEFSLEEWQCLDTAQRNLYKNVILENYRNLVFLGIAVSKQDLITCLEQEKEPLTVKRHEMVNEPPVMCSHFAQEFWPEQNIKDSFEKVTLRRYEKCGNDNFQLKGCKSVDECKLHKGGYNGLNQCLPTMQSKMFQCDKYVKVFNKFSHSDRHKIKHMENKPFKCKECGRSFCMLSHLTRHERNYTKVNFCKCEECEKAVNQSSKLTKHKRIYTCEKLYKCQECDRTFNQFSNLTEYKKDYAREKPYKCEECGKAFNQSSHLTTHKIIHTGEKPYKCEECGKAFNQFSNLTTHKKIHTGEQPYICEECGKAFTQSSTLTTHKRIHTGEKPYKCEECGKAFNRSSKLTEHKNIHTGEQPYKCEECGKAFNRSSNLTEHRKIHTEEKPYKCKECGKAFKHSSALTTHKRIHTGEKPYKCEECGKAFNRSSKLTEHKKLHTGKKPYKCEECGKAFIQSSKLTEHKKIHSGEIPYKCEECGKAFKHSSSLTTHKRIHTGEKPYKCEECGKAFSRSSKLTEHKIIHTGEKPYKCERCDKAFNQSANLTKHKKIHTGEKLQNWNV

SEQ ID NO: 10370 - protein, 119 aa, Homo sapiens
MVKMTRSKTFQAYLPSCHRTYSCIHCRAHLANHDELISKSFQGSQGRAYLFNSVVNVGCGPAEERVLLTGLHAVADIYCENCKTTLGWKYEHAFESSQKYKEGKYIIELAHMIKDNGWD

SEQ ID NO: 10371 - protein, 271 aa, Homo sapiens
MTRWARVSTTYNKRPLPATSWEDMKKGSFEGTSQNLPKRKQLEANRLSLKNDAPQAKHKKNKKKKEYLNEDVNGFMEYLRQNSQMVHNGQIIATDSEEVREEIAVALKKDSRREGRRLKRQAAKKNAMVCFHCRKPGHGIADCPAALENQDMGTGICYRCGSTEHEITKCKAKVDPALGEFPFAKCFVCGEMGHLSRSCPDNPKGLYADGGGCKLCGSVEHLKKDCPESQNSERMVTVGRWAKGMSADYEEILDVPKPQKPKTKIPKVVNF

SEQ ID NO: 10372 - protein, 442 aa, Homo sapiens
MAAATLRDPAQQGYVTFEDVAVYFSQEEWRLLDDAQRLLYRNVMLENFTLLASLGLASSKTHEITQLESWEEPFMPAWEVVTSAILRGSWQGAKAEAAAEQSASVEVPSSNVQQHQKQHCGEKPLKRQEGRVPVLRSCRVHLSEKSLQSREVGKDLLTSSGVLKHQVTHTGEKSHRSSKSREAFHAGKRHYKCSECGKAFGQKYLLVQHQRLHTGEKPYECSECGKLFSHKSNLFIHQIVHTGERPYGCSDCGKSFSRNADLIQHQRVHTGEKPFTCSECGKAFRHNSTLVQHHRIHTGVRPYECSECGKLFSFNSSLMKHQRVHTGERPYKCSECGKFYSHKSSLINHWRVHTGERPYECSECGKFFSQSSSLMQHRKVHTGEKPFKCNECGRFFSENSSLVKHQRVHTGAKPYECRECGKFFRHSSSLVKHRRIHTGEIQ

SEQ ID NO: 10373 - protein, 441 aa, Homo sapiens
MAAATLRDPAQGYVTFEDVAVYFSQEEWRLLDDAQRLLYRNVMLENFTLLASLGLASSKTHEITQLESWEEPFMPAWEVVTSAILRGSWQGAKAEAAAEQSASVEVPSSNVQQHQKQHCGEKPLKRQEGRVPVLRSCRVHLSEKSLQSREVGKDLLTSSGVLKHQVTHTGEKSHRSSKSREAFHAGKRHYKCSECGKAFGQKYLLVQHQRLHTGEKPYECSECGKLFSHKSNLFIHQIVHTGERPYGCSDCGKSFSRNADLIQHQRVHTGEKPFTCSECGKAFRHNSTLVQHHRIHTGVRPYECSECGKLFSFNSSLMKHQRVHTGERPYKCSECGKFYSHKSSLINHWRVHTGERPYECSECGKFFSQSSSLMQHRKVHTGEKPFKCNECGRFFSENSSLVKHQRVHTGAKPYECRECGKFFRHSSSLVKHRRIHTGEIQ

SEQ ID NO: 10374 - protein, 191 aa, Homo sapiens
MTDPSLGLTVPMAPPLAPLPPRDPNGAGSEWRKPGAVSFADVAVYFSREEWGCLRPAQRALYRDVMRETYGHLGALGESPTCLPGPCASTGPAAPLGAACGVGGPGAGQAASSQRGVCVLLPQESEAASRRSSPGWRRRPNCGIRLPRIRRWRSVRQKRTQQIPETRKRKDKGKGREPWRSPTLWPPGLLG

SEQ ID NO: 10375 - protein, 190 aa, Homo sapiens
MTDPSLGLTVPMAPPLAPLPPRDPNGAGSEWRKPGAVSFADVAVYFSREEWGCLRPAQRALYRDVMRETYGHLGALGESPTCLPGPCASTGPAAPLGAACGVGGPGAGQAASSQRGVCVLLPQESEAASRRSSPGWRRRPNCGIRLPRIRRWRSVRQKRTQIPETRKRKDKGKGREPWRSPTLWPPGLLG

SEQ ID NO: 10376 - protein, 120 aa, Homo sapiens
MTMTMSYKAIEKIPRCSWNREEPGEQWNKIYSVETGLLGTYSFEWQSQVANKTMRKRNTNSICGRQHEPHCPVSITRAIAQPQLLTFPDSLASRGGHMTQSGQCHVSGSLLGRGHKSRGR

SEQ ID NO: 10377 - protein, 594 aa, Homo sapiens
MSKKRKWDDDYVRYWFTCTTEVDGTQRPQCVLCNSVFSNADLRPSKLSDHFNRQHGGVAGHDLNSLKHMPAPSDQSETLKAFGVASHEDTLLQASYQFAYLCAKEKNPHTVAEKLVKPCALEIAQIVLGPDAQKKLQQVPLSDDVIHSRIDEMSQDILQQVLEDIKASPLKVGIQLAETTDMDDCSQLMAFVRYIKEREIVEEFLFCEPLQLSMKGIDVFNLFRDFFLKHKIALDVCGSVCTDGASSMLGENSEFVAYVKKEIPHIVVTHCLLNPHALVIKTLPTKLRDALFTVVRVINFIKGRAPNHRLFQAFFEEIGIEYSVLLFHTEMRWLSRGQILTHIFEMYEEINQFLHHKSSNLVDGFENKEFKIHLAYLADLFKHLNELSASMQRTGMNTVSAREKLSAFVRKFPFWQKRIEKRNFTNFPFLEEIIVSDNEGIFIAAEITLHLQQLSNFFHGYFSIGDLNEASKWILDPFLFNIDFVDDSYLMKNDLAELRASGQILMEFETMKLEDFWCAQFTAFPNLAKTALEILMPFATTYLCELGFSSLLHFKTKSRSCFNLSDDIRVAISKKVPRFSDIIEQKLQLQQKSL

SEQ ID NO: 10378 - protein, 519 aa, Homo sapiens
MASSPAVDVSCRRREKRRQLDARRSKCRIRLGGHMEQWCLLKERLGFSLHSQLAKFLLDRYTSSGCVLCAGPEPLPPKGLQYLVLLSHAHSRECSLVPGLRGPGGQDGGLVWECSAGHTFSWGPSLSPTPSEAPKPASLPHTTRRSWCSEATSGQELADLESEHDERTQEARLPRRVGPPPETFPPPGEEEGEEEEDNDEDEEEMLSDASLWTYSSSPDDSEPDAPRLLPSPVTCTPKEGETPPAPAALSSPLAVPALSASSLSSRAPPPAEVRVQPQLSRTPQAAQQTEALASTGSQAQSAPTPAWDEDTAQIGPKRIRKAAKRELMPCDFPGCGRIFSNRQYLNHHKKYQHIHQKSFSCPEPACGKSFNFKKHLKEHMKLHSDTRDYICEFCARSFRTSSNLVIHRRIHTGEKPLQCEICGFTCRQKASLNWHQRKHAETVAALRFPCEFCGKRFEKPDSVAAHRSKSHPALLLAPQESPSGPLEPCPSISAPGPLGSSEGSRPSASPQAPTLLPQQ

SEQ ID NO: 10379 - protein, 474 aa, Homo sapiens
MASSPAVDVSCRRREKRRQLDARRSKCRIRLGGHMEQWCLLKERLGFSLHSQLAKFLLDRYTSSGCVLCAGPEPLPPKGLQYLVLLSHAHSRECSLVPGLRGPGGQDGGLVWECSAGHTFSWGPSLSPTPSEAPKPASLPHTTRRSWCSEATSGQELADLESEHDERTQEARLPSSEPDAPRLLPSPVTCTPKEGETPPAPAALSSPLAVPALSASSLSSRAPPPAEVRVQPQLSRTPQAAQQTEALASTGSQAQSAPTPAWDEDTAQIGPKRIRKAAKRELMPCDFPGCGRIFSNRQYLNHHKKYQHIHQKSFSCPEPACGKSFNFKKHLKEHMKLHSDTRDYICEFCARSFRTSSNLVIHRRIHTGEKPLQCEICGFTCRQKASLNWHQRKHAETVAALRFPCEFCGKRFEKPDSVAAHRSKSHPALLLAPQESPSGPLEPCPSISAPGPLGSSEGSRPSASPQAPTLLPQQ

SEQ ID NO: 10380 - protein, 347 aa, Homo sapiens
MASSPAVDVSCRRREKRRQLDARRSKCRIRLGGHMEQWCLLKERLGFSLHSQLAKFLLDRYTSSGCVLCAGPEPLPPKGLQYLVLLSASSLSSRAPPPAEVRVQPQLSRTPQAAQQTEALASTGSQAQSAPTPAWDEDTAQIGPKRIRKAAKRELMPCDFPGCGRIFSNRQYLNHHKKYQHIHQKSFSCPEPACGKSFNFKKHLKEHMKLHSDTRDYICEFCARSFRTSSNLVIHRRIHTGEKPLQCEICGFTCRQKASLNWHQRKHAETVAALRFPCEFCGKRFEKPDSVAAHRSKSHPALLLAPQESPSGPLEPCPSISAPGPLGSSEGSRPSASPQAPTLLPQQ

SEQ ID NO: 10381 - protein, 96 aa, Homo sapiens
MASSPAVDVSCRRREKRRQLDARRSKCRIRLGGHMEQWCLLKERLGFSLHSQLAKFLLDRACPAALFHPQVSHFTRTACVTCGLRGSCSPPHGLSE

SEQ ID NO: 10382 - protein, 524 aa, Homo sapiens
MPLVHMASSPAVDVSCRRREKRRQLDARRSKCRIRLGGHMEQWCLLKERLGFSLHSQLAKFLLDRYTSSGCVLCAGPEPLPPKGLQYLVLLSHAHSRECSLVPGLRGPGGQDGGLVWECSAGHTFSWGPSLSPTPSEAPKPASLPHTTRRSWCSEATSGQELADLESEHDERTQEARLPRRVGPPPETFPPPGEEEGEEEEDNDEDEEEMLSDASLWTYSSSPDDSEPDAPRLLPSPVTCTPKEGETPPAPAALSSPLAVPALSASSLSSRAPPPAEVRVQPQLSRTPQAAQQTEALASTGSQAQSAPTPAWDEDTAQIGPKRIRKAAKRELMPCDFPGCGRIFSNRQYLNHHKKYQHIHQKSFSCPEPACGKSFNFKKHLKEHMKLHSDTRDYICEFCARSFRTSSNLVIHRRIHTGEKPLQCEICGFTCRQKASLNWHQRKHAETVAALRFPCEFCGKRFEKPDSVAAHRSKSHPALLLAPQESPSGPLEPCPSISAPGPLGSSEGSRPSASPQAPTLLPQQ

SEQ ID NO: 10383 - protein, 114 aa, Homo sapiens
MQIQNNLFFCCYTVMSAIFKWLLLYSLPALCFLLGTQESESFHSKAEILVTLSQVIISPAGPHALTWTTHFSPSVIIILVPCWWHAVIVTQHPVANCYVTNHLNIQWLELKAGS

SEQ ID NO: 10384 - protein, 706 aa, Homo sapiens
MTTLKEAVTFKDVAVVFTEEELRLLDLAQRKLYREVMLENFRNLLSVGHQSLHRDTFHFLKEEKFWMMETATQREGNLGGKIQMEMETVSESGTHEGLFSHQTWEQISSDLTRFQDSMVNSFQFSKQDDMPCQVDAGLSIIHVRQKPSEGRTCKKSFSDVSVLDLHQQLQSREKSHTCDECGKSFCYSSALRIHQRVHMGEKLYNCDVCGKEFNQSSHLQIHQRIHTGEKPFKCEQCGKGFSRRSGLYVHRKLHTGVKPHICEKCGKAFIHDSQLQEHQRIHTGEKPFKCDICCKSFRSRANLNRHSMVHMREKPFRCDTCGKSFGLKSALNSHRMVHTGEKRYKCEECGKRFIYRQDLYKHQIDHTGEKPYNCKECGKSFRWASGLSRHVRVHSGETTFKCEECGKGFYTNSQRYSHQRAHSGEKPYRCEECGKGYKRRLDLDFHQRVHRGEKPYNCKECGKSFGWASCLLNHQRIHSGEKPFKCEECGKRFTQNSQLYTHRRVHSGEKPFKCEECGKRFTQNSQLYSHRRVHTGVKPYKCEECGKGFNSKFNLDMHQRVHTGERPYNCKECGKSFSRASSILNHKRLHGDEKPFKCEECGKRFTENSQLHSHQRVHTGEKPYKCEKCGKSFRWASTHLTHQRLHSREKLLQCEDCGKSIVHSSCLKDQQRDQSGEKTSKCEDCGKRYKRRLNLDTLLSLFLNDT

SEQ ID NO: 10385 - protein, 683 aa, Homo sapiens
MASGPGSQEREGLLIVKLEEDCAWSQELPPPDPGPSPEASHLRFRRFRFQEAAGPREALSRLQELCHGWLRPEMRTKEQILELLVLEQFLTILPQEIQSRVQELHPESGEEAVTLVEDMQRELGRLRQQVTNHGRGTEVLLEEPLPLETARESPSFKLEPMETERSPGPRLQELLGPSPQRDPQAVKERALSAPWLSLFPPEGNMEDKEMTGPQLPESLEDVAMYISQEEWGHQDPSKRALSRDTVQESYENVDSLESHIPSQEVPGTQVGQGGKLWDPSVQSCKEGLSPRGPAPGEEKFENLEGVPSVCSENIHPQVLLPDQARGEVPWSPELGRPHDRSQGDWAPPPEGGMEQALAGASSGRELGRPKELQPKKLHLCPLCGKNFSNNSNLIRHQRIHAAERLCMGVDCTEIFGGNPRFLSLHRAHLGEEAHKCLECGKCFSQNTHLTRHQRTHTGEKPYQCNICGKCFSCNSNLHRHQRTHTGEKPYKCPECGEIFAHSSNLLRHQRIHTGERPYKCPECGKSFSRSSHLVIHERTHERERLYPFSECGEAVSDSTPFLTNHGAHKAEKKLFECLTCGKSFRQGMHLTRHQRTHTGEKPYKCTLCGENFSHRSNLIRHQRIHTGEKPYTCHECGDSFSHSSNRIRHLRTHTGERPYKCSECGESFSRSSRLMSHQRTHTG

SEQ ID NO: 10386 - protein, 723 aa, Homo sapiens
MSLLKERKPKKPHYIPRPPGKPFKYKCFQCPFTCNEKSHLFNHMKYGLCKNSITLVSEQDRVPKCPKSNSLDPKQTNQPDATAKPASSKSVANGLSAFDSKLQHSSAREDIKENLELQARGTHRCLGQKPALHRASPCKSPAPEAALGAQPALEGAARPSAFVPVGEHRLKGPDNAEAPETLALHNPTAKAVSFHTKSAFHTPGYPWKAGSPFLPPEFPHKISSTKGLGAISPYMHPTIPEYPPHFYTEHGLATIYSPYLLAGSSPECDAPLLSVYGTQDPRHFLPHPGPIPKHLAPSPATYDHYRFFQQYPSNLPIPYGFYRPESAFSSYGLRLPPVTGLTRDQSSHLLEEATLVYPASSPSRLNPSDPNRKHVEFESPIPEAKDSSKAGQRDTEGSKMSPRAGSAATGSPGRPSPTDFMQTSQTCEGLYDLSNKAASSALGRLYPPEQSLTAFRPVKKSTECLPAQAAETTAESPVSLNVVNGDPPAPTGSASLVSEAAPSSPDDSSGMGPLNLSKKSEINLAATHEPTYQGSPQAETASFSELQDLPLNLSVKDPCNTQAPRPAFPGRPRAAEPAAAVPQKTGTEGSEDGPSHPETKPGSLDGDGAPPTGPGEEAPDACAVDSSEEQKQTAAVALCQLAAYSPRNIRVGDGDAAAPEPACRQDTPTLSSMESQEAQCDLRPKGQKRTSLRDAGKSQQGAKKAKLQDTARVFTLRRRARVS

SEQ ID NO: 10387 - protein, 487 aa, Homo sapiens
MAAAALRAPTQVTVSPETHMDLTKGCVTFEDIAIYFSQDEWGLLDEAQRLLYLEVMLENFALVASLGCGHGTEDEETPSDQNVSVGVSQSKAGSSTQKTQSCEMCVPVLKDILHLADLPGQKPYLVGECTNHHQHQKHHSAKKSLKRDMDRASYVKCCLFCMSLKPFRKWEVGKDLPAMLRLLRSLVFPGGKKPGTITECGEDIRSQKSHYKSGECGKASRHKHTPVYHPRVYTGKKLYECSKCGKAFRGKYSLVQHQRVHTGERPWECNECGKFFSQTSHLNDHRRIHTGERPYECSECGKLFRQNSSLVDHQKIHTGARPYECSQCGKSFSQKATLVKHQRVHTGERPYKCGECGNSFSQSAILNQHRRIHTGAKPYECGQCGKSFSQKATLIKHQRVHTGERPYKCGDCGKSFSQSSILIQHRRIHTGARPYECGQCGKSFSQKSGLIQHQVVHTGERPYECNKCGNSFSQCSSLIHHQKCHNT

SEQ ID NO: 10388 - protein, 432 aa, Homo sapiens
MLENFALVASLGCGHGTEDEETPSDQNVSVGVSQSKAGSSTQKTQSCEMCVPVLKDILHLADLPGQKPYLVGECTNHHQHQKHHSAKKSLKRDMDRASYVKCCLFCMSLKPFRKWEVGKDLPAMLRLLRSLVFPGGKKPGTITECGEDIRSQKSHYKSGECGKASRHKHTPVYHPRVYTGKKLYECSKCGKAFRGKYSLVQHQRVHTGERPWECNECGKFFSQTSHLNDHRRIHTGERPYECSECGKLFRQNSSLVDHQKIHTGARPYECSQCGKSFSQKATLVKHQRVHTGERPYKCGECGNSFSQSAILNQHRRIHTGAKPYECGQCGKSFSQKATLIKHQRVHTGERPYKCGDCGKSFSQSSILIQHRRIHTGARPYECGQCGKSFSQKSGLIQHQVVHTGERPYECNKCGNSFSQCSSLIHHQKCHNT

SEQ ID NO: 10389 - protein, 384 aa, Homo sapiens
MCVPVLKDILHLADLPGQKPYLVGECTNHHQHQKHHSAKKSLKRDMDRASYVKCCLFCMSLKPFRKWEVGKDLPAMLRLLRSLVFPGGKKPGTITECGEDIRSQKSHYKSGECGKASRHKHTPVYHPRVYTGKKLYECSKCGKAFRGKYSLVQHQRVHTGERPWECNECGKFFSQTSHLNDHRRIHTGERPYECSECGKLFRQNSSLVDHQKIHTGARPYECSQCGKSFSQKATLVKHQRVHTGERPYKCGECGNSFSQSAILNQHRRIHTGAKPYECGQCGKSFSQKATLIKHQRVHTGERPYKCGDCGKSFSQSSILIQHRRIHTGARPYECGQCGKSFSQKSGLIQHQVVHTGERPYECNKCGNSFSQCSSLIHHQKCHNT

SEQ ID NO: 10390 - protein, 348 aa, Homo sapiens
MRSLPFALTVESVSARAPTCCSTGRFTQGRQPCKCKACGRGFTQSASLLQHWRVHSDWRETLSLSPVRQDLLWPLQPHQAPASPLGRSHSSAGVRQGFSGQLCCWLTKEHTLAEALRLSPVPAGFWGPVEADRPPANSHRRVCPFCCCSCGDSVNEKTSLSQRVLPHPGEKTCRGGSVESVSLAPSSVAPDSTSGLRPCGSPGSFLQHLPPSTLLPRPPFLYPGPPLSLQPLVPSGLPAVPAVPLGGLEVAQVPPATQPAAQQEGAMGPRSCASAGRDSREAVQAPGYPEPARKASQHRAAGPLGEARARLQRQCRAPPPPSNPHWRGALPVFPVWKASSRRSNLARH

SEQ ID NO: 10391 - protein, 177 aa, Homo sapiens
MRRFILERNPTNVKNMAKLSPIPHTLLGIRKFMLERNHTSVINVAQPLFYPQPLVNMRRFILERNSTNVKNVAKPSTIFHTLLYIRQFILERNAINGIKTFTWSSSPHKHRRTHTGEKPYKCEECGKAFTASSTLSEYKTIHTGEKPCKCEECGKAFNWSSDFNKHKRIHSGQKPIL

SEQ ID NO: 10392 - protein, 603 aa, Homo sapiens
MPELYTEDFIQGCDVGELQEPGLPGVLSYVGAQERALDHRKPSTSSKKTKRVEIDQRCENRLECNGAISAHCNLRLPDSNDSPASASRVAGITDLSRNCVIKELAPQQEGNPGEVFHTVTLEQHEKHDIEEFCFREIKKKIHDFDCQWRDDERNCNKVTTAPKENLTCRRDQRDRRGIGNKSIKHQLGLSFLPHPHELQQFQAEGKIYECNHVEKSVNHGSSVSPPQIISSTIKTHVSNKYGTDFICSSLLTQEQKSCIREKPYRYIECDKALNHGSHMTVRQVSHSGEKGYKCDLCGKVFSQKSNLARHWRVHTGEKPYKCNECDRSFSRNSCLALHRRVHTGEKPYKCYECDKVFSRNSCLALHQKTHIGEKPYTCKECGKAFSVRSTLTNHQVIHSGKKPYKCNECGKVFSQTSSLATHQRIHTGEKPYKCNECGKVFSQTSSLARHWRIHTGEKPYKCNECGKVFSYNSHLASHRRVHTGEKPYKCNECGKAFSVHSNLTTHQVIHTGEKPYKCNQCGKGFSVHSSLTTHQVIHTGEKPYKCNECGKSFSVRPNLTRHQIIHTGKKPYKCSDCGKSFSVRPNLFRHQIIHTKEKPYKRN

SEQ ID NO: 10393 - protein, 567 aa, Homo sapiens
MPELYTEDFIQGCDVGELQEPGLPGLECNGAISAHCNLRLPDSNDSPASASRVAGITDLSRNCVIKELAPQQEGNPGEVFHTVTLEQHEKHDIEEFCFREIKKKIHDFDCQWRDDERNCNKVTTAPKENLTCRRDQRDRRGIGNKSIKHQLGLSFLPHPHELQQFQAEGKIYECNHVEKSVNHGSSVSPPQIISSTIKTHVSNKYGTDFICSSLLTQEQKSCIREKPYRYIECDKALNHGSHMTVRQVSHSGEKGYKCDLCGKVFSQKSNLARHWRVHTGEKPYKCNECDRSFSRNSCLALHRRVHTGEKPYKCYECDKVFSRNSCLALHQKTHIGEKPYTCKECGKAFSVRSTLTNHQVIHSGKKPYKCNECGKVFSQTSSLATHQRIHTGEKPYKCNECGKVFSQTSSLARHWRIHTGEKPYKCNECGKVFSYNSHLASHRRVHTGEKPYKCNECGKAFSVHSNLTTHQVIHTGEKPYKCNQCGKGFSVHSSLTTHQVIHTGEKPYKCNECGKSFSVRPNLTRHQIIHTGKKPYKCSDCGKSFSVRPNLFRHQIIHTKEKPYKRN

SEQ ID NO: 10394 - protein, 325 aa, Homo sapiens
MTVRQVSHSGEKGYKCDLCGKVFSQKSNLARHWRVHTGEKPYKCNECDRSFSRNSCLALHRRVHTGEKPYKCYECDKVFSRNSCLALHQKTHIGEKPYTCKECGKAFSVRSTLTNHQVIHSGKKPYKCNECGKVFSQTSSLATHQRIHTGEKPYKCNECGKVFSQTSSLARHWRIHTGEKPYKCNECGKVFSYNSHLASHRRVHTGEKPYKCNECGKAFSVHSNLTTHQVIHTGEKPYKCNQCGKGFSVHSSLTTHQVIHTGEKPYKCNECGKSFSVRPNLTRHQIIHTGKKPYKCSDCGKSFSVRPNLFRHQIIHTKEKPYKRN

SEQ ID NO: 10395 - protein, 542 aa, Homo sapiens
MWEHRKEPWTIESQVRVARKPKGWEWIKGVKTDLSRNCVIKELAPQQEGNPGEVFHTVTLEQHEKHDIEEFCFREIKKKIHDFDCQWRDDERNCNKVTTAPKENLTCRRDQRDRRGIGNKSIKHQLGLSFLPHPHELQQFQAEGKIYECNHVEKSVNHGSSVSPPQIISSTIKTHVSNKYGTDFICSSLLTQEQKSCIREKPYRYIECDKALNHGSHMTVRQVSHSGEKGYKCDLCGKVFSQKSNLARHWRVHTGEKPYKCNECDRSFSRNSCLALHRRVHTGEKPYKCYECDKVFSRNSCLALHQKTHIGEKPYTCKECGKAFSVRSTLTNHQVIHSGKKPYKCNECGKVFSQTSSLATHQRIHTGEKPYKCNECGKVFSQTSSLARHWRIHTGEKPYKCNECGKVFSYNSHLASHRRVHTGEKPYKCNECGKAFSVHSNLTTHQVIHTGEKPYKCNQCGKGFSVHSSLTTHQVIHTGEKPYKCNECGKSFSVRPNLTRHQIIHTGKKPYKCSDCGKSFSVRPNLFRHQIIHTKEKPYKRN

SEQ ID NO: 10396 - protein, 555 aa, Homo sapiens
MAFTQLTFRDVAIEFSQDEWKCLNSTQRTLYRDVMLENYRNLVSLDLSRNCVIKELAPQQEGNPGEVFHTVTLEQHEKHDIEEFCFREIKKKIHDFDCQWRDDERNCNKVTTAPKENLTCRRDQRDRRGIGNKSIKHQLGLSFLPHPHELQQFQAEGKIYECNHVEKSVNHGSSVSPPQIISSTIKTHVSNKYGTDFICSSLLTQEQKSCIREKPYRYIECDKALNHGSHMTVRQVSHSGEKGYKCDLCGKVFSQKSNLARHWRVHTGEKPYKCNECDRSFSRNSCLALHRRVHTGEKPYKCYECDKVFSRNSCLALHQKTHIGEKPYTCKECGKAFSVRSTLTNHQVIHSGKKPYKCNECGKVFSQTSSLATHQRIHTGEKPYKCNECGKVFSQTSSLARHWRIHTGEKPYKCNECGKVFSYNSHLASHRRVHTGEKPYKCNECGKAFSVHSNLTTHQVIHTGEKPYKCNQCGKGFSVHSSLTTHQVIHTGEKPYKCNECGKSFSVRPNLTRHQIIHTGKKPYKCSDCGKSFSVRPNLFRHQIIHTKEKPYKRN

SEQ ID NO: 10397 - protein, 555 aa, Homo sapiens
MDGDGLTFRDVAIEFSQDEWKCLNSTQRTLYRDVMLENYRNLVSLDLSRNCVIKELAPQQEGNPGEVFHTVTLEQHEKHDIEEFCFREIKKKIHDFDCQWRDDERNCNKVTTAPKENLTCRRDQRDRRGIGNKSIKHQLGLSFLPHPHELQQFQAEGKIYECNHVEKSVNHGSSVSPPQIISSTIKTHVSNKYGTDFICSSLLTQEQKSCIREKPYRYIECDKALNHGSHMTVRQVSHSGEKGYKCDLCGKVFSQKSNLARHWRVHTGEKPYKCNECDRSFSRNSCLALHRRVHTGEKPYKCYECDKVFSRNSCLALHQKTHIGEKPYTCKECGKAFSVRSTLTNHQVIHSGKKPYKCNECGKVFSQTSSLATHQRIHTGEKPYKCNECGKVFSQTSSLARHWRIHTGEKPYKCNECGKVFSYNSHLASHRRVHTGEKPYKCNECGKAFSVHSNLTTHQVIHTGEKPYKCNQCGKGFSVHSSLTTHQVIHTGEKPYKCNECGKSFSVRPNLTRHQIIHTGKKPYKCSDCGKSFSVRPNLFRHQIIHTKEKPYKRN

SEQ ID NO: 10398 - protein, 373 aa, Homo sapiens
MKPHFRNTVERMYRDTFSYNFYNRPILSRRNTVWLCYEVKTKGPSRPRLDAKIFRGQVYSQPEHHAEMCFLSWFCGNQLPAYKCFQITWFVSWTPCPDCVAKLAEFLAEHPNVTLTISAARLYYYWERDYRRALCRLSQAGARVKIMDDEEFAYCWENFVYSEGQPFMPWYKFDDNYAFLHRTLKEILRNPMEAMYPHIFYFHFKNLRKAYGRNESWLCFTMEVVKHHSPVSWKRGVFRNQVDPETHCHAERCFLSWFCDDILSPNTNYEVTWYTSWSPCPECAGEVAEFLARHSNVNLTIFTARLYYFWDTDYQEGLRSLSQEGASVEIMGYKDFKYCWENFVYNDDEPFKPWKGLKYNFLFLDSKLQEILE

SEQ ID NO: 10399 - protein, 79 aa, Homo sapiens
MKPHFRNTVERMYRDTFSYNFYNRPILSRRNTVWLCYEVKTKGPSRPRLDAKIFRGQVPPGLQSLCRQELSQLGKQTTH

SEQ ID NO: 10400 - protein, 101 aa, Homo sapiens
MKPHFRNTVERMYRDTFSYNFYNRPILSRRNTVWLCYEVKTKGPSRPRLDAKIFRGQVPRSFIRAPFQVLSSPFGQCAPPHGTAQVQWPPQLTAGREQGRP

SEQ ID NO: 10401 - protein, 156 aa, Homo sapiens
MASRVLSAYVSRLPAAFAPLPRVRMLAVARPLSTALCSAGTQTRLGTLQPALVLAQVPGRVTQLCRQYSDMPPLTLEGIQDRVLYVLKLYDKIDPEKLSVNSHFMKDLGLDSLDQVEIIMAMEDEFGFEIPDIDAEKLMCPQEIVDYIADKKDVYE

SEQ ID NO: 10402 - protein, 367 aa, Homo sapiens
MEPIYEEYLANHGTIVKPYYWLSFSLDCSNCPYHIRTGEEARVSLTEFCQIFGFPYGTTFPQTKHLTFYELKTSSGSLVQKGHASSCTGNYIHPESMLFEMNGYLDSAIYNNDSIRHIILYSNNSPCNEANHCCISKMYNFLITYPGITLSIYFSQLYHTEMDFPASAWNREALRSLASLWPRVVLSPISGGIWHSVLHSFISGVSGSHVFQPILTGRALADRHNAYEINAITGVKPYFTDVLLQTKRNPNTKAQEALESYPLNNAFPGQFFQMPSGQLQPNLPPDLRAPVVFVLVPLRDLPPMHMGQNPNKPRNIVRHLNMPQMSFQETKDLGRLPTGRSVEIVEITEQFASSKEADEKKKKKGKK

SEQ ID NO: 10403 - protein, 409 aa, Homo sapiens
MEGESTSAVLSGFVLGALAFQHLNTDSDTEGFLLGEVKGEAKNSITDSQMDDVEVVYTIDIQKYIPCYQLFSFYNSSGEVNEQALKKILSNVKKNVVGWYKFRRHSDQIMTFRERLLHKNLQEHFSNQDLVFLLLTPSIITESCSTHRLEHSLYKPQKGLFHRVPLVVANLGMSEQLGYKTVSGSCMSTGFSRAVQTHSSKFFEEDGSLKEVHKINEMYASLQEELKSICKKVEDSEQAVDKLVKDVNRLKREIEKRRGAQIQAAREKNIQKDPQENIFLCQALRTFFPNSEFLHSCVMSLKNRHVSKSSCNYNHHLDVVDNLTLMVEHTDIPEASPASTPQIIKHKALDLDDRWQFKRSRLLDTQDKRSKADTGSSNQDKASKMSSPETDEEIEKMKGFGEYSRSPTF

SEQ ID NO: 10404 - protein, 300 aa, Homo sapiens
MTFRERLLHKNLQEHFSNQDLVFLLLTPSIITESCSTHRLEHSLYKPQKGLFHRVPLVVANLGMSEQLGYKTVSGSCMSTGFSRAVQTHSSKFFEEDGSLKEVHKINEMYASLQEELKSICKKVEDSEQAVDKLVKDVNRLKREIEKRRGAQIQAAREKNIQKDPQENIFLCQALRTFFPNSEFLHSCVMSLKNRHVSKSSCNYNHHLDVVDNLTLMVEHTDIPEASPASTPQIIKHKALDLDDRWQFKRSRLLDTQDKRSKADTGSSNQDKASKMSSPETDEEIEKMKGFGEYSRSPTF

SEQ ID NO: 10405 - protein, 272 aa, Homo sapiens
MEAEESEKAATEQEPLEGTEQTLDAEEEQEESEEAACGSKKRVVPGIVYLGHIPPRFRPLHVRNLLSAYGEVGRVFFQAEDRFVRRKKKAAAAAGGKKRSYTKDYTEGWVEFRDKRIAKRVAASLHNTPMGARRRSPFRYDLWNLKYLHRFTWSHLSEHLAFERQVRRQRLRAEVAQAKRETDFYLQSVERGQRFLAADGDPARPDGSWTFAQRPTEQELRARKAARPGGRERARLATAQDKARSNKGLLARIFGAPPPSESMEGPSLVRDS

SEQ ID NO: 10406 - protein, 246 aa, Homo sapiens
MAGAPDERRRGPAAGEQLQQQHVSCQVFPERLAQGNPQQGFFSSFFTSNQKCQLRLLKTLETNPYVKLLLDAMKHSGCAVNKDRHFSCEDCNGNVSGGFDASTSQIVLCQNNIHNQAHMNRVVTHELIHAFDHCRAHVDWFTNIRHLACSEVRAANLSGDCSLVNEIFRLHFGLKQHHQTCVRDRATLSILAVRNISKEVAKKAVDEVFESCFNDHEPFGRIPHNKTYARYAHRDFENRDRYYSNI

SEQ ID NO: 10407 - protein, 1704 aa, Homo sapiens
MAVLRQLALLLWKNYTLQKRKVLVTVLELFLPLLFSGILIWLRLKIQSENVPNATIYPGQSIQELPLFFTFPPPGDTWELAYIPSHSDAAKTVTETVRRALVINMRVRGFPSEKDFEDYIRYDNCSSSVLAAVVFEHPFNHSKEPLPLAVKYHLRFSYTRRNYMWTQTGSFFLKETEGWHTTSLFPLFPNPGPREPTSPDGGEPGYIREGFLAVQHAVDRAIMEYHADAATRQLFQRLTVTIKRFPYPPFIADPFLVAIQYQLPLLLLLSFTYTALTIARAVVQEKERRLKEYMRMMGLSSWLHWSAWFLLFFLFLLIAASFMTLLFCVKVKPNVAVLSRSDPSLVLAFLLCFAISTISFSFMVSTFFSKANMAAAFGGFLYFFTYIPYFFVAPRYNWMTLSQKLCSCLLSNVAMAMGAQLIGKFEAKGMGIQWRDLLSPVNVDDDFCFGQVLGMLLLDSVLYGLVTWYMEAVFPGQFGVPQPWYFFIMPSYWCGKPRAVAGKEEEDSDPEKALRNEYFEAEPEDLVAGIKIKHLSKVFRVGNKDRAAVRDLNLNLYEGQITVLLGHNGAGKTTTLSMLTGLFPPTSGRAYISGYEISQDMVQIRKSLGLCPQHDILFDNLTVAEHLYFYAQLKGLSRQKCPEEVKQMLHIIGLEDKWNSRSRFLSGGMRRKLSIGIALIAGSKVLILDEPTSGMDAISRRAIWDLLQRQKSDRTIVLTTHFMDEADLLGDRIAIMAKGELQCCGSSLFLKQKYGAGYHMTLVKEPHCNPEDISQLVHHHVPNATLESSAGAELSFILPRESTHRFEGLFAKLEKKQKELGIASFGASITTMEEVFLRVGKLVDSSMDIQAIQLPALQYQHERRASDWAVDSNLCGAMDPSDGIGALIEEERTAVKLNTGLALHCQQFWAMFLKKAAYSWREWKMVAAQVLVPLTCVTLALLAINYSSELFDDPMLRLTLGEYGRTVVPFSVPGTSQLGQQLSEHLKDALQAEGQEPREVLGDLEEFLIFRASVEGGGFNERCLVAASFRDVGERTVVNALFNNQAYHSPATALAVVDNLLFKLLCGPHASIVVSNFPQPRSALQAAKDQFNEGRKGFDIALNLLFAMAFLASTFSILAVSERAVQAKHVQFVSGVHVASFWLSALLWDLISFLIPSLLLLVVFKAFDVRAFTRDGHMADTLLLLLLYGWAIIPLMYLMNFFFLGAATAYTRLTIFNILSGIATFLMVTIMRIPAVKLEELSKTLDHVFLVLPNHCLGMAVSSFYENYETRRYCTSSEVAAHYCKKYNIQYQENFYAWSAPGVGRFVASMAASGCAYLILLFLIETNLLQRLRGILCALRRRRTLTELYTRMPVLPEDQDVADERTRILAPSPDSLLHTPLIIKELSKVYEQRVPLLAVDRLSLAVQKGECFGLLGFNGAGKTTTFKMLTGEESLTSGDAFVGGHRISSDVGKVRQRIGYCPQFDALLDHMTGREMLVMYARLRGIPERHIGACVENTLRGLLLEPHANKLVRTYSGGNKRKLSTGIALIGEPAVIFLDEPSTGMDPVARRLLWDTVARARESGKAIIITSHSMEECEALCTRLAIMVQGQFKCLGSPQHLKSKFGSGYSLRAKVQSEGQQEALEEFKAFVDLTFPGSVLEDEHQGMVHYHLPGRDLSWAKVFGILEKAKEKYGVDDYSVSQISLEQVFLSFAHLQPPTAEEGR

SEQ ID NO: 10408 - protein, 209 aa, Homo sapiens
MAVLRQLALLLWKNYTLQKRKVLVTVLELFLPLLFSGILIWLRLKIQSENVPNATIYPGQSIQELPLFFTFPPPGDTWELAYIPSHSDAAKTVTETVRRALVINMRVRGFPSEKDFEDYIRYDNCSSSVLAAVVFEHPFNHSKEPLPLAVKYHLRFSYTRRNYMWTQTGSFFLKETEGWHTTSLFPLFPNPGPREPTSPDGGEPGEKLG

SEQ ID NO: 10409 - protein, 1762 aa, Homo sapiens
MECCRRATPGTLLLFLAFLLLSSRTARSEEDRDGLWDAWGPWSECSRTCGGGASYSLRRCLSSKSCEGRNIRYRTCSNVDCPPEAGDFRAQQCSAHNDVKHHGQFYEWLPVSNDPDNPCSLKCQAKGTTLVVELAPKVLDGTRCYTESLDMCISGLCQIVGCDHQLGSTVKEDNCGVCNGDGSTCRLVRGQYKSQLSATKSDDTVVAIPYGSRHIRLVLKGPDHLYLETKTLQGTKGENSLSSTGTFLVDNSSVDFQKFPDKEILRMAGPLTADFIVKIRNSGSADSTVQFIFYQPIIHRWRETDFFPCSATCGGGYQLTSAECYDLRSNRVVADQYCHYYPENIKPKPKLQECNLDPCPASDGYKQIMPYDLYHPLPRWEATPWTACSSSCGGGIQSRAVSCVEEDIQGHVTSVEEWKCMYTPKMPIAQPCNIFDCPKWLAQEWSPCTVTCGQGLRYRVVLCIDHRGMHTGGCSPKTKPHIKEECIVPTPCYKPKEKLPVEAKLPWFKQAQELEEGAAVSEEPSFIPEAWSACTVTCGVGTQVRIVRCQVLLSFSQSVADLPIDECEGPKPASQRACYAGPCSGEIPEFNPDETDGLFGGLQDFDELYDWEYEGFTKCSESCGGGVQEAVVSCLNKQTREPAEENLCVTSRRPPQLLKSCNLDPCPARWEIGKWSPCSLTCGVGLQTRDVFCSHLLSREMNETVILADELCRQPKPSTVQACNRFNCPPAWYPAQWQPCSRTCGGGVQKREVLCKQRMADGSFLELPETFCSASKPACQQACKKDDCPSEWLLSDWTECSTSCGEGTQTRSAICRKMLKTGLSTVVNSTLCPPLPFSSSIRPCMLATCARPGRPSTKHSPHIAAARKVYIQTRRQRKLHFVVGGFAYLLPKTAVVLRCPARRVRKPLITWEKDGQHLISSTHVTVAPFGYLKIHRLKPSDAGVYTCSAGPAREHFVIKLIGGNRKLVARPLSPRSEEEVLAGRKGGPKEALQTHKHQNGIFSNGSKAEKRGLAANPGSRYDDLVSRLLEQGGWPGELLASWEAQDSAERNTTSEEDPGAEQVLLHLPFTMVTEQRRLDDILGNLSQQPEELRDLYSKHLVAQLAQEIFRSHLEHQDTLLKPSERRTSPVTLSPHKHVSGFSSSLRTSSTGDAGGGSRRPHRKPTILRKISAAQQLSASEVVTHLGQTVALASGTLSVLLHCEAIGHPRPTISWARNGEEVQFSDRILLQPDDSLQILAPVEADVGFYTCNATNALGYDSVSIAVTLAGKPLVKTSRMTVINTEKPAVTVDIGSTIKTVQGVNVTINCQVAGVPEAEVTWFRNKSKLGSPHHLHEGSLLLTNVSSSDQGLYSCRAANLHGELTESTQLLILDPPQVPTQLEDIRALLAATGPNLPSVLTSPLGTQLVLDPGNSALLGCPIKGHPVPNITWFHGGQPIVTATGLTHHILAAGQILQVANLSGGSQGEFSCLAQNEAGVLMQKASLVIQDYWWSVDRLATCSASCGNRGVQQPRLRCLLNSTEVNPAHCAGKVRPAVQPIACNRRDCPSRWMVTSWSACTRSCGGGVQTRRVTCQKLKASGISTPVSNDMCTQVAKRPVDTQACNQQLCVEWAFSSWGQCNGPCIGPHLAVQHRQVFCQTRDGITLPSEQCSALPRPVSTQNCWSEACSVHWRVSLWTLCTATCGNYGFQSRRVECVHARTNKAVPEHLCSWGPRPANWQRCNITPCENMECRDTTRYCEKVKQLKLCQLSQFKSRCCGTCGKA

SEQ ID NO: 10410 - protein, 525 aa, Homo sapiens
MECCRRATPGTLLLFLAFLLLSSRTARSEEDRDGLWDAWGPWSECSRTCGGGASYSLRRCLSSKSCEGRNIRYRTCSNVDCPPEAGDFRAQQCSAHNDVKHHGQFYEWLPVSNDPDNPCSLKCQAKGTTLVVELAPKVLDGTRCYTESLDMCISGLCQIVGCDHQLGSTVKEDNCGVCNGDGSTCRLVRGQYKSQLSATKSDDTVVAIPYGSRHIRLVLKGPDHLYLETKTLQGTKGENSLSSTGTFLVDNSSVDFQKFPDKEILRMAGPLTADFIVKIRNSGSADSTVQFIFYQPIIHRWRETDFFPCSATCGGGYQLTSAECYDLRSNRVVADQYCHYYPENIKPKPKLQECNLDPCPASDGYKQIMPYDLYHPLPRWEATPWTACSSSCGGGIQSRAVSCVEEDIQGHVTSVEEWKCMYTPKMPIAQPCNIFDCPKWLAQEWSPCTVTCGQGLRYRVVLCIDHRGMHTGGCSPKTKPHIKEECIVPTPCYKPKEKLPVEAKLPWFKQAQELEEGAAVSEEPS

SEQ ID NO: 10411 - protein, 439 aa, Homo sapiens
MECCRRATPGTLLLFLAFLLLSSRTARSEEDRDGLWDAWGPWSECSRTCGGGASYSLRRCLSSKSCEGRNIRYRTCSNVDCPPEAGDFRAQQCSAHNDVKHHGQFYEWLPVSNDPDNPCSLKCQAKGTTLVVELAPKVLDGTRCYTESLDMCISGLCQIVGCDHQLGSTVKEDNCGVCNGDGSTCRLVRGQYKSQLSATKSDDTVVAIPYGSRHIRLVLKGPDHLYLETKTLQGTKGENSLSSTGTFLVDNSSVDFQKFPDKEILRMAGPLTADFIVKIRNSGSADSTVQFIFYQPIIHRWRETDFFPCSATCGGGYQLTSAECYDLRSNRVVADQYCHYYPENIKPKPKLQECNLDPCPARWEATPWTACSSSCGGGIQSRAVSCVEEDIQGHVTSVEEWKCMYTPKMPIAQPCNIFDCPKWLAQEWSPVTVPSFFVH

SEQ ID NO: 10412 - protein, 683 aa, Homo sapiens
MECCRRATPGTLLLFLAFLLLSSRTARSEEDRDGLWDAWGPWSECSRTCGGGASYSLRRCLSSKSCEGRNIRYRTCSNVDCPPEAGDFRAQQCSAHNDVKHHGQFYEWLPVSNDPDNPCSLKCQAKGTTLVVELAPKVLDGTRCYTESLDMCISGLCQIVGCDHQLGSTVKEDNCGVCNGDGSTCRLVRGQYKSQLSATKSDDTVVAIPYGSRHIRLVLKGPDHLYLETKTLQGTKGENSLSSTGTFLVDNSSVDFQKFPDKEILRMAGPLTADFIVKIRNSGSADSTVQFIFYQPIIHRWRETDFFPCSATCGGGYQLTSAECYDLRSNRVVADQYCHYYPENIKPKPKLQECNLDPCPASDGYKQIMPYDLYHPLPRWEATPWTACSSSCGGGIQSRAVSCVEEDIQGHVTSVEEWKCMYTPKMPIAQPCNIFDCPKWLAQEWSPCTVTCGQGLRYRVVLCIDHRGMHTGGCSPKTKPHIKEECIVPTPCYKPKEKLPVEAKLPWFKQAQELEEGAAVSEEPSFIPEAWSACTVTCGVGTQVRIVRCQVLLSFSQSVADLPIDECEGPKPASQRACYAGPCSGEIPEFNPDETDGLFGGLQDFDELYDWEYEGFTKCSESCGGGVQEAVVSCLNKQTREPAEENLCVTSRRPPQLLKSCNLDPCPARSSIDSAWNACNVLC

SEQ ID NO: 10413 - protein, 258 aa, Homo sapiens
MSGVFCFFFFFLGVPEAEVTWFRNKSKLGSPHHLHEGSLLLTNVSSSDQGLYSCRAANLHGELTESTQLLILDPPQVPTQLEDIRALLAATGPNLPSVLTSPLGTQLVLDPGNSALLGCPIKGHPVPNITWFHGGQPIVTATGLTHHILAAGQILQVANLSGGSQGEFSCLAQNEAGVLMQKASLVIQDYWWSVDRLATCSASCGNRGVQQPRLRCLLNSTEVNPAHCAGKVRPAVQPIACNRRDCPSRAMGLASGLT

SEQ ID NO: 10414 - protein, 463 aa, Homo sapiens
MSGVFCFFFFFLGVPEAEVTWFRNKSKLGSPHHLHEGSLLLTNVSSSDQGLYSCRAANLHGELTESTQLLILDPPQVPTQLEDIRALLAATGPNLPSVLTSPLGTQLVLDPGNSALLGCPIKGHPVPNITWFHGGQPIVTATGLTHHILAAGQILQVANLSGGSQGEFSCLAQNEAGVLMQKASLVIQDYWWSVDRLATCSASCGNRGVQQPRLRCLLNSTEVNPAHCAGKVRPAVQPIACNRRDCPSRWMVTSWSACTRSCGGGVQTRRVTCQKLKASGISTPVSNDMCTQVAKRPVDTQACNQQLCVEWAFSSWGQCNGPCIGPHLAVQHRQVFCQTRDGITLPSEQCSALPRPVSTQNCWSEACSVHWRVSLWTLCTATCGNYGFQSRRVECVHARTNKAVPEHLCSWGPRPANWQRCNITPCENMECRDTTRYCEKVKQLKLCQLSQFKSRCCGTCGKA

SEQ ID NO: 10415 - protein, 1074 aa, Homo sapiens
MENWTGRPWLYLLLLLSLPQLCLDQEVLSGHSLQTPTEEGQGPEGVWGPWVQWASCSQPCGVGVQRRSRTCQLPTVQLHPSLPLPPRPPRHPEALLPRGQGPRPQTSPETLPLYRTQSRGRGGPLRGPASHLGREETQEIRAARRSRLRDPIKPGMFGYGRVPFALPLHRNRRHPRSPPRSELSLISSRGEEAIPSPTPRAEPFSANGSPQTELPPTELSVHTPSPQAEPLSPETAQTEVAPRTRPAPLRHHPRAQASGTEPPSPTHSLGEGGFFRASPQPRRPSSQGWASPQVAGRRPDPFPSVPRGRGQQGQGPWGTGGTPHGPRLEPDPQHPGAWLPLLSNGPHASSLWSLFAPSSPIPRCSGESEQLRACSQAPCPPEQPDPRALQCAAFNSQEFMGQLYQWEPFTEVQGSQRCELNCRPRGFRFYVRHTEKVQDGTLCQPGAPDICVAGRCLSPGCDGILGSGRRPDGCGVCGGDDSTCRLVSGNLTDRGGPLGYQKILWIPAGALRLQIAQLRPSSNYLALRGPGGRSIINGNWAVDPPGSYRAGGTVFRYNRPPREEGKGESLSAEGPTTQPVDVYMIFQEENPGVFYQYVISSPPPILENPTPEPPVPQLQPEILRVEPPLAPAPRPARTPGTLQRQVRIPQMPAPPHPRTPLGSPAAYWKRVGHSACSASCGKGVWRPIFLCISRESGEELDERSCAAGARPPASPEPCHGTPCPPYWEAGEWTSCSRSCGPGTQHRQLQCRQEFGGGGSSVPPERCGHLPRPNITQSCQLRLCGHWEVGSPWSQCSVRCGRGQRSRQVRCVGNNGDEVSEQECASGPPQPPSREACDMGPCTTAWFHSDWSSKCSAECGTGIQRRSVVCLGSGAALGPGQGEAGAGTGQSCPTGSRPPDMRACSLGPCERTWRWYTGPWGECSSECGSGTQRRDIICVSKLGTEFNVTSPSNCSHLPRPPALQPCQGQACQDRWFSTPWSPCSRSCQGGTQTREVQCLSTNQTLSTRCPPQLRPSRKRPCNSQPCSQRPDDQCKDSSPHCPLVVQARLCVYPYYTATCCRSCAHVLERSPQDPS

SEQ ID NO: 10416 - protein, 877 aa, Homo sapiens
MENWTGRPWLYLLLLLSLPQLCLDQEVLSGHSLQTPTEEGQGPEGVWGPWVQWASCSQPCGVGVQRRSRTCQLPTVQLHPSLPLPPRPPRHPEALLPRGQGPRPQTSPETLPLYRTQSRGRGGPLRGPASHLGREETQEIRAARRSRLRDPIKPGMFGYGRVPFALPLHRNRRHPRSPPRSELSLISSRGEEAIPSPTPRAEPFSANGSPQTELPPTELSVHTPSPQAEPLSPETAQTEVAPRTRPAPLRHHPRAQASGTEPPSPTHSLGEGGFFRASPQPRRPSSQGWASPQVAGRRPDPFPSVPRGRGQQGQGPWGTGGTPHGPRLEPDPQHPGAWLPLLSNGPHASSLWSLFAPSSPIPRCSGESEQLRACSQAPCPPEQPDPRALQCAAFNSQEFMGQLYQWEPFTEVQGSQRCELNCRPRGFRFYVRHTEKVQDGTLCQPGAPDICVAGRCLSPGCDGILGSGRRPDGCGVCGGDDSTCRLVSGNLTDRGGPLGYQKILWIPAGALRLQIAQLRPSSNYLALRGPGGRSIINGNWAVDPPGSYRAGGTVFRYNRPPREEGKGESLSAEGPTTQPVDVYMIFQEENPGVFYQYVISSPPPILENPTPEPPVPQLQPEILRVEPPLAPAPRPARTPGTLQRQVRIPQMPAPPHPRTPLGSPAAYWKRVGHSACSASCGKGVWRPIFLCISRESGEELDERSCAAGARPPASPEPCHGTPCPPYWEAGEWTSCSRSCGPGTQHRQLQCRQEFGGGGSSVPPERCGHLPRPNITQSCQLRLCGHWEVGSPWSQCSVRCGRGQRSRQVRCVGNNGDEVSEQECASGPPQPPSREACDMGPCTTAWFHSDWSSKVSPEPPAISCILGNHAQDTSAFPA

SEQ ID NO: 10417 - protein, 1097 aa, Homo sapiens
MENWTGRPWLYLLLLLSLPQLCLDQEVLSGHSLQTPTEEGQGPEGVWGPWVQWASCSQPCGVGVQRRSRTCQLPTVQLHPSLPLPPRPPRHPEALLPRGQGPRPQTSPETLPLYRTQSRGRGGPLRGPASHLGREETQEIRAARRSRLRDPIKPGMFGYGRVPFALPLHRNRRHPRSPPRSELSLISSRGEEAIPSPTPRAEPFSANGSPQTELPPTELSVHTPSPQAEPLSPETAQTEVAPRTRPAPLRHHPRAQASGTEPPSPTHSLGEGGFFRASPQPRRPSSQGWASPQVAGRRPDPFPSVPRGRGQQGQGPWGTGGTPHGPRLEPDPQHPGAWLPLLSNGPHASSLWSLFAPSSPIPRCSGESEQLRACSQAPCPPEQPDPRALQCAAFNSQEFMGQLYQWEPFTEAPLLPLRHAFFLLPGAGSGDSTGVQGSQRCELNCRPRGFRFYVRHTEKVQDGTLCQPGAPDICVAGRCLSPGCDGILGSGRRPDGCGVCGGDDSTCRLVSGNLTDRGGPLGYQKILWIPAGALRLQIAQLRPSSNYLALRGPGGRSIINGNWAVDPPGSYRAGGTVFRYNRPPREEGKGESLSAEGPTTQPVDVYMIFQEENPGVFYQYVISSPPPILENPTPEPPVPQLQPEILRVEPPLAPAPRPARTPGTLQRQVRIPQMPAPPHPRTPLGSPAAYWKRVGHSACSASCGKGVWRPIFLCISRESGEELDERSCAAGARPPASPEPCHGTPCPPYWEAGEWTSCSRSCGPGTQHRQLQCRQEFGGGGSSVPPERCGHLPRPNITQSCQLRLCGHWEVGSPWSQCSVRCGRGQRSRQVRCVGNNGDEVSEQECASGPPQPPSREACDMGPCTTAWFHSDWSSKCSAECGTGIQRRSVVCLGSGAALGPGQGEAGAGTGQSCPTGSRPPDMRACSLGPCERTWRWYTGPWGECSSECGSGTQRRDIICVSKLGTEFNVTSPSNCSHLPRPPALQPCQGQACQDRWFSTPWSPCSRSCQGGTQTREVQCLSTNQTLSTRCPPQLRPSRKRPCNSQPCSQRPDDQCKDSSPHCPLVVQARLCVYPYYTATCCRSCAHVLERSPQDPS

SEQ ID NO: 10418 - protein, 201 aa, Homo sapiens
MALSWVLTVLSLLPLLEAQIPLCANLVPVPITNATLDQITGKWFYIASAFRNEEYNKSVQEIQATFFYFTPNKTEDTIFLREYQTRQDQCIYNTTYLNVQRENGTISRYVGGQEHFAHLLILRDTKTYMLAFDVNDEKNWGLSVYADKPETTKEQLGEFYEALDCLRIPKSDVVYTDWKKDKCEPLEKQHEKERKQEEGES

SEQ ID NO: 10419 - protein, 420 aa, Homo sapiens
MPFSVSWGVLLLAGLCCLVPSSLVEDPQGDAAQKTDTSHHDQGDWEDLACQKISYNVTDLAFDLYKSWLIYHNQHVLVTPTSVAMAFRMLSLGTKADTRTEILEGLNVNLTETPEAKIHECFQQVLQALSRPDTRLQLTTGSSLFVNKSMKLVDTFLEDTKKLYHSEASSINFRDTEEAKEQINNYVEKRTGRKVVDLVKHLKKDTSLALVDYISFHGKWKDKFKAERIMVEGFHVDDKTIIRVPMINHLGRFDIHRDRELSSWVLAQHYVGNATAFFILPDPKKMWQLEEKLTYSHLENIQRAFDIRSINLHFPKLSISGTYKLKRVPRNLGITKIFSNEADLSGVSQEAPLKLSKAVHVAVLTIDEKGTEATGAPHLEEKAWSKYQTVMFNRPFLVIIKEYITNFPLFIGKVVNPTQK

SEQ ID NO: 10420 - protein, 2146 aa, Homo sapiens
MAFWTQLMLLLWKNFMYRRRQPVQLLVELLWPLFLFFILVAVRHSHPPLEHHECHFPNKPLPSAGTVPWLQGLICNVNNTCFPQLTPGEEPGRLSNFNDSLVSRLLADARTVLGGASAHRTLAGLGKLIATLRAARSTAQPQPTKQSPLEPPMLDVAELLTSLLRTESLGLALGQAQEPLHSLLEAAEDLAQELLALRSLVELRALLQRPRGTSGPLELLSEALCSVRGPSSTVGPSLNWYEASDLMELVGQEPESALPDSSLSPACSELIGALDSHPLSRLLWRRLKPLILGKLLFAPDTPFTRKLMAQVNRTFEELTLLRDVREVWEMLGPRIFTFMNDSSNVAMLQRLLQMQDEGRRQPRPGGRDHMEALRSFLDPGSGGYSWQDAHADVGHLVGTLGRVTECLSLDKLEAAPSEAALVSRALQLLAEHRFWAGVVFLGPEDSSDPTEHPTPDLGPGHVRIKIRMDIDVVTRTNKIRDRFWDPGPAADPLTDLRYVWGGFVYLQDLVERAAVRVLSGANPRAGLYLQQMPYPCYVDDVFLRVLSRSLPLFLTLAWIYSVTLTVKAVVREKETRLRDTMRAMGLSRAVLWLGWFLSCLGPFLLSAALLVLVLKLGDILPYSHPGVVFLFLAAFAVATVTQSFLLSAFFSRANLAAACGGLAYFSLYLPYVLCVAWRDRLPAGGRVAASLLSPVAFGFGCESLALLEEQGEGAQWHNVGTRPTADVFSLAQVSGLLLLDAALYGLATWYLEAVCPGQYGIPEPWNFPFRRSYWCGPRPPKSPAPCPTPLDPKVLVEEAPPGLSPGVSVRSLEKRFPGSPQPALRGLSLDFYQGHITAFLGHNGAGKTTTLSILSGLFPPSGGSAFILGHDVRSSMAAIRPHLGVCPQYNVLFDMLTVDEHVWFYGRLKGLSAAVVGPEQDRLLQDVGLVSKQSVQTRHLSGGMQRKLSVAIAFVGGSQVVILDEPTAGVDPASRRGIWELLLKYREGRTLILSTHHLDEAELLGDRVAVVAGGRLCCCGSPLFLRRHLGSGYYLTLVKARLPLTTNEKADTDMEGSVDTRQEKKNGSQGSRVGTPQLLALVQHWVPGARLVEELPHELVLVLPYTGAHDGSFATLFRELDTRLAELRLTGYGISDTSLEEIFLKVVEECAADTDMEDGSCGQHLCTGIAGLDVTLRLKMPPQETALENGEPAGSAPETDQGSGPDAVGRVQGWALTRQQLQALLLKRFLLARRSRRGLFAQIVLPALFVGLALVFSLIVPPFGHYPALRLSPTMYGAQVSFFSEDAPGDPGRARLLEALLQEAGLEEPPVQHSSHRFSAPEVPAEVAKVLASGNWTPESPSPACQCSRPGARRLLPDCPAAAGGPPPPQAVTGSGEVVQNLTGRNLSDFLVKTYPRLVRQGLKTKKWVNEVRYGGFSLGGRDPGLPSGQELGRSVEELWALLSPLPGGALDRVLKNLTAWAHSLDAQDSLKIWFNNKGWHSMVAFVNRASNAILRAHLPPGPARHAHSITTLNHPLNLTKEQLSEGALMASSVDVLVSICVVFAMSFVPASFTLVLIEERVTRAKHLQLMGGLSPTLYWLGNFLWDMCNYLVPACIVVLIFLAFQQRAYVAPANLPALLLLLLLYGWSITPLMYPASFFFSVPSTAYVVLTCINLFIGINGSMATFVLELFSDQKLQEVSRILKQVFLIFPHFCLGRGLIDMVRNQAMADAFERLGDRQFQSPLRWEVVGKNLLAMVIQGPLFLLFTLLLQHRSQLLPQPRVRSLPLLGEEDEDVARERERVVQGATQGDVLVLRNLTKVYRGQRMPAVDRLCLGIPPGECFGLLGVNGAGKTSTFRMVTGDTLASRGEAVLAGHSVAREPSAAHLSMGYCPQSDAIFELLTGREHLELLARLRGVPEAQVAQTAGSGLARLGLSWYADRPAGTYSGGNKRKLATALALVGDPAVVFLDEPTTGMDPSARRFLWNSLLAVVREGRSVMLTSHSMEECEALCSRLAIMVNGRFRCLGSPQHLKGRFAAGHTLTLRVPAARSQPAAAFVAAEFPGAELREAHGGRLRFQLPPGGRCALARVFGELAVHGAEHGVEDFSVSQTMLEEVFLYFSKDQGKDEDTEEQKEAGVGVDPAPGLQHPKRVSQFLDDPSTAETVL

SEQ ID NO: 10421 - protein, 2008 aa, Homo sapiens
MVCLGTGQSAGPLVSVQNHCPPCGLSPQESLGLALGQAQEPLHSLLEAAEDLAQELLALRSLVELRALLQRPRGTSGPLELLSEALCSVRGPSSTVGPSLNWYEASDLMELVGQEPESALPDSSLSPACSELIGALDSHPLSRLLWRRLKPLILGKLLFAPDTPFTRKLMAQVNRTFEELTLLRDVREVWEMLGPRIFTFMNDSSNVAMLQRLLQMQDEGRRQPRPGGRDHMEALRSFLDPGSGGYSWQDAHADVGHLVGTLGRVTECLSLDKLEAAPSEAALVSRALQLLAEHRFWAGVVFLGPEDSSDPTEHPTPDLGPGHVRIKIRMDIDVVTRTNKIRDRFWDPGPAADPLTDLRYVWGGFVYLQDLVERAAVRVLSGANPRAGLYLQQMPYPCYVDDVFLRVLSRSLPLFLTLAWIYSVTLTVKAVVREKETRLRDTMRAMGLSRAVLWLGWFLSCLGPFLLSAALLVLVLKLGDILPYSHPGVVFLFLAAFAVATVTQSFLLSAFFSRANLAAACGGLAYFSLYLPYVLCVAWRDRLPAGGRVAASLLSPVAFGFGCESLALLEEQGEGAQWHNVGTRPTADVFSLAQVSGLLLLDAALYGLATWYLEAVCPGQYGIPEPWNFPFRRSYWCGPRPPKSPAPCPTPLDPKVLVEEAPPGLSPGVSVRSLEKRFPGSPQPALRGLSLDFYQGHITAFLGHNGAGKTTTLSILSGLFPPSGGSAFILGHDVRSSMAAIRPHLGVCPQYNVLFDMLTVDEHVWFYGRLKGLSAAVVGPEQDRLLQDVGLVSKQSVQTRHLSGGMQRKLSVAIAFVGGSQVVILDEPTAGVDPASRRGIWELLLKYREGRTLILSTHHLDEAELLGDRVAVVAGGRLCCCGSPLFLRRHLGSGYYLTLVKARLPLTTNEKADTDMEGSVDTRQEKKNGSQGSRVGTPQLLALVQHWVPGARLVEELPHELVLVLPYTGAHDGSFATLFRELDTRLAELRLTGYGISDTSLEEIFLKVVEECAADTDMEDGSCGQHLCTGIAGLDVTLRLKMPPQETALENGEPAGSAPETDQGSGPDAVGRVQGWALTRQQLQALLLKRFLLARRSRRGLFAQIVLPALFVGLALVFSLIVPPFGHYPALRLSPTMYGAQVSFFSEDAPGDPGRARLLEALLQEAGLEEPPVQHSSHRFSAPEVPAEVAKVLASGNWTPESPSPACQCSRPGARRLLPDCPAAAGGPPPPQAVTGSGEVVQNLTGRNLSDFLVKTYPRLVRQGLKTKKWVNEVRYGGFSLGGRDPGLPSGQELGRSVEELWALLSPLPGGALDRVLKNLTAWAHSLDAQDSLKIWFNNKGWHSMVAFVNRASNAILRAHLPPGPARHAHSITTLNHPLNLTKEQLSEGALMASSVDVLVSICVVFAMSFVPASFTLVLIEERVTRAKHLQLMGGLSPTLYWLGNFLWDMCNYLVPACIVVLIFLAFQQRAYVAPANLPALLLLLLLYGWSITPLMYPASFFFSVPSTAYVVLTCINLFIGINGSMATFVLELFSDQKLQEVSRILKQVFLIFPHFCLGRGLIDMVRNQAMADAFERLGDRQFQSPLRWEVVGKNLLAMVIQGPLFLLFTLLLQHRSQLLPQPRVRSLPLLGEEDEDVARERERVVQGATQGDVLVLRNLTKVYRGQRMPAVDRLCLGIPPGECFGLLGVNGAGKTSTFRMVTGDTLASRGEAVLAGHSVAREPSAAHLSMGYCPQSDAIFELLTGREHLELLARLRGVPEAQVAQTAGSGLARLGLSWYADRPAGTYSGGNKRKLATALALVGDPAVVFLDEPTTGMDPSARRFLWNSLLAVVREGRSVMLTSHSMEECEALCSRLAIMVNGRFRCLGSPQHLKGRFAAGHTLTLRVPAARSQPAAAFVAAEFPGAELREAHGGRLRFQLPPGGRCALARVFGELAVHGAEHGVEDFSVSQTMLEEVFLYFSKDQGKDEDTEEQKEAGVGVDPAPGLQHPKRVSQFLDDPSTAETVL

SEQ ID NO: 10422 - protein, 418 aa, Homo sapiens
MPSSVSWGILLLAGLCCLVPVSLAEDPQGDAAQKTDTSHHDQDHPTFNKITPNLAEFAFSLYRQLAHQSNSTNIFFSPVSIATAFAMLSLGTKADTHDEILEGLNFNLTEIPEAQIHEGFQELLRTLNQPDSQLQLTTGNGLFLSEGLKLVDKFLEDVKKLYHSEAFTVNFGDTEEAKKQINDYVEKGTQGKIVDLVKELDRDTVFALVNYIFFKGKWERPFEVKDTEEEDFHVDQVTTVKVPMMKRLGMFNIQHCKKLSSWVLLMKYLGNATAIFFLPDEGKLQHLENELTHDIITKFLENEDRRSASLHLPKLSITGTYDLKSVLGQLGITKVFSNGADLSGVTEEAPLKLSKAVHKAVLTIDEKGTEAAGAMFLEAIPMSIPPEVKFNKPFVFLMIEQNTKSPLFMGKVVNPTQK

SEQ ID NO: 10423 - protein, 359 aa, Homo sapiens
MPSSVSWGILLLAGLCCLVPVSLAEDPQGDAAQKTDTSHHDQDHPTFNKITPNLAEFAFSLYRQLAHQSNSTNIFFSPVSIATAFAMLSLGTKADTHDEILEGLNFNLTEIPEAQIHEGFQELLRTLNQPDSQLQLTTGNGLFLSEGLKLVDKFLEDVKKLYHSEAFTVNFGDTEEAKKQINDYVEKGTQGKIVDLVKELDRDTVFALVNYIFFKGKWERPFEVKDTEEEDFHVDQVTTVKVPMMKRLGMFNIQHCKKLSSWVLLMKYLGNATAIFFLPDEGKLQHLENELTHDIITKFLENEDRRSASLHLPKLSITGTYDLKSVLGQLGITKVFSNGADLSGVTEEAPLKLSKVRSP

SEQ ID NO: 10424 - protein, 306 aa, Homo sapiens
MPSSVSWGILLLAGLCCLVPVSLAEDPQGDAAQKTDTSHHDQDHPTFNKITPNLAEFAFSLYRQLAHQSNSTNIFFSPVSIATAFAMLSLGTKADTHDEILEGLNFNLTEIPEAQIHEGFQELLRTLNQPDSQLQLTTGNGLFLSEGLKLVDKFLEDVKKLYHSEAFTVNFGDTEEAKKQINDYVEKGTQGKIVDLVKELDRDTVFALVNYIFFKGKWERPFEVKDTEEEDFHVDQVTTVKVPMMKRLGMFNIQHCKKLSSWVLLMKYLGNATAIFFLPDEGKLQHLENELTHDIITKFLENEDRR

SEQ ID NO: 10425 - protein, 264 aa, Homo sapiens
MPSIFAYQSSEVDWCESNFQYSELVAEFYNTFSNIPFFIFGPLMMLLMHPYAQKRSRYIYVVWVLFMIIGLFSMYFHMTLSFLGQLLDEIAILWLLGSGYSIWMPRCYFPSFLGGNRSQFIRLVFITTVVSTLLSFLRPTVNAYALNSIALHILYIVCQEYRKTSNKELRHLIEVSVVLWAVALTSWISDRLLCSFWQRIHFFYLHSIWHVLISITFPYGMVTMALVDANYEMPGETLKVRYWPRDSWPVGLPYVEIRGDDKDC

SEQ ID NO: 10426 - protein, 342 aa, Homo sapiens
MADDLEQQSQGWLSSWLPTWRPTSMSQLKNVEARILQCLQNKFLARYVSLPNQNKIWTVTVSPEQNDRTPLVMVHGFGGGVGLWILNMDSLSARRTLHTFDLLGFGRSSRPAFPRDPEGAEDEFVTSIETWRETMGIPSMILLGHSLGGFLATSYSIKYPDRVKHLILVDPWGFPLRPTNPSEIRAPPAWVKAVASVLGRSNPLAVLRVAGPWGPGLVQRFRPDFKRKFADFFEDDTISEYIYHCNAQNPSGETAFKAMMESFGWARRPMLERIHLIRKDVPITMIYGSDTWIDTSTGKKVKMQRPDSYVRDMEIKGASHHVYADQPHIFNAVVEEICDSVD

SEQ ID NO: 10427 - protein, 181 aa, Homo sapiens
MADDLEQQSQGWLSSWLPTWRPTSMSQLKNVEARILQCLQNKFLARYVSLPNQNKIWTVTVSPEQNDRTPLVMVHGFGGGVGLWILNMDSLSARRTLHTFDLLGFGRSSRPAFPRDPEGAEDEFVTSIETWRETMGIPSMILLGHSLGGFLATSYSIKYPDRAWSGAAIPAGLQTQVCRLL

SEQ ID NO: 10428 - protein, 306 aa, Homo sapiens
MAVARLAAVAAWVPCRSWGWAAVPFGPHRGLSVLLARIPQRAPRWLPACRQKTSLSFLNRPDLPNLAYKKLKGKSPGIIFIPGYLSYMNGTKALAIEEFCKSLGHACIRFDYSGVGSSDGNSEESTLGKWRKDVLSIIDDLADGPQILVGSSLGGWLMLHAAIARPEKVVALIGVATAADTLVTKFNQLPVELKKEVEMKGVWSMPSKYSEEGVYNVQYSFIKEAEHHCLLHSPIPVNCPIRLLHGMKDDIVPWHTSMQVADRVLSTDVDVILRKHSDHRMREKADIQLLVYTIDDLIDKLSTIVN

SEQ ID NO: 10429 - protein, 149 aa, Homo sapiens
MLHAAIARPEKVVALIGVATAADTLVTKFNQLPVELKKEVEMKGVWSMPSKYSEEGVYNVQYSFIKEAEHHCLLHSPIPVNCPIRLLHGMKDDIVPWHTSMQVADRVLSTDVDVILRKHSDHRMREKADIQLLVYTIDDLIDKLSTIVN

SEQ ID NO: 10430 - protein, 205 aa, Homo sapiens
MAVARLAAVAAWVPCRSWGWAAVPFGPHRGLSVLLARIPQRAPRWLPACRQKTSLSFLNRPDLPNLAYKKLKGKSPGIIFIPGYLSYMNGTKALAIEEFCKSLGHACIRFDYSGVGSSDGNSEESTLGKWRKDVLSIIDDLADGPQILVGSSLGGWLMLHAAIARPEKVVALIGVATAADTLVTKFNQLPVEDSGRKNYISLHSA

SEQ ID NO: 10431 - protein, 508 aa, Homo sapiens
MAELQMLLEEEIPSGKRALIESYQNLTRVADYCENNYIQATDKRKALEETKAYTTQSLASVAYQINALANNVLQLLDIQASQLRRMESSINHISQTVDIHKEKVARREIGILTTNKNTSRTHKIIAPANMERPVRYIRKPIDYTVLDDVGHGVKWLKAKHGNNQPARTGTLSRTNPPTQKPPSPPMSGRGTLGRNTPYKTLEPVKPPTVPNDYMTSPARLGSQHSPGRTASLNQRPRTHSGSSGGSGSRENSGSSSIGIPIAVPTPSPPTIGPENISVPPPSGAPPAPPLAPLLPVSTVIAAPGSAPGSQYGTMTRQISRHNSTTSSTSSGGYRRTPSVTAQFSAQPHVNGGPLYSQNSISIAPPPPPMPQLTPQIPLTGFVARVQENIADSPTPPPPPPPDDIPMFDDSPPPPPPPPVDYEDEEAAVVQYNDPYADGDPAWAPKNYIEKVVAIYDYTKDKDDELSFMEGAIIYVIKKNDDGWYEGVCNRVTGLFPGNYVESIMHYTD

SEQ ID NO: 10432 - protein, 446 aa, Homo sapiens
MAELQMLLEEEIPSGKRALIESYQNLTRVADYCENNYIQATDKRKALEETKAYTTQSLASVAYQINALANNVLQLLDIQASQLRRMESSINHISQTVDIHKEKVARREIGILTTNKNTSRTHKIIAPANMERPVRYIRKPIDYTVLDDVGHGVKHGNNQPARTGTLSRTNPPTQKPPSPPMSGRGTLGRNTPYKTLEPVKPPTVPNDYMTSPARLGSQHSPGRTASLNQRPRTHSGSSGGSGSRENSGSSSIGIPIAVPTPSPPTIGPAPGSAPGSQYGTMTRQISRHNSTTSSTSSGGYRRTPSVTAQFSAQPHVNGGPLYSQNSIADSPTPPPPPPPDDIPMFDDSPPPPPPPPVDYEDEEAAVVQYNDPYADGDPAWAPKNYIEKVVAIYDYTKDKDDELSFMEGAIIYVIKKNDDGWYEGVCNRVTGLFPGNYVESIMHYTD

SEQ ID NO: 10433 - protein, 452 aa, Homo sapiens
MAELQMLLEEEIPSGKRALIESYQNLTRVADYCENNYIQATDKRKALEETKAYTTQSLASVAYQINALANNVLQLLDIQASQLRRMESSINHISQTVDIHKEKVARREIGILTTNKNTSRTHKIIAPANMERPVRYIRKPIDYTVLDDVGHGVKWLKAKHGNNQPARTGTLSRTNPPTQKPPSPPMSGRGTLGRNTPYKTLEPVKPPTVPNDYMTSPARLGSQHSPGRTASLNQRPRTHSGSSGGSGSRENSGSSSIGIPIAVPTPSPPTIGPAAPGSAPGSQYGTMTRQISRHNSTTSSTSSGGYRRTPSVTAQFSAQPHVNGGPLYSQNSIADSPTPPPPPPPDDIPMFDDSPPPPPPPPVDYEDEEAAVVQYNDPYADGDPAWAPKNYIEKVVAIYDYTKDKDDELSFMEGAIIYVIKKNDDGWYEGVCNRVTGLFPGNYVESIMHYTD

SEQ ID NO: 10434 - protein, 451 aa, Homo sapiens
MAELQMLLEEEIPSGKRALIESYQNLTRVADYCENNYIQATDKRKALEETKAYTTQSLASVAYQINALANNVLQLLDIQASQLRRMESSINHISQTVDIHKEKVARREIGILTTNKNTSRTHKIIAPANMERPVRYIRKPIDYTVLDDVGHGVKWLKAKHGNNQPARTGTLSRTNPPTQKPPSPPMSGRGTLGRNTPYKTLEPVKPPTVPNDYMTSPARLGSQHSPGRTASLNQRPRTHSGSSGGSGSRENSGSSSIGIPIAVPTPSPPTIGPAPGSAPGSQYGTMTRQISRHNSTTSSTSSGGYRRTPSVTAQFSAQPHVNGGPLYSQNSIADSPTPPPPPPPDDIPMFDDSPPPPPPPPVDYEDEEAAVVQYNDPYADGDPAWAPKNYIEKVVAIYDYTKDKDDELSFMEGAIIYVIKKNDDGWYEGVCNRVTGLFPGNYVESIMHYTD

SEQ ID NO: 10435 - protein, 476 aa, Homo sapiens
MAELQMLLEEEIPSGKRALIESYQNLTRVADYCENNYIQATDKRKALEETKAYTTQSLASVAYQINALANNVLQLLDIQASQLRRMESSINHISQTVDIHKEKVARREIGILTTNKNTSRTHKIIAPANMERPVRYIRKPIDYTVLDDVGHGVKHGNNQPARTGTLSRTNPPTQKPPSPPMSGRGTLGRNTPYKTLEPVKPPTVPNDYMTSPARLGSQHSPGRTASLNQRPRTHSGSSGGSGSRENSGSSSIGIPIAVPTPSPPTIGPAAPGSAPGSQYGTMTRQISRHNSTTSSTSSGGYRRTPSVTAQFSAQPHVNGGPLYSQNSISIAPPPPPMPQLTPQIPLTGFVARVQENIADSPTPPPPPPPDDIPMFDDSPPPPPPPPVDYEDEEAAVVQYNDPYADGDPAWAPKNYIEKVVAIYDYTKDKDDELSFMEGAIIYVIKKNDDGWYEGVCNRVTGLFPGNYVESIMHYTD

SEQ ID NO: 10436 - protein, 480 aa, Homo sapiens
MAELQMLLEEEIPSGKRALIESYQNLTRVADYCENNYIQATDKRKALEETKAYTTQSLASVAYQINALANNVLQLLDIQASQLRRMESSINHISQTVDIHKEKVARREIGILTTNKNTSRTHKIIAPANMERPVRYIRKPIDYTVLDDVGHGVKWLKAKHGNNQPARTGTLSRTNPPTQKPPSPPMSGRGTLGRNTPYKTLEPVKPPTVPNDYMTSPARLGSQHSPGRTASLNQRPRTHSGSSGGSGSRENSGSSSIGIPIAVPTPSPPTIGPAPGSAPGSQYGTMTRQISRHNSTTSSTSSGGYRRTPSVTAQFSAQPHVNGGPLYSQNSISIAPPPPPMPQLTPQIPLTGFVARVQENIADSPTPPPPPPPDDIPMFDDSPPPPPPPPVDYEDEEAAVVQYNDPYADGDPAWAPKNYIEKVVAIYDYTKDKDDELSFMEGAIIYVIKKNDDGWYEGVCNRVTGLFPGNYVESIMHYTD

SEQ ID NO: 10437 - protein, 422 aa, Homo sapiens
MAELQMLLEEEIPSGKRALIESYQNLTRVADYCENNYIQATDKRKALEETKAYTTQSLASVAYQINALANNVLQLLDIQASQLRRMESSINHISQTVDIHKEKVARREIGILTTNKNTSRTHKIIAPANMERPVRYIRKPIDYTVLDDVGHGVKWLKAKHGNNQPARTGTLSRTNPPTQKPPSPPMSGRGTLGRNTPYKTLEPVKPPTVPNDYMTSPARLGSQHSPGRTASLNQRPRTHSGSSGGSGSRENSGSSSIGIPIAVPTPSPPTIGPVSIAPPPPPMPQLTPQIPLTGFVARVQENIADSPTPPPPPPPDDIPMFDDSPPPPPPPPVDYEDEEAAVVQYNDPYADGDPAWAPKNYIEKVVAIYDYTKDKDDELSFMEGAIIYVIKKNDDGWYEGVCNRVTGLFPGNYVESIMHYTD

SEQ ID NO: 10438 - protein, 393 aa, Homo sapiens
MAELQMLLEEEIPSGKRALIESYQNLTRVADYCENNYIQATDKRKALEETKAYTTQSLASVAYQINALANNVLQLLDIQASQLRRMESSINHISQTVDIHKEKVARREIGILTTNKNTSRTHKIIAPANMERPVRYIRKPIDYTVLDDVGHGVKWLKAKHGNNQPARTGTLSRTNPPTQKPPSPPMSGRGTLGRNTPYKTLEPVKPPTVPNDYMTSPARLGSQHSPGRTASLNQRPRTHSGSSGGSGSRENSGSSSIGIPIAVPTPSPPTIGPIADSPTPPPPPPPDDIPMFDDSPPPPPPPPVDYEDEEAAVVQYNDPYADGDPAWAPKNYIEKVVAIYDYTKDKDDELSFMEGAIIYVIKKNDDGWYEGVCNRVTGLFPGNYVESIMHYTD

SEQ ID NO: 10439 - protein, 481 aa, Homo sapiens
MAELQMLLEEEIPSGKRALIESYQNLTRVADYCENNYIQATDKRKALEETKAYTTQSLASVAYQINALANNVLQLLDIQASQLRRMESSINHISQTVDIHKEKVARREIGILTTNKNTSRTHKIIAPANMERPVRYIRKPIDYTVLDDVGHGVKWLKAKHGNNQPARTGTLSRTNPPTQKPPSPPMSGRGTLGRNTPYKTLEPVKPPTVPNDYMTSPARLGSQHSPGRTASLNQRPRTHSGSSGGSGSRENSGSSSIGIPIAVPTPSPPTIGPAAPGSAPGSQYGTMTRQISRHNSTTSSTSSGGYRRTPSVTAQFSAQPHVNGGPLYSQNSISIAPPPPPMPQLTPQIPLTGFVARVQENIADSPTPPPPPPPDDIPMFDDSPPPPPPPPVDYEDEEAAVVQYNDPYADGDPAWAPKNYIEKVVAIYDYTKDKDDELSFMEGAIIYVIKKNDDGWYEGVCNRVTGLFPGNYVESIMHYTD

SEQ ID NO: 10440 - protein, 388 aa, Homo sapiens
MAELQMLLEEEIPSGKRALIESYQNLTRVADYCENNYIQATDKRKALEETKAYTTQSLASVAYQINALANNVLQLLDIQASQLRRMESSINHISQTVDIHKEKVARREIGILTTNKNTSRTHKIIAPANMERPVRYIRKPIDYTVLDDVGHGVKHGNNQPARTGTLSRTNPPTQKPPSPPMSGRGTLGRNTPYKTLEPVKPPTVPNDYMTSPARLGSQHSPGRTASLNQRPRTHSGSSGGSGSRENSGSSSIGIPIAVPTPSPPTIGPVADSPTPPPPPPPDDIPMFDDSPPPPPPPPVDYEDEEAAVVQYNDPYADGDPAWAPKNYIEKVVAIYDYTKDKDDELSFMEGAIIYVIKKNDDGWYEGVCNRVTGLFPGNYVESIMHYTD

SEQ ID NO: 10441 - protein, 329 aa, Homo sapiens
MAELQMLLEEEIPSGKRALIESYQNLTRVADYCENNYIQATDKRKALEETKAYTTQSLASVAYQINALANNVLQLLDIQASQLRRMESSINHISQHGNNQPARTGTLSRTNPPTQKPPSPPMSGRGTLGRNTPYKTLEPVKPPTVPNDYMTSPARLGSQHSPGRTASLNQRPRTHSGSSGGSGSRENSGSSSIGIPIAVPTPSPPTIGPVADSPTPPPPPPPDDIPMFDDSPPPPPPPPVDYEDEEAAVVQYNDPYADGDPAWAPKNYIEKVVAIYDYTKDKDDELSFMEGAIIYVIKKNDDGWYEGVCNRVTGLFPGNYVESIMHYTD

SEQ ID NO: 10442 - protein, 496 aa, Homo sapiens
MAELQMLLEEEIPSGKRALIESYQNLTRVADYCENNYIQRHGFAVLLCLLSNSWPQATDKRKALEETKAYTTQSLASVAYQINALANNVLQLLDIQASQLRRMESSINHISQTVDIHKEKVARREIGILTTNKNTSRTHKIIAPANMERPVRYIRKPIDYTVLDDVGHGVKWLKAKHGNNQPARTGTLSRTNPPTQKPPSPPMSGRGTLGRNTPYKTLEPVKPPTVPNDYMTSPARLGSQHSPGRTASLNQRPRTHSGSSGGSGSRENSGSSSIGIPIAVPTPSPPTIGPENISVPPPSGAPPAPPLAPLLPVSTVIAAPGSAPGSQYGTMTRQISRHNSTTSSTSSGGYRRTPSVTAQFSAQPHVNGGPLYSQNSIADSPTPPPPPPPDDIPMFDDSPPPPPPPPVDYEDEEAAVVQYNDPYADGDPAWAPKNYIEKVVAIYDYTKDKDDELSFMEGAIIYVIKKNDDGWYEGVCNRVTGLFPGNYVESIMHYTD

SEQ ID NO: 10443 - protein, 568 aa, Homo sapiens
MSHRSDTLPVPSGQRRGRVPRDHSIYTQLLEITLHLQQAMTEHFVQLTSRQGLSLEERRHTEAICEHEALLSRLICRMINLLQSGAASGLELQVPLPSEDSRGDVRYGQRAQLSGQPDPVPQLSDCEAAFVNRDLSIRGIDISVFYQSSFQDYNAYQKDKYHKDKNTLGFINLGTSENKLCMDLMTERLQESDMNCIEDTLLQYPDWRGQPFLREEVARFLTYYCRAPTRLDPENVVVLNGCCSVFCALAMVLCDPGEAFLVPAPFYGGFAFSSRLYAKVELIPVHLESEVTVTNTHPFQLTVDKLEEALLEARLEGKKVRGLVLINPQNPLGDIYSPDSLMKYLEFAKRYNLHVIIDEIYMLSVFDESITFHSILSMKSLPDSNRTHVIWGTSKDFGISGFRFGALYTHNKEVASAVSAFGYLHSISGITQHKLCQLLQNTEWIDKVYLPTNCYRLREAHKYITAELKALEIPFHNRSSGLYVWINLKKYLDPCTFEEERLLYCRFLDNKLLLSRGKTYMCKEPGWFCLIFADELPRLKLAMRRFCDVLQEQKEALIVKQLEDAMRE

SEQ ID NO: 10444 - protein, 1132 aa, Homo sapiens
MGANASNYPHSCSPRVGGNSQAQQTFIGTSSYSQQGYGCESKLYSLDHGHEKPQDKKKRTSGLATLKKKFIKRRKSNRSADHAKQMRELLSGWDVRDVNALVEEYEGTSALKELSLQASLARPEARTLQKDMADLYEYKYCTDVDLIFQETCFPVHRAILAARCPFFKTLLSSSPEYGAEIIMDINTAGIDMPMFSALLHYLYTGEFGMEDSRFQNVDILVQLSEEFGTPNSLDVDMRGLFDYMCYYDVVLSFSSDSELVEAFGGNQNCLDEELKAHKAVISARSPFFRNLLQRRIRTGEEITDRTLRTPTRIILDESIIPKKYATVILHCMYTDVVDLSVLHCSPSVGSLSEVQALVAGKPNMTRAEEAMELYHIALFLEFNMLAQGCEDIIAESISLDTLIAILKWSSHPYGSKWVHRQALHFLCEEFSQVMTSDVFYELSKDHLLTAIQSDYLQASEQDILKYLIKWGEHQLMKRIADREPNLLSGTAHSVNKRGVKRRDLDMEELREILSSLLPFVRIEHILPINSEVLSDAMKRGLISTPPSDMLPTTEGGKSNAWLRQKNAGIYVRPRLFSPYVEEAKSVLDEMMVEQTDLVRLRMVRMSNVPDTLYMVNNAVPQCCHMISHQQISSNQSSPPSVVANEIPVPRLLIMKDMVRRLQELRHTEQVQRAYALNCGEGATVSYEIQIRVLREFGLADAAAELLQNPHKFFPDERFGDESPLLTMRQPGRCRVNSTPPAETMFTDLDSFVAFHPPLPPPPPPYHPPATPIHNQLKAGWKQRPPSQHPSRSFSYPCNHSLFHSRTAPKAGPPPVYLPSVKAAPPDCTSTAGLGRQTVAAAAATTTSTATAAAAAASEKQVRTQPVLNDLMPDIAVGVSTLSLKDRRLPELAVDTELSQSVSEAGPGPPQHLSCIPQRHTHTSRKKHTLEQKTDTRENPQEYPDFYDFSNAACRPSTPALSRRTPSPSQGGYFGPDLYSHNKASPSGLKSAYLPGQTSPKKQEEARREYPLSPDGHLHRQKNEPIHLDVVEQPPQRSDFPLAAPENASTGPAHVRGRTAVETDLTFGLTPNRPSLSACSSEAPEERSGRRLADSESLGHGAQRNTDLEREDSISRGRRSPSKPDFLYKKSAL

SEQ ID NO: 10445 - protein, 410 aa, Homo sapiens
MGANASNYPHSCSPRVGGNSQAQQTFIGTSSYSQQGYGCESKLYSLDHGHEKPQDKKKRTSGLATLKKKFIKRRKSNRSADHAKQMRELLSGWDVRDVNALVEEYEGTSALKELSLQASLARPEARTLQKDMADLYEYKYCTDVDLIFQETCFPVHRAILAARCPFFKTLLSSSPEYGAEIIMDINTAGIDMPMFSALLHYLYTGEFGMEDSRFQNVDILVQLSEEFGTPNSLDVDMRGLFDYMCYYDVVLSFSSDSELVEAFGGNQNCLDEELKAHKAVISARSPFFRNLLQRRIRTGEEITDRTLRTPTRIILDESIIPKKYATVILHCMYTDVVDLSVLHCSPSVGSLSEVQALVAGKPNMTRAEEAMELYHIALFLEFNMLAQEETTVIRPACAAELSNSCLLPQS

SEQ ID NO: 10446 - protein, 781 aa, Homo sapiens
MAGGAGAGADGGAGGGGGGGDGSGPSGSSSGGRSLRGCEDIIAESISLDTLIAILKWSSHPYGSKWVHRQALHFLCEEFSQVMTSDVFYELSKDHLLTAIQSDYLQASEQDILKYLIKWGEHQLMKRIADREPNLLSGTAHSVNKRGVKRRDLDMEELREILSSLLPFVRIEHILPINSEVLSDAMKRGLISTPPSDMLPTTEGGKSNAWLRQKNAGIYVRPRLFSPYVEEAKSVLDEMMVEQTDLVRLRMVRMSNVPDTLYMVNNAVPQCCHMISHQQISSNQSSPPSVVANEIPVPRLLIMKDMVRRLQELRHTEQVQRAYALNCGEGATVSYEIQIRVLREFGLADAAAELLQNPHKFFPDERFGDESPLLTMRQPGRCRVNSTPPAETMFTDLDSFVAFHPPLPPPPPPYHPPATPIHNQLKAGWKQRPPSQHPSRSFSYPCNHSLFHSRTAPKAGPPPVYLPSVKAAPPDCTSTAGLGRQTVAAAAATTTSTATAAAAAASEKQVRTQPVLNDLMPDIAVGVSTLSLKDRRLPELAVDTELSQSVSEAGPGPPQHLSCIPQRHTHTSRKKHTLEQKTDTRENPQEYPDFYDFSNAACRPSTPALSRRTPSPSQGGYFGPDLYSHNKASPSGLKSAYLPGQTSPKKQEEARREYPLSPDGHLHRQKNEPIHLDVVEQPPQRSDFPLAAPENASTGPAHVRGRTAVETDLTFGLTPNRPSLSACSSEAPEERSGRRLADSESLGHGAQRNTDLEREDSISRGRRSPSKPDFLYKKSAL

SEQ ID NO: 10447 - protein, 1104 aa, Homo sapiens
MARRGKKPVVRTLEDLTLDSGYGGAADSVRSSNLSLCCSDSHPASPYGGSCWPPLADSMHSRHNSFDTVNTALVEDSEGLDCAGQHCSRLLPDLDEVPWTLQELEALLLRSRDPRAGPAVPGGLPKDALAKLSTLVSRALVRIAKEAQRLSLRFAKCTKYEIQSAMEIVLSWGLAAHCTAAALAALSLYNMSSAGGDRLGRGKSARCGLTFSVGRVYRWMVDSRVALRIHEHAAIYLTACMESLFRDIYSRVVASGVPRSCSGPGSGSGSGPGPSSGPGAAPAADKEREAPGGGAASGGACSAASSASGGSSCCAPPAAAAAAVPPAAAANHHHHHHHALHEAPKFTVETLEHTVNNDSEIWGLLQPYQHLICGKNASGVLCLPDSLNLHRDPQRSNKPGELPMFSQSELRTIEQSLLATRVGSIAELSDLVSRAMHHLQPLNAKHHGNGTPLHHKQGALYWEPEALYTLCYFMHCPQMEWENPNVEPSKVNLQVERPFLVLPPLMEWIRVAVAHAGHRRSFSMDSDDVRQAARLLLPGVDCEPRQLRADDCFCASRKLDAVAIEAKFKQDLGFRMLNCGRTDLVKQAVSLLGPDGINTMSEQGMTPLMYACVRGDEAMVQMLLDAGADLNVEVVSTPHKYPSVHPETRHWTALTFAVLHGHIPVVQLLLDAGAKVEGSVEHGEENYSETPLQLAAAVGNFELVSLLLERGADPLIGTMYRNGISTTPQGDMNSFSQAAAHGHRNVFRKLLAQPEKEKSDILSLEEILAEGTDLAETAPPPLCASRNSKAKLRALREAMYHSAEHGYVDVTIDIRSIGVPWTLHTWLESLRIAFQQHRRPLIQCLLKEFKTIQEEEYTEELVTQGLPLMFEILKASKNEVISQQLCVIFTHCYGPYPIPKLTEIKRKQTSRLDPHFLNNKEMSDVTFLVEGRPFYAHKVLLFTASPRFKALLSSKPTNDGTCIEIGYVKYSIFQLVMQYLYYGGPESLLIKNNEIMELLSAAKFFQLEALQRHCEIICAKSINTDNCVDIYNHAKFLGVTELSAYCEGYFLKNMMVLIENEAFKQLLYDKNGEGTGQDVLQDLQRTLAIRIQSIHLSSSKGSVV

SEQ ID NO: 10448 - protein, 985 aa, Homo sapiens
MARRGKKPVVRTLEDLTLDSGYGGAADSVRSSNLSLCCSDSHPASPYGGSCWPPLADSMHSRHNSFDTVNTALVEDSEGLDCAGQHCSRLLPDLDEVPWTLQELEALLLRSRDPRAGPAVPGGLPKDALAKLSTLVSRALVRIAKEAQRLSLRFAKCTKYEIQSAMEIVLSWGLAAHCTAAALAALSLYNMSSAGGDRLGRGKSARCGLTFSVGRVYRWMVDSRVALRIHEHAAIYLTACMESLFRDIYSRVVASGVPRSCSGPGSGSGSGPGPSSGPGAAPAADKEREAPGGGAASGGACSAASSASGGSSCCAPPAAAAAAVPPAAAANHHHHHHHALHEAPKFTVETLEHTVNNDSEIWGLLQPYQHLICGKNASGVLCLPDSLNLHRDPQRSNKPGELPMFSQSELRTIEQSLLATRVGSIAELSDLVSRAMHHLQPLNAKHHGNGTPLHHKQGALYWEPEALYTLCYFMHCPQMEWENPNVEPSKVNLQVERPFLVLPPLMEWIRVAVAHAGHRRSFSMDSDDVRQAARLLLPGVDCEPRQLRADDCFCASRKLDAVAIEAKFKQDLGFRMLNCGRTDLVKQAVSLLGPDGINTMSEQGMTPLMYACVRGDEAMVQMLLDAGADLNVEVVSTPHKYPSVHPETRHWTALTFAVLHGHIPVVQLLLDAGAKVEGSVEHGEENYSETPLQLAAAVGVPWTLHTWLESLRIAFQQHRRPLIQCLLKEFKTIQEEEYTEELVTQGLPLMFEILKASKNEVISQQLCVIFTHCYGPYPIPKLTEIKRKQTSRLDPHFLNNKEMSDVTFLVEGRPFYAHKVLLFTASPRFKALLSSKPTNDGTCIEIGYVKYSIFQLVMQYLYYGGPESLLIKNNEIMELLSAAKFFQLEALQRHCEIICAKSINTDNCVDIYNHAKFLGVTELSAYCEGYFLKNMMVLIENEAFKQLLYDKNGEGTGQDVLQDLQRTLAIRIQSIHLSSSKGSVV

SEQ ID NO: 10449 - protein, 1007 aa, Homo sapiens
MARRGKKPVVRTLEDLTLDSGYGGAADSVRSSNLSLCCSDSHPASPYGGSCWPPLADSMHSRHNSFDTVNTALVEDSEGLDCAGQHCSRLLPDLDEVPWTLQELEALLLRSRDPRAGPAVPGGLPKDALAKLSTLVSRALVRIAKEAQRLSLRFAKCTKYEIQSAMEIVLSWGLAAHCTAAALAALSLYNMSSAGGDRLGRGKSARCGLTFSVGRVYRWMVDSRVALRIHEHAAIYLTACMESLFRDIYSRVVASGVPRSCSGPGSGSGSGPGPSSGPGAAPAADKEREAPGGGAASGGACSAASSASGGSSCCAPPAAAAAAVPPAAAANHHHHHHHALHEAPKFTVETLEHTVNNDSEIWGLLQPYQHLICGKNASGVLCLPDSLNLHRDPQRSNKPGELPMFSQSELRTIEQSLLATRVGSIAELSDLVSRAMHHLQPLNAKHHGNGTPLHHKQGALYWEPEALYTLCYFMHCPQMEWENPNVEPSKVNLQVERPFLVLPPLMEWIRVAVAHAGHRRSFSMDSDDVRQAARLLLPGVDCEPRQLRADDCFCASRKLDAVAIEAKFKQDLGFRMLNCGRTDLVKQAVSLLGPDGINTMSEQGMTPLMYACVRGDEAMVQMLLDAGADLNVEVVSTPHKYPSVHPETRHWTALTFAVLHGHIPVVQLLLDAGAKVEGSVEHGEENYSETPLQLAAAVGNFELVSLLLERGADPLIGTMYRNGISTTPQGDMNSFSQAAAHGHRNVFRKLLAQPEKEKSDILSLEEILAEGTDLAETAPPPLCASRNSKAKLRALREAMYHSAEHGYVDVTIDIRSIGVPWTLHTWLESLRIAFQQHRRPLIQCLLKEFKTIQEEEYTEELVTQGLPLMFEILKASKNEVISQQLCVIFTHCYGPYPIPKLTEIKRKQTSRLDPHFLNNKEMSDVTFLVEGRPFYAHKVLLFTASPRFKALLSSKPTNDGTCIEIGYVKYSIFQLVMQYLYYGGPESLLIKNNEIMEVRDPLWCWLS

SEQ ID NO: 10450 - protein, 183 aa, Homo sapiens
MSDVTFLVEGRPFYAHKVLLFTASPRFKALLSSKPTNDGTCIEIGYVKYSIFQLVMQYLYYGGPESLLIKNNEIMELLSAAKFFQLEALQRHCEIICAKSINTDNCVDIYNHAKFLGVTELSAYCEGYFLKNMMVLIENEAFKQLLYDKNGEGTGQDVLQDLQRTLAIRIQSIHLSSSKGSVV

SEQ ID NO: 10451 - protein, 641 aa, Homo sapiens
MRKLRPKDSREPAPGSPVRSGCLQRLSHYSGIQRPFLVLPPLMEWIRVAVAHAGHRRSFSMDSDDVRQAARLLLPGVDCEPRQLRADDCFCASRKLDAVAIEAKFKQDLGFRMLNCGRTDLVKQAVSLLGPDGINTMSEQGMTPLMYACVRGDEAMVQMLLDAGADLNVEVVSTPHKYPSVHPETRHWTALTFAVLHGHIPVVQLLLDAGAKVEGSVEHGEENYSETPLQLAAAVGNFELVSLLLERGADPLIGTMYRNGISTTPQGDMNSFSQAAAHGHRNVFRKLLAQPEKEKSDILSLEEILAEGTDLAETAPPPLCASRNSKAKLRALREAMYHSAEHGYVDVTIDIRSIGVPWTLHTWLESLRIAFQQHRRPLIQCLLKEFKTIQEEEYTEELVTQGLPLMFEILKASKNEVISQQLCVIFTHCYGPYPIPKLTEIKRKQTSRLDPHFLNNKEMSDVTFLVEGRPFYAHKVLLFTASPRFKALLSSKPTNDGTCIEIGYVKYSIFQLVMQYLYYGGPESLLIKNNEIMELLSAAKFFQLEALQRHCEIICAKSINTDNCVDIYNHAKFLGVTELSAYCEGYFLKNMMVLIENEAFKQLLYDKNGEGTGQDVLQDLQRTLAIRIQSIHLSSSKGSVV

SEQ ID NO: 10452 - protein, 401 aa, Homo sapiens
MSLWKKTVYRSLCLALALLVAVTVFQRSLTPGQFLQEPPPPTLEPQKAQKPNGQLVNPNNFWKNPKDVAAPTPMASQGPQAWDVTTTNCSANINLTHQPWFQVLEPQFRQFLFYRHCRYFPMLLNHPEKCRGDVYLLVVVKSVITQHDRREAIRQTWGRERQSAGGGRGAVRTLFLLGTASKQEERTHYQQLLAYEDRLYGDILQWGFLDTFFNLTLKEIHFLKWLDIYCPHVPFIFKGDDDVFVNPTNLLEFLADRQPQENLFVGDVLQHARPIRRKDNKYYIPGALYGKASYPPYAGGGGFLMAGSLARRLHHACDTLELYPIDDVFLGMCLEVLGVQPTAHEGFKTFGISRNRNSRMNKEPCFFRAMLVVHKLLPPELLAMWGLVHSNLTCSRKLQVL

SEQ ID NO: 10453 - protein, 397 aa, Homo sapiens
MRCPKCLLCLSALLTLLGLKVYIEWTSESRLSKAYPSPRGTPPSPTPANPEPTLPANLSTRLGQTIPLPFAYWNQQQWRLGSLPSGDSTETGGCQAWGAAAATEIPDFASYPKDLRRFLLSAACRSFPQWLPGGGGSQVSSCSDTDVPYLLLAVKSEPGRFAERQAVRETWGSPAPGIRLLFLLGSPVGEAGPDLDSLVAWESRRYSDLLLWDFLDVPFNQTLKDLLLLAWLGRHCPTVSFVLRAQDDAFVHTPALLAHLRALPPASARSLYLGEVFTQAMPLRKPGGPFYVPESFFEGGYPAYASGGGYVIAGRLAPWLLRAAARVAPFPFEDVYTGLCIRALGLVPQAHPGFLTAWPADRTADHCAFRNLLLVRPLGPQASIRLWKQLQDPRLQC

SEQ ID NO: 10454 - protein, 291 aa, Homo sapiens
MEPLGLVVHGKAEPFSAALRSLVNNPRYSDVCFVVGQERQEVFAHRCLLACRCNFFQRLLGTEPGPGVPSPVVLSTVPTEAFLAVLEFLYTNSVKLYRHSVLEVLTAAVEYGLEELRELCLQFVVKVLDVDLVCEALQVAVTFGLGQLQERCVAFIEAHSQEALRTRGFLELSAAALLPLLRSDKLCVDEAELVRAARSWARVGAAVLERPVAEVAAPVVKELRLALLAPAELSALEEQNRQEPLIPVEQIVEAWKCHALRRGDEARGAPCRRRRGTLPREHHRFLDLSFK

SEQ ID NO: 10455 - protein, 162 aa, Homo sapiens
MEPLGLVVHGKAEPFSAALRSLVNNPRYSDVCFVVGQERQEVFAHRCLLACRCNFFQRLLGTEPGPGVPSPVVLSTVPTEAFLAVLEFLYTNSVKLYRHSVLEVLTAAVEYGLEELRELCLQFVVKVLDVDLVCEALQHFWRPRRADQEVRRSRPSWLTRWP

SEQ ID NO: 10456 - protein, 487 aa, Homo sapiens
MGDTGLRKRREDEKSIQSQEPKTTSLQKELGLISGISIIVGTIIGSGIFVSPKSVLSNTEAVGPCLIIWAACGVLATLGALCFAELGTMITKSGGEYPYLMEAYGPIPAYLFSWASLIVIKPTSFAIICLSFSEYVCAPFYVGCKPPQIVVKCLAAAAILFISTVNSLSVRLGSYVQNIFTAAKLVIVAIIIISGLVLLAQGNTKNFDNSFEGAQLSVGAISLAFYNGLWAYDGWNQLNYITEELRNPYRNLPLAIIIGIPLVTACYILMNVSYFTVMTATELLQSQAVAVTFGDRVLYPASWIVPLFVAFSTIGAANGTCFTAGRLIYVAGREGHMLKVLSYISVRRLTPAPAIIFYGIIATIYIIPGDINSLVNYFSFAAWLFYGLTILGLIVMRFTRKELERPIKVPVVIPVLMTLISVFLVLAPIISKPTWEYLYCVLFILSGLLFYFLFVHYKFGWAQKISKPITMHLQMLMEVVPPEEDPE

SEQ ID NO: 10457 - protein, 125 aa, Homo sapiens
MESKEKRAVNSLSMENANQENEEKEQVANKGEPLALPLDAGEYCVPRGNRRRFRVRQPILQYRWDMMHRLGEPQARMREENMERIGEEVRQLMEKLREKQLSHSLRAVSTDPPHHDHHDEFCLMP

SEQ ID NO: 10458 - protein, 607 aa, Homo sapiens
MIQNVGNHLRRGLASVFSNRTSRKSALRAGNDSAMADGEGYRNPTEVQMSQLVLPCHTNQRGELSVGQLLKWIDTTACLSAERHAGCPCVTASMDDIYFEHTISVGQVVNIKAKVNRAFNSSMEVGIQVASEDLCSEKQWNVCKALATFVARREITKVKLKQITPRTEEEKMEHSVAAERRRMRLVYADTIKDLLANCAIQGDLESRDCSRMVPAEKTRVESVELVLPPHANHQGNTFGGQIMAWMENVATIAASRLCRAHPTLKAIEMFHFRGPSQVGDRLVLKAIVNNAFKHSMEVGVCVEAYRQEAETHRRHINSAFMTFVVLDADDQPQLLPWIRPQPGDGERRYREASARKKIRLDRKYIVSCKQTEVPLSVPWDPSNQVYLSYNNVSSLKMLVAKDNWVLSSEISQVRLYTLEDDKFLSFHMEMVVHVDAAQAFLLLSDLRQRPEWDKHYRSVELVQQVDEDDAIYHVTSPALGGHTKPQDFVILASRRKPCDNGDPYVIALRSVTLPTHRETPEYRRGETLCSGFCLWREGDQLTKCCWVRVSLTELVSASGFYSWGLESRSKGRRSDGWNGKLAGGHLSTLKAIPVAKINSRFGYLQDT

SEQ ID NO: 10459 - protein, 594 aa, Homo sapiens
MIQNVGNHLRRGLASVFSNRTSRKSALRAGNDSAMADGEGYRNPTEVQMSQLVLPCHTNQRGELSVGQLLKWIDTTACLSAERHAGCPCVTASMDDIYFEHTISVGQVVNIKAKVNRAFNSSMEVGIQVASEDLCSEKQWNVCKALATFVARREITKVKLKQITPRTEEEKMEHSVAAERRRMRLVYADTIKDLLANCAIQGDLESRDCSRMVPAEKTRVESVELVLPPHANHQGNTFGGQIMAWMENVATIAASRLCRAHPTLKAIEMFHFRGPSQVGDRLVLKAIVNNAFKHSMEVGVCVEAYRQEAETHRRHINSAFMTFVVLDADDQPQLLPWIRPQPGDGERRYREASARKKIRLDRKYIVSCKQTEVPLSVPWDPSNQVYLSYNNVSSLKMLVAKDNWVLSSEISQVRLYTLEDDKFLSFHMEMVVHVDAAQAFLLLSDLRQRPEWDKHYRSVELVQQVDEDDAIYHVTSPALGGHTKPQDFVILASRRKPCDNGDPYVIALRSVTLPTHRETPEYRRGETLCSGFCLWREGDQLTKVSYYNQATPGVLNYVTTNVAGLSSEFYTTFKACEQFLLDNRNDLAPSLQTL

SEQ ID NO: 10460 - protein, 555 aa, Homo sapiens
MERPAPGEVVMSQAIQPAHATARGELSAGQLLKWIDTTACLAAEKHAGVSCVTASVDDIQFEETARVGQVITIKAKVTRAFSTSMEISIKVMVQDMLTGIEKLVSVAFSTFVAKPVGKEKIHLKPVTLLTEQDHVEHNLAAERRKVRLQHEDTFNNLMKESSKFDDLIFDEEEGAVSTRGTSVQSIELVLPPHANHHGNTFGGQIMAWMETVATISASRLCWAHPFLKSVDMFKFRGPSTVGDRLVFTAIVNNTFQTCVEVGVRVEAFDCQEWAEGRGRHINSAFLIYNAADDKENLITFPRIQPISKDDFRRYRGAIARKRIRLGRKYVISHKEEVPLCIHWDISKQASLSDSNVEALKKLAAKRGWEVTSTVEKIKIYTLEEHDVLSVWVEKHVGSPAHLAYRLLSDFTKRPLWDPHFVSCEVIDWVSEDDQLYHITCPILNDDKPKDLVVLVSRRKPLKDGNTYTVAVKSVILPSVPPSPQYIRSEIICAGFLIHAIDSNSCIVSYFNHMSASILPYFAGNLGGWSKSIEETAASCIQFLENPPDDGFVSTF

SEQ ID NO: 10461 - protein, 167 aa, Homo sapiens
MERPAPGEVVMSQAIQPAHATARGELSAGQLLKWIDTTACLAAEKHAGVSCVTASVDDIQFEETARVGQVITIKAKVTRAFSTSMEISIKVMVQDMLTGIEKLVSVAFSTFVAKPVGKEKIHLKPVTLLTEQDHVEHNLAAERRKVRLQHEDTFNNLMKESSKFDGQ

SEQ ID NO: 10462 - protein, 606 aa, Homo sapiens
MAVAGPAPGAGARPRLDLQFLQRFLQILKVLFPSWSSQNALMFLTLLCLTLLEQFVIYQVGLIPSQYYGVLGNKDLEGFKTLTFLAVMLIVLNSTLKSFDQFTCNLLYVSWRKDLTEHLHRLYFRGRAYYTLNVLRDDIDNPDQRISQDVERFCRQLSSMASKLIISPFTLVYYTYQCFQSTGWLGPVSIFGYFILGTVVNKTLMGPIVMKLVHQEKLEGDFRFKHMQIRVNAEPAAFYRAGHVEHMRTDRRLQRLLQTQRELMSKELWLYIGINTFDYLGSILSYVVIAIPIFSGVYGDLSPAELSTLVSKNAFVCIYLISCFTQLIDLSTTLSDVAGYTHRIGQLRETLLDMSLKSQDCEILGESEWGLDTPPGWPAAEPADTAFLLERVSISAPSSDKPLIKDLSLKISEGQSLLITGNTGTGKTSLLRVLGGLWTSTRGSVQMLTDFGPHGVLFLPQKPFFTDGTLREQVIYPLKEVYPDSGSADDERILRFLELAGLSNLVARTEGLDQQVDWNWYDVLSPGEMQRLSFARLFYLQPKYAVLDEATSALTEEVESELYRIGQQLGMTFISVGHRQSLEKFHSLVLKLCGGGRWELMRIKVE

SEQ ID NO: 10463 - protein, 524 aa, Homo sapiens
MLTCNKAGSRMVVDAANSNGPFQPVVLLHIRDVPPADQEKLFIQKLRQCCVLFDFVSDPLSDLKWKEVKRAALSEMVEYITHNRNVITEPIYPEVVHMFAVNMFRTLPPSSNPTGAEFDPEEDEPTLEAAWPHLQLVYEFFLRFLESPDFQPNIAKKYIDQKFVLQLLELFDSEDPRERDFLKTTLHRIYGKFLGLRAYIRKQINNIFYRFIYETEHHNGIAELLEILGSIINGFALPLKEEHKIFLLKVLLPLHKVKSLSVYHPQLAYCVVQFLEKDSTLTEPVVMALLKYWPKTHSPKEVMFLNELEEILDVIEPSEFVKIMEPLFRQLAKCVSSPHFQVAERALYYWNNEYIMSLISDNAAKILPIMFPSLYRNSKTHWNKTIHGLIYNALKLFMEMNQKLFDDCTQQFKAEKLKEKLKMKEREEAWVKIENLAKANPQYTVYSQASTMSIPVAMETDGPLFEDVQMLRKTVKDEAHQAQKDPKKDRPLARRKSELPQDPHTKKALEAHCRADELASQDGR

SEQ ID NO: 10464 - protein, 449 aa, Homo sapiens
MLTCNKAGSRMVVDAANSNGPFQPVVLLHIRDVPPADQEKLFIQKLRQCCVLFDFVSDPLSDLKWKEVKRAALSEMVEYITHNRNVITEPIYPEVVHMFAVNMFRTLPPSSNPTGAEFDPEEDEPTLEAAWPHLQLVYEFFLRFLESPDFQPNIAKKYIDQKFVLQLLELFDSEDPRERDFLKTTLHRIYGKFLGLRAYIRKQINNIFYRFIYETEHHNGIAELLEILGSIINGFALPLKEEHKIFLLKVLLPLHKVKSLSVYHPQLAYCVVQFLEKDSTLTEPVVMALLKYWPKTHSPKEVMFLNELEEILDVIEPSEFVKIMEPLFRQLAKCVSSPHFQVAERALYYWNNEYIMSLISDNAAKILPIMFPSLYRNSKTHWNKTIHGLIYNALKLFMEMNQKLFDDCTQQFKAEKLKEKLKMKEREEAWVKIENLAKANPQVLKKRIT

SEQ ID NO: 10465 - protein, 485 aa, Homo sapiens
MLTCNKAGSRMVVDAANSNGPFQPVVLLHIRDVPPADQEKLFIQKLRQCCVLFDFVSDPLSDLKWKEVKRAALSEMVEYITHNRNVITEPIYPEVVHMFAVNMFRTLPPSSNPTGAEFDPEEDEPTLEAAWPHLQLVYEFFLRFLESPDFQPNIAKKYIDQKFVLQLLELFDSEDPRERDFLKTTLHRIYGKFLGLRAYIRKQINNIFYRFIYETEHHNGIAELLEILGSIINGFALPLKEEHKIFLLKVLLPLHKVKSLSVYHPQLAYCVVQFLEKDSTLTEPVVMALLKYWPKTHSPKEVMFLNELEEILDVIEPSEFVKIMEPLFRQLAKCVSSPHFQVAERALYYWNNEYIMSLISDNAAKILPIMFPSLYRNSKTHWNKTIHGLIYNALKLFMEMNQKLFDDCTQQFKAEKLKEKLKMKEREEAWVKIENLAKANPQAQKDPKKDRPLARRKSELPQDPHTKKALEAHCRADELASQDGR

SEQ ID NO: 10466 - protein, 540 aa, Homo sapiens
MPNKNKKEKESPKAGKSGKSSKEGQDTVESEQISVRKNSLVAVPSTVSAKIKVPVSQPIVKKDKRQNSSRFSASNNRELQKLPSLKDVPPADQEKLFIQKLRQCCVLFDFVSDPLSDLKWKEVKRAALSEMVEYITHNRNVITEPIYPEVVHMFAVNMFRTLPPSSNPTGAEFDPEEDEPTLEAAWPHLQLVYEFFLRFLESPDFQPNIAKKYIDQKFVLQLLELFDSEDPRERDFLKTTLHRIYGKFLGLRAYIRKQINNIFYRFIYETEHHNGIAELLEILGSIINGFALPLKEEHKIFLLKVLLPLHKVKSLSVYHPQLAYCVVQFLEKDSTLTEPVVMALLKYWPKTHSPKEVMFLNELEEILDVIEPSEFVKIMEPLFRQLAKCVSSPHFQVAERALYYWNNEYIMSLISDNAAKILPIMFPSLYRNSKTHWNKTIHGLIYNALKLFMEMNQKLFDDCTQQFKAEKLKEKLKMKEREEAWVKIENLAKANPQAQKDPKKDRPLARRKSELPQDPHTKKALEAHCRADELASQDGR

SEQ ID NO: 10467 - protein, 555 aa, Homo sapiens
MPNKNKKEKESPKAGKSGKSSKEGQDTVESEGTSPEEPSSPKVPPPLLPELLVLIFGGLQGRDVPPADQEKLFIQKLRQCCVLFDFVSDPLSDLKWKEVKRAALSEMVEYITHNRNVITEPIYPEVVHMFAVNMFRTLPPSSNPTGAEFDPEEDEPTLEAAWPHLQLVYEFFLRFLESPDFQPNIAKKYIDQKFVLQLLELFDSEDPRERDFLKTTLHRIYGKFLGLRAYIRKQINNIFYRFIYETEHHNGIAELLEILGSIINGFALPLKEEHKIFLLKVLLPLHKVKSLSVYHPQLAYCVVQFLEKDSTLTEPVVMALLKYWPKTHSPKEVMFLNELEEILDVIEPSEFVKIMEPLFRQLAKCVSSPHFQVAERALYYWNNEYIMSLISDNAAKILPIMFPSLYRNSKTHWNKTIHGLIYNALKLFMEMNQKLFDDCTQQFKAEKLKEKLKMKEREEAWVKIENLAKANPQYTVYSQASTMSIPVAMETDGPLFEDVQMLRKTVKDEAHQAQKDPKKDRPLARRKSELPQDPHTKKALEAHCRADELASQDGR

SEQ ID NO: 10468 - protein, 422 aa, Homo sapiens
MLQWRRRHCCFAKMTWNAKRSLFRTHLIGVLSLVFLFAMFLFFNHHDWLPGRAGFKENPVTYTFRGFRSTKSETNHSSLRNIWKETVPQTLRPQTATNSNNTDLSPQGVTGLENTLSANGSIYNEKGTGHPNSYHFKYIINEPEKCQEKSPFLILLIAAEPGQIEARRAIRQTWGNESLAPGIQITRIFLLGLSIKLNGYLQRAILEESRQYHDIIQQEYLDTYYNLTIKTLMGMNWVATYCPHIPYVMKTDSDMFVNTEYLINKLLKPDLPPRHNYFTGYLMRGYAPNRNKDSKWYMPPDLYPSERYPVFCSGTGYVFSGDLAEKIFKVSLGIRRLHLEDVYVGICLAKLRIDPVPPPNEFVFNHWRVSYSSCKYSHLITSHQFQPSELIKYWNHLQQNKHNACANAAKEKAGRYRHRKLH

SEQ ID NO: 10469 - protein, 274 aa, Homo sapiens; identical to SEQ ID NO: 198

SEQ ID NO: 10470 - protein, 189 aa, Homo sapiens; identical to SEQ ID NO: 199

SEQ ID NO: 10471 - protein, 111 aa, Homo sapiens
MANIHQENEEMEQPMQNGEEDRPLGGGEGHQPAGNRRGQARRLAPNFRWAIPNRQINDGMGGDGDDMEIFMEEMREIRRKLRELQLRNCLRILMGELSNHHDHHDEFCLMP

SEQ ID NO: 10472 - protein, 101 aa, Homo sapiens
MEQPMQNGEEDRPLGGGEGHQPAGNRRGQARRLAPNFRWAIPNRQINDGMGGDGDDMEIFMEEMREIRRKLRELQLRNCLRILMGELSNHHDHHDEFCLMP

SEQ ID NO: 10473 - protein, 1454 aa, Homo sapiens
MWAQLLLGMLALSPAIAEELPNYLVTLPARLNFPSVQKVCLDLSPGYSDVKFTVTLETKDKTQKLLEYSGLKKRHLHCISFLVPPPAGGTEEVATIRVSGVGNNISFEEKKKVLIQRQGNGTFVQTDKPLYTPGQQVYFRIVTMDSNFVPVNDKYSMVELQDPNSNRIAQWLEVVPEQGIVDLSFQLAPEAMLGTYTVAVAEGKTFGTFSVEEYVLPKFKVEVVEPKELSTVQESFLVKICCRYTYGKPMLGAVQVSVCQKANTYWYREVEREQLPDKCRNLSGQTDKTGCFSAPVDMATFDLIGYAYSHQINIVATVVEEGTGVEANATQNIYISPQMGSMTFEDTSNFYHPNFPFSGKIRVRGHDDSFLKNHLVFLVIYGTNGTFNQTLVTDNNGLAPFTLETSGWNGTDVSLEGKFQMEDLVYNPEQVPRYYQNAYLHLRPFYSTTRSFLGIHRLNGPLKCGQPQEVLVDYYIDPADASPDQEISFSYYLIGKGSLVMEGQKHLNSKKKGLKASFSLSLTFTSRLAPDPSLVIYAIFPSGGVVADKIQFSVEMCFDNQVSLGFSPSQQLPGAEVELQLQAAPGSLCALRAVDESVLLLRPDRELSNRSVYGMFPFWYGHYPYQVAEYDQCPVSGPWDFPQPLIDPMPQGHSSQRSIIWRPSFSEGTDLFSFFRDVGLKILSNAKIKKPVDCSHRSPEYSTAMGAGGGHPEAFESSTPLHQAEDSQVRQYFPETWLWDLFPIGNSGKEAVHVTVPDAITEWKAMSFCTSQSRGFGLSPTVGLTAFKPFFVDLTLPYSVVRGESFRLTATIFNYLKDCIRVQTDLAKSHEYQLESWADSQTSSCLCADDAKTHHWNITAVKLGHINFTISTKILDSNEPCGGQKGFVPQKGRSDTLIKPVLVKPEGVLVEKTHSSLLCPKGKVASESVSLELPVDIVPDSTKAYVTVLGDIMGTALQNLDGLVQMPSGCGEQNMVLFAPIIYVLQYLEKAGLLTEEIRSRAVGFLEIGYQKELMYKHSNGSYSAFGERDGNGNTWLTAFVTKCFGQAQKFIFIDPKNIQDALKWMAGNQLPSGCYANVGNLLHTAMKGGVDDEVSLTAYVTAALLEMGKDVDDPMVSQGLRCLKNSATSTTNLYTQALLAYIFSLAGEMDIRNILLKQLDQQAIISGESIYWSQKPTPSSNASPWSEPAAVDVELTAYALLAQLTKPSLTQKEIAKATSIVAWLAKQHNAYGGFSSTQDTVVALQALAKYATTAYMPSEEINLVVKSTENFQRTFNIQSVNRLVFQQDTLPNVPGMYTLEASGQGCVYVQTVLRYNILPPTNMKTFSLSVEIGKARCEQPTSPRSLTLTIHTSYVGSRSSSNMAIVEVKMLSGFSPMEGTNQLLLQQPLVKKVEFGTDTLNIYLDELIKNTQTYTFTISQSVLVTNLKPATIKVYDYYLPDEQATIQYSDPCE

SEQ ID NO: 10474 - protein, 963 aa, Homo sapiens
MLIGKGSLVMEGQKHLNSKKKGLKASFSLSLTFTSRLAPDPSLVIYAIFPSGGVVADKIQFSVEMCFDNQVSLGFSPSQQLPGAEVELQLQAAPGSLCALRAVDESVLLLRPDRELSNRSVYGMFPFWYGHYPYQVAEYDQCPVSGPWDFPQPLIDPMPQGHSSQRSIIWRPSFSEGTDLFSFFRDVGLKILSNAKIKKPVDCSHRSPEYSTAMGAGGGHPEAFESSTPLHQAEDSQVRQYFPETWLWDLFPIGNSGKEAVHVTVPDAITEWKAMSFCTSQSRGFGLSPTVGLTAFKPFFVDLTLPYSVVRGESFRLTATIFNYLKDCIRVQTDLAKSHEYQLESWADSQTSSCLCADDAKTHHWNITAVKLGHINFTISTKILDSNEPCGGQKGFVPQKGRSDTLIKPVLVKPEGVLVEKTHSSLLCPKGKVASESVSLELPVDIVPDSTKAYVTVLGDIMGTALQNLDGLVQMPSGCGEQNMVLFAPIIYVLQYLEKAGLLTEEIRSRAVGFLEIGYQKELMYKHSNGSYSAFGERDGNGNTWLTAFVTKCFGQAQKFIFIDPKNIQDALKWMAGNQLPSGCYANVGNLLHTAMKGGVDDEVSLTAYVTAALLEMGKDVDDPMVSQGLRCLKNSATSTTNLYTQALLAYIFSLAGEMDIRNILLKQLDQQAIISGESIYWSQKPTPSSNASPWSEPAAVDVELTAYALLAQLTKPSLTQKEIAKATSIVAWLAKQHNAYGGFSSTQDTVVALQALAKYATTAYMPSEEINLVVKSTENFQRTFNIQSVNRLVFQQDTLPNVPGMYTLEASGQGCVYVQTVLRYNILPPTNMKTFSLSVEIGKARCEQPTSPRSLTLTIHTSYVGSRSSSNMAIVEVKMLSGFSPMEGTNQLLLQQPLVKKVEFGTDTLNIYLDELIKNTQTYTFTISQSVLVTNLKPATIKVYDYYLPDEQATIQYSDPCE

SEQ ID NO: 10475 - protein, 543 aa, Homo sapiens
MAHAHIQGGRRAKSRFVVCIMSGARSKLALFLCGCYVVALGAHTGEESVADHHEAEYYVAAVYEHPSILSLNPLALISRQEALELMNQNLDIYEQQVMTAAQKDVQIIVFPEDGIHGFNFTRTSIYPFLDFMPSPQVVRWNPCLEPHRFNDTEVLQRLSCMAIRGDMFLVANLGTKEPCHSSDPRCPKDGRYQFNTNVVFSNNGTLVDRYRKHNLYFEAAFDVPLKVDLITFDTPFAGRFGIFTCFDILFFDPAIRVLRDYKVKHVVYPTAWMNQLPLLAAIEIQKAFAVAFGINVLAANVHHPVLGMTGSGIHTPLESFWYHDMENPKSHLIIAQVAKNPVGLIGAENATGETDPSHSKFLKILSGDPYCEKDAQEVHCDEATKWNVNAPPTFHSEMMYDNFTLVPVWGKEGYLHVCSNGLCCYLLYERPTLSKELYALGVFDGLHTVHGTYYIQVCALVRCGGLGFDTCGQEITEATGIFEFHLWGNFSTSYIFPLFLTSGMTLEVPDQLGWENDHYFLRKSRLSSGLVTAALYGRLYERD

SEQ ID NO: 10476 - protein, 545 aa, Homo sapiens
MARKETQLIIKMNHLARFVVCIMSGARSKLALFLCGCYVVALGAHTGEESVADHHEAEYYVAAVYEHPSILSLNPLALISRQEALELMNQNLDIYEQQVMTAAQKDVQIIVFPEDGIHGFNFTRTSIYPFLDFMPSPQVVRWNPCLEPHRFNDTEVLQRLSCMAIRGDMFLVANLGTKEPCHSSDPRCPKDGRYQFNTNVVFSNNGTLVDRYRKHNLYFEAAFDVPLKVDLITFDTPFAGRFGIFTCFDILFFDPAIRVLRDYKVKHVVYPTAWMNQLPLLAAIEIQKAFAVAFGINVLAANVHHPVLGMTGSGIHTPLESFWYHDMENPKSHLIIAQVAKNPVGLIGAENATGETDPSHSKFLKILSGDPYCEKDAQEVHCDEATKWNVNAPPTFHSEMMYDNFTLVPVWGKEGYLHVCSNGLCCYLLYERPTLSKELYALGVFDGLHTVHGTYYIQVCALVRCGGLGFDTCGQEITEATGIFEFHLWGNFSTSYIFPLFLTSGMTLEVPDQLGWENDHYFLRKSRLSSGLVTAALYGRLYERD

SEQ ID NO: 10477 - protein, 545 aa, Homo sapiens
MPEGGGTSRRLLPMQSRFVVCIMSGARSKLALFLCGCYVVALGAHTGEESVADHHEAEYYVAAVYEHPSILSLNPLALISRQEALELMNQNLDIYEQQVMTAAQKDVQIIVFPEDGIHGFNFTRTSIYPFLDFMPSPQVVRWNPCLEPHRFNDTEVLQRLSCMAIRGDMFLVANLGTKEPCHSSDPRCPKDGRYQFNTNVVFSNNGTLVDRYRKHNLYFEAAFDVPLKVDLITFDTPFAGRFGIFTCFDILFFDPAIRVLRDYKVKHVVYPTAWMNQLPLLAAIEIQKAFAVAFGINVLAANVHHPVLGMTGSGIHTPLESFWYHDMENPKSHLIIAQVAKNPVGLIGAENATGETDPSHSKFLKILSGDPYCEKDAQEVHCDEATKWNVNAPPTFHSEMMYDNFTLVPVWGKEGYLHVCSNGLCCYLLYERPTLSKELYALGVFDGLHTVHGTYYIQVCALVRCGGLGFDTCGQEITEATGIFEFHLWGNFSTSYIFPLFLTSGMTLEVPDQLGWENDHYFLRKSRLSSGLVTAALYGRLYERD

SEQ ID NO: 10478 - protein, 523 aa, Homo sapiens
MSGARSKLALFLCGCYVVALGAHTGEESVADHHEAEYYVAAVYEHPSILSLNPLALISRQEALELMNQNLDIYEQQVMTAAQKDVQIIVFPEDGIHGFNFTRTSIYPFLDFMPSPQVVRWNPCLEPHRFNDTEVLQRLSCMAIRGDMFLVANLGTKEPCHSSDPRCPKDGRYQFNTNVVFSNNGTLVDRYRKHNLYFEAAFDVPLKVDLITFDTPFAGRFGIFTCFDILFFDPAIRVLRDYKVKHVVYPTAWMNQLPLLAAIEIQKAFAVAFGINVLAANVHHPVLGMTGSGIHTPLESFWYHDMENPKSHLIIAQVAKNPVGLIGAENATGETDPSHSKFLKILSGDPYCEKDAQEVHCDEATKWNVNAPPTFHSEMMYDNFTLVPVWGKEGYLHVCSNGLCCYLLYERPTLSKELYALGVFDGLHTVHGTYYIQVCALVRCGGLGFDTCGQEITEATGIFEFHLWGNFSTSYIFPLFLTSGMTLEVPDQLGWENDHYFLRKSRLSSGLVTAALYGRLYERD

SEQ ID NO: 10479 - protein, 589 aa, Homo sapiens
MAAADGDDSLYPIAVLIDELRNEDVQLRLNSIKKLSTIALALGVERTRSELLPFLTDTIYDEDEVLLALAEQLGTFTTLVGGPEYVHCLLPPLESLATVEETVVRDKAVESLRAISHEHSPSDLEAHFVPLVKRLAGGDWFTSRTSACGLFSVCYPRVSSAVKAELRQYFRNLCSDDTPMVRRAAASKLGEFAKVLELDNVKSEIIPMFSNLASDEQDSVRLLAVEACVNIAQLLPQEDLEALVMPTLRQAAEDKSWRVRYMVADKFTELQKAVGPEITKTDLVPAFQNLMKDCEAEVRAAASHKVKEFCENLSADCRENVIMSQILPCIKELVSDANQHVKSALASVIMGLSPILGKDNTIEHLLPLFLAQLKDECPEVRLNIISNLDCVNEVIGIRQLSQSLLPAIVELAEDAKWRVRLAIIEYMPLLAGQLGVEFFDEKLNSLCMAWLVDHVYAIREAATSNLKKLVEKFGKEWAHATIIPKVLAMSGDPNYLHRMTTLFCINVLSEVCGQDITTKHMLPTVLRMAGDPVANVRFNVAKSLQKIGPILDNSTLQSEVKPILEKLTQDQDVDVKYFAQEALTVLSLA

SEQ ID NO: 10480 - protein, 599 aa, Homo sapiens
MADKLTRIAIVNHDKCKPKKCRQECKKSCPVVRMGKLCIEVTPQSKIAWISETLCIGCGICIKKCPFGALSIVNLPSNLEKETTHRYCANAFKLHRLPIPRPGEVLGLVGTNGIGKSTALKILAGKQKPNLGKYDDPPDWQEILTYFRGSELQNYFTKILEDDLKAIIKPQYVDQIPKAAKGTVGSILDRKDETKTQAIVCQQLDLTHLKERNVEDLSGGELQRFACAVVCIQKADIFMFDEPSSYLDVKQRLKAAITIRSLINPDRYIIVVEHDLSVLDYLSDFICCLYGVPSAYGVVTMPFSVREGINIFLDGYVPTENLRFRDASLVFKVAETANEEEVKKMCMYKYPGMKKKMGEFELAIVAGEFTDSEIMVMLGENGTGKTTFIRMLAGRLKPDEGGEVPVLNVSYKPQKISPKSTGSVRQLLHEKIRDAYTHPQFVTDVMKPLQIENIIDQEVQTLSGGELQRVALALCLGKPADVYLIDEPSAYLDSEQRLMAARVVKRFILHAKKTAFVVEHDFIMATYLADRVIVFDGVPSKNTVANSPQTLLAGMNKFLSQLEITFRRDPNNYRPRINKLNSIKDVEQKKSGNYFFLDD

SEQ ID NO: 10481 - protein, 534 aa, Homo sapiens
MFQFHAGSWESWCCCCLIPADRPWDRGQHWQLEMADTRSVHETRFEAAVKVIQSLPKNGSFQPTNEMMLKFYSFYKQATEGPCKLSRPGFWDPIGRYKWDAWSSLGDMTKEEAMIAYVEEMKKIIETMPMTEKVEELLRVIGPFYEIVEDKKSGRSSDITSVRLEKISKCLEDLGNVLTSTPNAKTVNGKAESSDSGAESEEEEAQEEVKGAEQSDNDKKMMKKSADHKNLEVIVTNGYDKDGFVQDIQNDIHASSSLNGRSTEEVKPIDENLGQTGKSAVCIHQDINDDHVEDVTGIQHLTSDSDSEVYCDSMEQFGQEESLDSFTSNNGPFQYYLGGHSSQPMENSGFREDIQVPPGNGNIGNMQVVAVEGKGEVKHGGEDGRNNSGAPHREKRGGETDEFSNVRRGRGHRMQHLSEGTKGRQVGSGGDGERWGSDRGSRGSLNEQIALVLMRLQEDMQNVLQRLQKLETLTALQAKSSTSTLQTAPQPTSQRPSWWPFEMSPGVLTFAIIWPFIAQWLVYLYYQRRRRKLN

SEQ ID NO: 10482 - protein, 490 aa, Homo sapiens
MADTRSVHETRFEAAVKVIQSLPKNGSFQPTNEMMLKFYSFYKQATEGPCKLSRPGFWDPIGRYKWDAWSSLGDMTKEEAMIAYVEEMKKIIETMPMTEKVEELLRVIGPFYEIVEDKKSGRSSDITSDLGNVLTSTPNAKTVNGKAESSDSGAESEEEEAQEEVKGAEQSDNDKKMMKKSADHKNLEVIVTNGYDKDGFVQDIQNDIHASSSLNGRSTEEVKPIDENLGQTGKSAVCIHQDINDDHVEDVTGIQHLTSDSDSEVYCDSMEQFGQEESLDSFTSNNGPFQYYLGGHSSQPMENSGFREDIQVPPGNGNIGNMQVVAVEGKGEVKHGGEDGRNNSGAPHREKRGGETDEFSNVRRGRGHRMQHLSEGTKGRQVGSGGDGERWGSDRGSRGSLNEQIALVLMRLQEDMQNVLQRLQKLETLTALQAKSSTSTLQTAPQPTSQRPSWWPFEMSPGVLTFAIIWPFIAQWLVYLYYQRRRRKLN

SEQ ID NO: 10483 - protein, 525 aa, Homo sapiens
MLFLSFHAGSWESWCCCCLIPADRPWDRGQHWQLEMADTRSVHETRFEAAVKVIQSLPKNGSFQPTNEMMLKFYSFYKQATEGPCKLSRPGFWDPIGRYKWDAWSSLGDMTKEEAMIAYVEEMKKIIETMPMTEKVEELLRVIGPFYEIVEDKKSGRSSDITSDLGNVLTSTPNAKTVNGKAESSDSGAESEEEEAQEEVKGAEQSDNDKKMMKKSADHKNLEVIVTNGYDKDGFVQDIQNDIHASSSLNGRSTEEVKPIDENLGQTGKSAVCIHQDINDDHVEDVTGIQHLTSDSDSEVYCDSMEQFGQEESLDSFTSNNGPFQYYLGGHSSQPMENSGFREDIQVPPGNGNIGNMQVVAVEGKGEVKHGGEDGRNNSGAPHREKRGGETDEFSNVRRGRGHRMQHLSEGTKGRQVGSGGDGERWGSDRGSRGSLNEQIALVLMRLQEDMQNVLQRLQKLETLTALQAKSSTSTLQTAPQPTSQRPSWWPFEMSPGVLTFAIIWPFIAQWLVYLYYQRRRRKLN

SEQ ID NO: 10484 - protein, 416 aa, Homo sapiens
MTKEEAMIAYVEEMKKIIETMPMTEKVEELLRVIGPFYEIVEDKKSGRSSDITSDLGNVLTSTPNAKTVNGKAESSDSGAESEEEEAQEEVKGAEQSDNDKKMMKKSADHKNLEVIVTNGYDKDGFVQDIQNDIHASSSLNGRSTEEVKPIDENLGQTGKSAVCIHQDINDDHVEDVTGIQHLTSDSDSEVYCDSMEQFGQEESLDSFTSNNGPFQYYLGGHSSQPMENSGFREDIQVPPGNGNIGNMQVVAVEGKGEVKHGGEDGRNNSGAPHREKRGGETDEFSNVRRGRGHRMQHLSEGTKGRQVGSGGDGERWGSDRGSRGSLNEQIALVLMRLQEDMQNVLQRLQKLETLTALQAKSSTSTLQTAPQPTSQRPSWWPFEMSPGVLTFAIIWPFIAQWLVYLYYQRRRRKLN

SEQ ID NO: 10485 - protein, 88 aa, Homo sapiens
MALQADFDRAAEDVRKLKARPDDGELKELYGLYKQAIVGDINIACPGMLDLKGKAKWEAWNLKKGLSTEDATSAYISKAKELIEKYGI

SEQ ID NO: 10486 - protein, 286 aa, Homo sapiens
MERRLGVRAWVKENRGSFQPPVCNKLMHQEQLKVMFIGGPNTRKDYHIEEGEEVFYQLEGDMVLRVLEQGKHRDVVIRQGEIFLLPARVPHSPQRFANTVGLVVERRRLETELDGLRYYVGDTMDVLFEKWFYCKDLGTQLAPIIQEFFSSEQYRTGKPIPDQLLKEPPFPLSTRSIMEPMSLDAWLDSHHRELQAGTPLSLFGDTYETQVIAYGQGSSEGLRQNVDVWLWQLEGSSVVTMGGRRLSLAPDDSLLVLAGTSYAWERTQGSVALSVTQDPACKKPLG

SEQ ID NO: 10487 - protein, 147 aa, Homo sapiens
MERRLGVRAWVKENRGSFQPPVCNKLMHQEQLKVMFIGGPNTRKDYHIEEGEEVFYQLEGDMVLRVLEQGKHRDVVIRQGEIFLLPARVPHSPQRFANTVGLVVERRRLETELDGLRYYVGDTMDVLFEKWFYCKDLGTQLAPIIQE

SEQ ID NO: 10488 - protein, 1556 aa, Homo sapiens
MPLLHRKPFVRQKPPADLRPDEEVFYCKVTNEIFRHYDDFFERTILCNSLVWSCAVTGRPGLTYQEALESEKKARQNLQSFPEPLIIPVLYLTSLTHRSRLHEICDDIFAYVKDRYFVEETVEVIRNNGARLQCRILEVLPPSHQNGFANGHVNSVDGETIIISDSDDSETQSCSFQNGKKKDAIDPLLFKYKVQPTKKELHESAIVKATQISRRKHLFSRDKLKLFLKQHCEPQDGVIKIKASSLSTYKIAEQDFSYFFPDDPPTFIFSPANRRRGRPPKRIHISQEDNVANKQTLASYRSKATKERDKLLKQEEMKSLAFEKAKLKREKADALEAKKKEKEDKEKKREELKKIVEEERLKKKEEKERLKVEREKEREKLREEKRKYVEYLKQWSKPREDMECDDLKELPEPTPVKTRLPPEIFGDALMVLEFLNAFGELFDLQDEFPDGVTLEVLEEALVGNDSEGPLCELLFFFLTAIFQAIAEEEEEVAKEQLTDADTKDLTEALDEDADPTKSALSAVASLAAAWPQLHQGCSLKSLDLDSCTLSEILRLHILASGADVTSANAKYRYQKRGGFDATDDACMELRLSNPSLVKKLSSTSVYDLTPGEKMKILHALCGKLLTLVSTRDFIEDYVDILRQAKQEFRELKAEQHRKEREEAAARIRKRKEEKLKEQEQKMKEKQEKLKEDEQRNSTADISIGEEEREDFDTSIESKDTEQKELDQDMVTEDEDDPGSHKRGRRGKRGQNGFKEFTRQEQINCVTREPLTADEEEALKQEHQRKEKELLEKIQSAIACTNIFPLGRDRMYRRYWIFPSIPGLFIEEDYSGLTEDMLLPRPSSFQNNVQSQDPQVSTKTGEPLMSESTSNIDQGPRDHSVQLPKPVHKPNRWCFYSSCEQLDQLIEALNSRGHRESALKETLLQEKSRICAQLARFSEEKFHFSDKPQPDSKPTYSRGRSSNAYDPSQMCAEKQLELRLRDFLLDIEDRIYQGTLGAIKVTDRHIWRSALESGRYELLSEENKENGIIKTVNEDVEEMEIDEQTKVIVKDRLLGIKTETPSTVSTNASTPQSVSSVVHYLAMALFQIEQGIERRFLKAPLDASDSGRSYKTVLDRWRESLLSSASLSQVFLHLSTLDRSVIWSKSILNARCKICRKKGDAENMVLCDGCDRGHHTYCVRPKLKTVPEGDWFCPECRPKQRSRRLSSRQRPSLESDEDVEDSMGGEDDEVDGDEEEGQSEEEEYEVEQDEDDSQEEEEVSLPKRGRPQVRLPVKTRGKLSSSFSSRGQQQEPGRYPSRSQQSTPKTTVSSKTGRSLRKINSAPPTETKSLRIASRSTRHSHGPLQADVFVELLSPRRKRRGRKSANNTPENSPNFPNFRVIATKSSEQSRSVNIASKLSLQESESKRRCRKRQSPEPSPVTLGRRSSGRQGGVHELSAFEQLVVELVRHDDSWPFLKLVSKIQVPDYYDIIKKPIALNIIREKVNKCEYKLASEFIDDIELMFSNCFEYNPRNTSEAKAGTRLQAFFHIQAQKLGLHVTPSNVDQVSTPPAAKKSRI

SEQ ID NO: 10489 - protein, 1524 aa, Homo sapiens
MPLLHRKPFVRQKPPADLRPDEEVFYCKVTNEIFRHYDDFFERTILCNSLVWSCAVTGRPGLTYQEALESEKKARQNLQSFPEPLIIPVLYLTSLTHRSRLHEICDDIFAYVKDRYFVEETVEVIRNNGARLQCRILEVLPPSHQNGFANGHVNSVDGETIIISDSDDSETQSCSFQNGKKKDAIDPLLFKYKVQPTKKELHESAIVKATQISRRKHLFSRDKLKLFLKQHCEPQDGVIKIKASSLSTYKIAEQDFSYFFPDDPPTFIFSPANRRRGRPPKRIHISQEDNVANKQTLASYRSKATKERDKLLKQEEMKSLAFEKAKLKREKADALEAKKKEKEDKEKKREELKKIVEEERLKKKEEKERLKVEREKEREKLREEKRKYVEYLKQWSKPREDMECDDLKELPEPTPVKTRLPPEIFGDALMVLEFLNAFGELFDLQDEFPDGVTLEVLEEALVGNDSEGPLCELLFFFLTAIFQAIAEEEEEVAKEQLTDADTKGCSLKSLDLDSCTLSEILRLHILASGADVTSANAKYRYQKRGGFDATDDACMELRLSNPSLVKKLSSTSVYDLTPGEKMKILHALCGKLLTLVSTRDFIEDYVDILRQAKQEFRELKAEQHRKEREEAAARIRKRKEEKLKEQEQKMKEKQEKLKEDEQRNSTADISIGEEEREDFDTSIESKDTEQKELDQDMVTEDEDDPGSHKRGRRGKRGQNGFKEFTRQEQINCVTREPLTADEEEALKQEHQRKEKELLEKIQSAIACTNIFPLGRDRMYRRYWIFPSIPGLFIEEDYSGLTEDMLLPRPSSFQNNVQSQDPQVSTKTGEPLMSESTSNIDQGPRDHSVQLPKPVHKPNRWCFYSSCEQLDQLIEALNSRGHRESALKETLLQEKSRICAQLARFSEEKFHFSDKPQPDSKPTYSRGRSSNAYDPSQMCAEKQLELRLRDFLLDIEDRIYQGTLGAIKVTDRHIWRSALESGRYELLSEENKENGIIKTVNEDVEEMEIDEQTKVIVKDRLLGIKTETPSTVSTNASTPQSVSSVVHYLAMALFQIEQGIERRFLKAPLDASDSGRSYKTVLDRWRESLLSSASLSQVFLHLSTLDRSVIWSKSILNARCKICRKKGDAENMVLCDGCDRGHHTYCVRPKLKTVPEGDWFCPECRPKQRSRRLSSRQRPSLESDEDVEDSMGGEDDEVDGDEEEGQSEEEEYEVEQDEDDSQEEEEVSLPKRGRPQVRLPVKTRGKLSSSFSSRGQQQEPGRYPSRSQQSTPKTTVSSKTGRSLRKINSAPPTETKSLRIASRSTRHSHGPLQADVFVELLSPRRKRRGRKSANNTPENSPNFPNFRVIATKSSEQSRSVNIASKLSLQESESKRRCRKRQSPEPSPVTLGRRSSGRQGGVHELSAFEQLVVELVRHDDSWPFLKLVSKIQVPDYYDIIKKPIALNIIREKVNKCEYKLASEFIDDIELMFSNCFEYNPRNTSEAKAGTRLQAFFHIQAQKLGLHVTPSNVDQVSTPPAAKKSRI

SEQ ID NO: 10490 - protein, 336 aa, Homo sapiens
MAASLRLLGAASGLRYWSRRLRPAAGSFAAVCSRSVASKTPVGFIGLGNMGNPMAKNLMKHGYPLIIYDVFPDACKEFQDAGEQVVSSPADVAEKADRIITMLPTSINAIEAYSGANGILKKVKKGSLLIDSSTIDPAVSKELAKEVEKMGAVFMDAPVSGGVGAARSGNLTFMVGGVEDEFAAAQELLGCMGSNVVYCGAVGTGQAAKICNNMLLAISMIGTAEAMNLGIRLGLDPKLLAKILNMSSGRCWSSDTYNPVPGVMDGVPSANNYQGGFGTTLMAKDLGLAQDSATSTKSPILLGSLAHQIYRMMCAKGYSKKDFSSVFQFLREEETF

SEQ ID NO: 10491 - protein, 666 aa, Homo sapiens
MTGTPKTQEGAKDLEVDMNKTEVTPRLWTTCRDGEVLLRLSKHGPGHETPMTIPEFFRESVNRFGTYPALASKNGKKWEILNFNQYYEACRKAAKSLIKLGLERFHGVGILGFNSAEWFITAVGAILAGGLCVGIYATNSAEVCQYVITHAKVNILLVENDQQLQKILSIPQSSLEPLKAIIQYRLPMKKNNNLYSWDDFMELGRSIPDTQLEQVIESQKANQCAVLIYTSGTTGIPKGVMLSHDNITWIAGAVTKDFKLTDKHETVVSYLPLSHIAAQMMDIWVPIKIGALTYFAQADALKGTLVSTLKEVKPTVFIGVPQIWEKIHEMVKKNSAKSMGLKKKAFVWARNIGFKVNSKKMLGKYNTPVSYRMAKTLVFSKVKTSLGLDHCHSFISGTAPLNQETAEFFLSLDIPIGELYGLSESSGPHTISNQNNYRLLSCGKILTGCKNMLFQQNKDGIGEICLWGRHIFMGYLESETETTEAIDDEGWLHSGDLGQLDGLGFLYVTGHIKEILITAGGENVPPIPVETLVKKKIPIISNAMLVGDKLKFLSMLLTLKCEMNQMSGEPLDKLNFEAINFCRGLGSQASTVTEIVKQQDPLVYKAIQQGINAVNQEAMNNAQRIEKWVILEKDFSIYGGELGPMMKLKRHFVAQKYKKQIDHMYH

SEQ ID NO: 10492 - protein, 616 aa, Homo sapiens
MTIPEFFRESVNRFGTYPALASKNGKKWEILNFNQYYEACRKAAKSLIKLGLERFHGVGILGFNSAEWFITAVGAILAGGLCVGIYATNSAEVCQYVITHAKVNILLVENDQQLQKILSIPQSSLEPLKAIIQYRLPMKKNNNLYSWDDFMELGRSIPDTQLEQVIESQKANQCAVLIYTSGTTGIPKGVMLSHDNITWIAGAVTKDFKLTDKHETVVSYLPLSHIAAQMMDIWVPIKIGALTYFAQADALKGTLVSTLKEVKPTVFIGVPQIWEKIHEMVKKNSAKSMGLKKKAFVWARNIGFKVNSKKMLGKYNTPVSYRMAKTLVFSKVKTSLGLDHCHSFISGTAPLNQETAEFFLSLDIPIGELYGLSESSGPHTISNQNNYRLLSCGKILTGCKNMLFQQNKDGIGEICLWGRHIFMGYLESETETTEAIDDEGWLHSGDLGQLDGLGFLYVTGHIKEILITAGGENVPPIPVETLVKKKIPIISNAMLVGDKLKFLSMLLTLKCEMNQMSGEPLDKLNFEAINFCRGLGSQASTVTEIVKQQDPLVYKAIQQGINAVNQEAMNNAQRIEKWVILEKDFSIYGGELGPMMKLKRHFVAQKYKKQIDHMYH

SEQ ID NO: 10493 - protein, 479 aa, Homo sapiens
MKKNNNLYSWDDFMELGRSIPDTQLEQVIESQKANQCAVLIYTSGTTGIPKGVMLSHDNITWIAGAVTKDFKLTDKHETVVSYLPLSHIAAQMMDIWVPIKIGALTYFAQADALKGTLVSTLKEVKPTVFIGVPQIWEKIHEMVKKNSAKSMGLKKKAFVWARNIGFKVNSKKMLGKYNTPVSYRMAKTLVFSKVKTSLGLDHCHSFISGTAPLNQETAEFFLSLDIPIGELYGLSESSGPHTISNQNNYRLLSCGKILTGCKNMLFQQNKDGIGEICLWGRHIFMGYLESETETTEAIDDEGWLHSGDLGQLDGLGFLYVTGHIKEILITAGGENVPPIPVETLVKKKIPIISNAMLVGDKLKFLSMLLTLKCEMNQMSGEPLDKLNFEAINFCRGLGSQASTVTEIVKQQDPLVYKAIQQGINAVNQEAMNNAQRIEKWVILEKDFSIYGGELGPMMKLKRHFVAQKYKKQIDHMYH

SEQ ID NO: 10494 - protein, 466 aa, Homo sapiens
MELGRSIPDTQLEQVIESQKANQCAVLIYTSGTTGIPKGVMLSHDNITWIAGAVTKDFKLTDKHETVVSYLPLSHIAAQMMDIWVPIKIGALTYFAQADALKGTLVSTLKEVKPTVFIGVPQIWEKIHEMVKKNSAKSMGLKKKAFVWARNIGFKVNSKKMLGKYNTPVSYRMAKTLVFSKVKTSLGLDHCHSFISGTAPLNQETAEFFLSLDIPIGELYGLSESSGPHTISNQNNYRLLSCGKILTGCKNMLFQQNKDGIGEICLWGRHIFMGYLESETETTEAIDDEGWLHSGDLGQLDGLGFLYVTGHIKEILITAGGENVPPIPVETLVKKKIPIISNAMLVGDKLKFLSMLLTLKCEMNQMSGEPLDKLNFEAINFCRGLGSQASTVTEIVKQQDPLVYKAIQQGINAVNQEAMNNAQRIEKWVILEKDFSIYGGELGPMMKLKRHFVAQKYKKQIDHMYH

SEQ ID NO: 10495 - protein, 533 aa, Homo sapiens
MWLGRRALCALVLLLACASLGLLYASTRDAPGLRLPLAPWAPPQSPRRPELPDLAPEPRYAHIPVRIKEQVVGLLAWNNCSCESSGGGLPLPFQKQVRAIDLTKAFDPAELRAASATREQEFQAFLSRSQSPADQLLIAPANSPLQYPLQGVEVQPLRSILVPGLSLQAASGQEVYQVNLTASLGTWDVAGEVTGVTLTGEGQADLTLVSPGLDQLNRQLQLVTYSSRSYQTNTADTVRFSTEGHEAAFTIRIRHPPNPRLYPPGSLPQGAQYNISALVTIATKTFLRYDRLRALITSIRRFYPTVTVVIADDSDKPERVSGPYVEHYLMPFGKGWFAGRNLAVSQVTTKYVLWVDDDFVFTARTRLERLVDVLERTPLDLVGGAVREISGFATTYRQLLSVEPGAPGLGNCLRQRRGFHHELVGFPGCVVTDGVVNFFLARTDKVREVGFDPRLSRVAHLEFFLDGLGSLRVGSCSDVVVDHASKLKLPWTSRDAGAETYARYRYPGSLDESQMAKHRLLFFKHRLQCMTSQ

SEQ ID NO: 10496 - protein, 478 aa, Homo sapiens
MWLGRRALCALVLLLACASLGLLYASTRDAPGLRLPLAPWAPPQSPRRPELPDLAPEPRYAHIPVRIKEQVVGSQSPADQLLIAPANSPLQYPLQGVEVQPLRSILVPGLSLQAASGQEVYQVNLTASLGTWDVAGEVTGVTLTGEGQADLTLVSPGLDQLNRQLQLVTYSSRSYQTNTADTVRFSTEGHEAAFTIRIRHPPNPRLYPPGSLPQGAQYNISALVTIATKTFLRYDRLRALITSIRRFYPTVTVVIADDSDKPERVSGPYVEHYLMPFGKGWFAGRNLAVSQVTTKYVLWVDDDFVFTARTRLERLVDVLERTPLDLVGGAVREISGFATTYRQLLSVEPGAPGLGNCLRQRRGFHHELVGFPGCVVTDGVVNFFLARTDKVREVGFDPRLSRVAHLEFFLDGLGSLRVGSCSDVVVDHASKLKLPWTSRDAGAETYARYRYPGSLDESQMAKHRLLFFKHRLQCMTSQ

SEQ ID NO: 10497 - protein, 328 aa, Homo sapiens
MWLGRRALCALVLLLACASLGLLYASTRDAPGLRLPLAPWAPPQSPRRPELPDLAPEPRYAHIPVRIKEQVVGLLAWNNCSCESSGGGLPLPFQKQVRAIDLTKAFDPAELRAASATREQEFQAFLSRSQSPADQLLIAPANSPLQYPLQGVEVQPLRSILVPGLSLQAASGQEVYQVNLTASLGTWDVAGEVTGVTLTGEGQADLTLVSPGLDQLNRQLQLVTYSSRSYQTNTADTGARPGWRDGQAGQTEKNQKGWSGQMAEGMGGIWAMARAVQPHNGCFNWTSRARGRKGAFVHLGLEQARGKPEPWVCLPFRPTVGGPRKRLV

SEQ ID NO: 10498 - protein, 353 aa, Homo sapiens
MSKPPDLLLRLLRGAPRQRVCTLFIIGFKFTFFVSIMIYWHVVGEPKEKGQLYNLPAEIPCPTLTPPTPPSHGPTPGNIFFLETSDRTNPNFLFMCSVESAARTHPESHVLVLMKGLPGGNASLPRHLGISLLSCFPNVQMLPLDLRELFRDTPLADWYAAVQGRWEPYLLPVLSDASRIALMWKFGGIYLDTDFIVLKNLRNLTNVLGTQSRYVLNGAFLAFERRHEFMALCMRDFVDHYNGWIWGHQGPQLLTRVFKKWCSIRSLAESRACRGVTTLPPEAFYPIPWQDWKKYFEDINPEELPRLLSATYAVHVWNKKSQGTRFEATSRALLAQLHARYCPTTHEAMKMYL

SEQ ID NO: 10499 - protein, 673 aa, Homo sapiens
MAGKAAEERGLPKGATPQDTSGLQDRLFSSESDNSLYFTYSGQPNTLEVRDLNYQVDLASQVPWFEQLAQFKMPWTSPSCQNSCELGIQNLSFKVRSGQMLAIIGSSGCGRASLLDVITGRGHGGKIKSGQIWINGQPSSPQLVRKCVAHVRQHNQLLPNLTVRETLAFIAQMRLPRTFSQAQRDKRVEDVIAELRLRQCADTRVGNMYVRGLSGGERRRVSIGVQLLWNPGILILDEPTSGLDSFTAHNLVKTLSRLAKGNRLVLISLHQPRSDIFRLFDLVLLMTSGTPIYLGAAQHMVQYFTAIGYPCPRYSNPADFYVDLTSIDRRSREQELATREKAQSLAALFLEKVRDLDDFLWKAETKDLDEDTCVESSVTPLDTNCLPSPTKMPGAVQQFTTLIRRQISNDFRDLPTLLIHGAEACLMSMTIGFLYFGHGSIQLSFMDTAALLFMIGALIPFNVILDVISKCYSERAMLYYELEDGLYTTGPYFFAKILGELPEHCAYIIIYGMPTYWLANLRPGLQPFLLHFLLVWLVVFCCRIMALAAAALLPTFHMASFFSNALYNSFYLAGGFMINLSSLWTVPAWISKVSFLRWCFEGLMKIQFSRRTYKMPLGNLTIAVSGDKILSVMELDSYPLYAIYLIVIGLSGGFMVLYYVSLRFIKQKPSQDW

SEQ ID NO: 10500 - protein, 672 aa, Homo sapiens
MAGKAAEERGLPKGATPQDTSGLQDRLFSSESDNSLYFTYSGQPNTLEVRDLNYQVDLASQVPWFEQLAQFKMPWTSPSCQNSCELGIQNLSFKVRSGQMLAIIGSSGCGRASLLDVITGRGHGGKIKSGQIWINGQPSSPQLVRKCVAHVRQHNQLLPNLTVRETLAFIAQMRLPRTFSQAQRDKRVEDVIAELRLRQCADTRVGNMYVRGLSGGERRRVSIGVQLLWNPGILILDEPTSGLDSFTAHNLVKTLSRLAKGNRLVLISLHQPRSDIFRLFDLVLLMTSGTPIYLGAAQHMVQYFTAIGYPCPRYSNPADFYVDLTSIDRRSREQELATREKAQSLAALFLEKVRDLDDFLWKAETKDLDEDTCVESVTPLDTNCLPSPTKMPGAVQQFTTLIRRQISNDFRDLPTLLIHGAEACLMSMTIGFLYFGHGSIQLSFMDTAALLFMIGALIPFNVILDVISKCYSERAMLYYELEDGLYTTGPYFFAKILGELPEHCAYIIIYGMPTYWLANLRPGLQPFLLHFLLVWLVVFCCRIMALAAAALLPTFHMASFFSNALYNSFYLAGGFMINLSSLWTVPAWISKVSFLRWCFEGLMKIQFSRRTYKMPLGNLTIAVSGDKILSVMELDSYPLYAIYLIVIGLSGGFMVLYYVSLRFIKQKPSQDW

SEQ ID NO: 10501 - protein, 458 aa, Homo sapiens
MLPDFMLVLIVLGIPSSATTGFNSIAENEDALLRHLFQGYQKWVRPVLHSNDTIKVYFGLKISQLVDVDEKNQLMTTNVWLKQEWTDHKLRWNPDDYGGIHSIKVPSESLWLPDIVLFENADGRFEGSLMTKVIVKSNGTVVWTPPASYKSSCTMDVTFFPFDRQNCSMKFGSWTYDGTMVDLILINENVDRKDFFDNGEWEILNAKGMKGNRRDGVYSYPFITYSFVLRRLPLFYTLFLIIPCLGLSFLTVLVFYLPSDEGEKLSLSTSVLVSLTVFLLVIEEIIPSSSKVIPLIGEYLLFIMIFVTLSIIVTVFVINVHHRSSSTYHPMAPWVKRLFLQKLPKLLCMKDHVDRYSSPEKEESQPVVKGKVLEKKKQKQLSDGEKVLVAFLEKAADSIRYISRHVKKEHFISQVVQDWKFVAQVLDRIFLWLFLIVSVTGSVLIFTPALKMWLHSYH

SEQ ID NO: 10502 - protein, 498 aa, Homo sapiens
MRRAPSLVLFFLVALCGRGNCRVANAEEKLMDDLLNKTRYNNLIRPATSSSQLISIKLQLSLAQLISVNEREQIMTTNVWLKQEWTDYRLTWNSSRYEGVNILRIPAKRIWLPDIVLYNNADGTYEVSVYTNLIVRSNGSVLWLPPAIYKSACKIEVKYFPFDQQNCTLKFRSWTYDHTEIDMVLMTPTASMDDFTPSGEWDIVALPGRRTVNPQDPSYVDVTYDFIIKRKPLFYTINLIIPCVLTTLLAILVFYLPSDCGEKMTLCISVLLALTFFLLLISKIVPPTSLDVPLIGKYLMFTMVLVTFSIVTSVCVLNVHHRSPSTHTMAPWVKRCFLHKLPTFLFMKRPGPDSSPARAFPPSKSCVTKPEATATSTSPSNFYGNSMYFVNPASAASKSPAGSTPVAIPRDFWLRSSGRFRQDVQEALEGVSFIAQHMKNDDEDQSVVEDWKYVAMVVDRLFLWVFMFVCVLGTVGLFLPPLFQTHAASEGPYAAQRD

SEQ ID NO: 10503 - protein, 231 aa, Homo sapiens
MRRAPSLVLFFLVALCGRGNCRVANAEEKLMDDLLNKTRYNNLIRPATSSSQLISIKLQLSLAQLISVNEREQIMTTNVWLKQEWTDYRLTWNSSRYEGVNILRIPAKRIWLPDIVLYNKSLRTGSTWLWWWTGCSCGCSCLCASWALWGSSYRPSSRPMQLLRGPTLPSVTEGPLGCGVRGCEWPGGHFAASFWVVADEALSKYVSIGHQPHQTSHSRGTGKDGGLGCPL

SEQ ID NO: 10504 - protein, 415 aa, Homo sapiens
MSERRVVVDLPTSASSSMPLQRRRASFRGPRSSSSLESPPASRTNAMSGLVRAPGVYVGTAPSGCIGGLGARVTRRALGISSVFLQGLRSSGLATVPAPGLERDHGAVEDLGGCLVEYMAKVHALEQVSQELETQLRMHLESKATRSGNWGALRASWASSCQQVGEAVLENARLMLQTETIQAGADDFKERYENEQPFRKAAEEEINSLYKVIDEANLTKMDLESQIESLKEELGSLSRNYEEDVKLLHKQLAGCELEQMDAPIGTGLDDILETIRIQWERDVEKNRVEAGALLQAKQQAEVAHMSQTQEEKLAAALRVELHNTSCQVQSLQAETESLRALKRGLENTLHDAKHWHDMELQNLGAVVGRLEAELREIRAEAEQQQQERAHLLARKCQLQKDVASYHALLDREESG

SEQ ID NO: 10505 - protein, 372 aa, Homo sapiens
MNHCQLPVVIDNGSGMIKAGVAGCREPQFIYPNIIGRAKGQSRAAQGGLELCVGDQAQDWRSSLFISYPVERGLITSWEDMEIMWKHIYDYNLKLKPCDGPVLITEPALNPLANRQQITEMFFEHLGVPAFYMSIQAVLALFAAGFTTGLVLNSGAGVTQSVPIFEGYCLPHGVQQLDLAGLDLTNYLMVLMKNHGIMLLSASDRKIVEDIKESFCYVAMNYEEEMAKKPDCLEKVYQLPDGKVIQLHDQLFSCPEALFSPCHMNLEAPGIDKICFSSIMKCDTGLRNSFFSNIILAGGSTSFPGLDKRLVKDIAKVAPANTAVQVIAPPERKISVWMGGSILASLSAFQDMWITAAEFKEVGPNIVHQRCF

SEQ ID NO: 10506 - protein, 359 aa, Homo sapiens [sequence omitted]

SEQ ID NO: 10507 - protein, 539 aa, Homo sapiens
MWRLPRALCVHAAKTSKLSGPWSRPAAFMSTLLINQPQYAWLKELGLREENEGVYNGSWGGRGEVITTYCPANNEPIARVRQASVADYEETVKKAREAWKIWADIPAPKRGEIVRQIGDALREKIQVLGSLVSLEMGKILVEGVGEVQEYVDICDYAVGLSRMIGGPILPSERSGHALIEQWNPVGLVGIITAFNFPVAVYGWNNAIAMICGNVCLWKGAPTTSLISVAVTKIIAKVLEDNKLPGAICSLTCGGADIGTAMAKDERVNLLSFTGSTQVGKQVGLMVQERFGRSLLELGGNNAIIAFEDADLSLVVPSALFAAVGTAGQRCTTARRLFIHESIHDEVVNRLKKAYAQIRVGNPWDPNVLYGPLHTKQAVSMFLGAVEEAKKEGGTVVYGGKVMDRPGNYVEPTIVTGLGHDASIAHTETFAPILYVFKFKNEEEVFAWNNEVKQGLSSSIFTKDLGRIFRWLGPKGSDCGIVNVNIPTSGAEIGGAFGGEKHTGGGRESGSDAWKQYMRRSTCTINYSKDLPLAQGIKFQ

SEQ ID NO: 10508 - protein, 511 aa, Homo sapiens
MSTLLINQPQYAWLKELGLREENEGVYNGSWGGRGEVITTYCPANNEPIARVRQASVADYEETVKKAREAWKIWADIPAPKRGEIVRQIGDALREKIQVLGSLVSLEMGKILVEGVGEVQEYVDICDYAVGLSRMIGGPILPSERSGHALIEQWNPVGLVGIITAFNFPVAVYGWNNAIAMICGNVCLWKGAPTTSLISVAVTKIIAKVLEDNKLPGAICSLTCGGADIGTAMAKDERVNLLSFTGSTQVGKQVGLMVQERFGRSLLELGGNNAIIAFEDADLSLVVPSALFAAVGTAGQRCTTARRLFIHESIHDEVVNRLKKAYAQIRVGNPWDPNVLYGPLHTKQAVSMFLGAVEEAKKEGGTVVYGGKVMDRPGNYVEPTIVTGLGHDASIAHTETFAPILYVFKFKNEEEVFAWNNEVKQGLSSSIFTKDLGRIFRWLGPKGSDCGIVNVNIPTSGAEIGGAFGGEKHTGGGRESGSDAWKQYMRRSTCTINYSKDLPLAQGIKFQ

SEQ ID NO: 10509 - protein, 475 aa, Homo sapiens
MWRLPRALCVHAAKTSKLSGPWSRPAAFMSTLLINQPQYAWLKELGLREENEGVYNGSWGGRGEVITTYCPANNEPIARVRQASVADYEETVKKAREAWKIWADIPAPKRGEIVRQIGDALREKIQVLGSLVSLEMGKILVEGVGEVQEYVDICDYAVGLSRMIGGPILPSERSGHALIEQWNPVGLVGIITAFNFPVAVYGWNNAIAMICGNVCLWKGAPTTSLISVAVTKIIAKVLEDNKLPGAICSLTCGGADIGTAMAKDERVNLLSFTGSTQVGKQVGLMVQERFGRSLLELGGNNAIIAFEDADLSLVVPSALFAAVGTAGQRCTTARRLVMDRPGNYVEPTIVTGLGHDASIAHTETFAPILYVFKFKNEEEVFAWNNEVKQGLSSSIFTKDLGRIFRWLGPKGSDCGIVNVNIPTSGAEIGGAFGGEKHTGGGRESGSDAWKQYMRRSTCTINYSKDLPLAQGIKFQ

SEQ ID NO: 10510 - protein, 105 aa, Homo sapiens
MSLKSWHPQSKTKRVGASEGNPQWGSGSMEAPLLSSFLPPLASEAELTGNTWFLHRCSCILNLEESMDSDWGAWWGVSLPRRAPFLIYGSDGPWCTQAGFPGWGH

SEQ ID NO: 10511 - protein, 2639 aa, Homo sapiens
MDGRDFAPPPHLLSERGSLGHRSAAAAARLAPAGPAAQPPAHFQPGKYFPSPLPMASHTASSRLMGSSPASSFMGSFLTSSLGSAASTHPSGPSSSPPEQAYRGSHPTTSQIWFSHSHEAPGYPRFSGSLASTFLPVSHLDHHGNSNVLYGQHRFYGTQKDNFYLRNLPPQPTLLPANHNFPSVARAAPAHPMGSCSRDRDRGEAGSLQKGPKDFDRFLVGKELGREKAGKAAEGKERPAAEEDGGKERHKLVLPVPADGHCREGGPAPRGACEGRPKHLTSCLLNTKVLNGEMGRAALASCAGGMLGRPGTGVVTSGRCAKEAAGPPEPGPAFSECLERRQMLHHTASYAGPPPPLSTAAGSFPCLQLHGGPDGLCPLQDKAPRDLKASGPTFVPSVGHLADKGRPFQAAEACAVAGEGKDRHLEGTMAPDHAAPYGVSYAHLKAEGKGERRPGGFEAALNPRLKGLDYLSSAGPEASFPGLPKSGLDKSGYFELPTSSQDCARPGHQDPLGGKAPQACCTLDKTVGKEAPAGPPGAQKVARIRHQQHLMAAEVEQGGIGAEAKRKSLELASLGYSGPHLPPWGVQAGQGTAMAISEERKAGAYLDPFGSGLQQAALLPQELPAPPDEVSAMKNLLKYSSQALVVGQKAPLVGLGGLKASCIQQEAKFLSSKGPGQSERPDCARSREHDTTHGDGEVRQPPVGIAVALARQKDTVSRSEAAYGTNTARQGRAAPAFKGGGGPRSTHALDLEAEEERTRLCDDRLGLASRELLLQDSKDRVEFARIHPPSSCPGDLAPHLMMQSGQLGGDPAPHTHPHPPWLPRTRSPSLWMGGHSYGLGHPALHQNLPPGFPASVAGPVPSVFPLPQDAPTQLVILPSEPTPHSAPHALADVMDQASLWPPMYGGRGPASHMQHPGQLPVYSRPQLLRQQELYALQQQRAAQFQRKPEDQHLDLEEPAQEKAPKSTHKPVALTPTAPGAPSPAAGPTKLPPCCHPPDPKPPASSPTPPPRPSAPCTLNVCPASSPGPGSRVRSAEEKNGEGQQSTADIITSEPVARAHSVAHAGLEFLASNDPSTSASQSFGITDLPPGYLRPMAGLGFSLPSDVHSSNLEDPETMQTTAPGAQPEPTRTFLPGEPPPCSPRSLEEPGLLSGAREATQDLAATPYPTERGPQGKAADPSPLEGLQELQCAALLEAGGPEATGQAHSTQGGAREERSREEGEQGPSSGASSQVLEQRAGSPGALEDEGEQPAPEEDELEEDELGQQSMEDSEEDCGGAPDNSHPPRALPGLDALVAATINLGDLPSDSPPDPQPPAASGPPSTVPLPHSSGIHGIALLSELADLAIQRQRSERTVPEEEEDVLAFNLQHLATLATAWSLVEAAGLDSSTAPAQPPTANPCSGPRLTPRMQILQRKDTWTPKTKPVCPLKAAIDRLDTQEVGMRVRLAELQRRYKEKQRELARLQRKHDHERDESSRSPARRGPGRPRKRKHSSSLPAPRPTGPLPRSDGKKVKAVRTSLGLLCAELRGGSGGEPAKKRSKLERSVYAGLQTASVEKAQCKKSSCQGGLAPSVAHRVAQLKPKVKSKGLPTGLSSFQQKEATPGGRIREKLSRAKSAKVSGATRHPQPKGHGSRETPRCPAQPSVAASQEAGSGYDSEDCEGLLGTEAPPREAGLLLHTGASVAVLGPSPSSVVKMEANQKAKKKKERQGLLGACRLSSPESEVKIKRRSVKAKVGTTLERAPGQRPPGALGKKKAKGKAKGSLRAEPGATPSRDALFNPSRAFACREEGSQLASERLKRATRKGTVLQPVLRRKNGALSITLATRNAKAILGKGRKLSKVKHKAGKQGKGRAVSRLLESFAVEEDFEFDDNSSFSEEEEDEEEEEEDSGPLSAEQSAALARSCAIHKEDLRDGLPVLIPKEDSLLYAGSVRTLQPPDIYSIVIEGERGNRQRIYSLEQLLQEAVLDVRPQSSRYLPPGTRVCAYWSQKSRCLYPGNVVRGASGDEDEDLDSVVVEFDDGDTGHIAVSNVRLLPPDFKIQCTEPSPALLVSSSCRRTKKVSSEAPPPSEAATPSLSPKAQDGPEALKTPGKKSISKDKAGKAELLTSGAKSPTGASDHFLGRRGSPLLSWSAVAQTKRKAVAAASKGPGVLQNLFQLNGSSKKLRAREALFPVHSVATPIFGNGFRADSFSSLASSYAPFVGGTGPGLPRGAHKLLRAKKAERVEAEKGGRRRAGGEFLVKLDHEGVTSPKNKTCKALLMGDKDFSPKLGRPLPSPSYVHPALVGKDKKGRAPIPPLPMGLALRKYAGQAEFPLPYDSDCHSSFSDEDEDGPGLAAGVPSRFLARLSVSSSSSGSSTSSSSGSVSTSSLCSSDNEDSSYSSDDEDPALLLQTCLTHPVPTLLAQPEALRSKGSGPHAHAQRCFLSRATVAGTGAGSGPSSSSKSKLKRKEALSFSKAKELSRRQRPPSVENRPKISAFLPARQLWKWSGNPTQRRGMKGKARKLFYKAIVRGEETLRVGDCAVFLSAGRPNLPYIGRIESMWESWGSNMVVKVKWFYHPEETKLGKRQCDGKNALYQSCHEDENDVQTISHKCQVVAREQYEQMARSRKCQDRQDLYYLAGTYDPTTGRLVTADGVPILC

SEQ ID NO: 10512 - protein, 1341 aa, Homo sapiens
MWRRKHPRTSGGTRGVLSGNRGVEYGSGRGHLGTFEGRWRKLPKMPEAVGTDPSTSRKMAELEEVTLDGKPLQALRVTDLKAALEQRGLAKSGQKSALVKRLKGALMLENLQKHSTPHAAFQPNSQIGEEMSQNSFIKQYLEKQQELLRQRLEREAREAAELEEASAESEDEMIHPEGVASLLPPDFQSSLERPELELSRHSPRKSSSISEEKGDSDDEKPRKGERRSSRVRQARAAKLSEGSQPAEEEEDQETPSRNLRVRADRNLKTEEEEEEEEEEEEDDEEEEGDDEGQKSREAPILKEFKEEGEEIPRVKPEEMMDERPKTRSQEQEVLERGGRFTRSQEEARKSHLARQQQEKEMKTTSPLEEEEREIKSSQGLKEKSKSPSPPRLTEDRKKASLVALPEQTASEEETPPPLLTKEASSPPPHPQLHSEEEIEPMEGPAPAVLIQLSPPNTDADTRELLVSQHTVQLVGGLSPLSSPSDTKAESPAEKVPEESVLPLVQKSTLADYSAQKDLEPESDRSAQPLPLKIEELALAKGITEECLKQPSLEQKEGRRASHTLLPSHRLKQSADSSSSRSSSSSSSSSRSRSRSPDSSGSRSHSPLRSKQRDVAQARTHANPRGRPKMGSRSTSESRSRSRSRSRSASSNSRKSLSPGVSRDSSTSYTETKDPSSGQEVATPPVPQLQVCEPKERTSTSSSSVQARRLSQPESAEKHVTQRLQPERGSPKKCEAEEAEPPAATQPQTSETQTSHLPESERIHHTVEEKEEVTMDTSENRPENDVPEPPMPIADQVSNDDRPEGSVEDEEKKESSLPKSFKRKISVVSATKGVPAGNSDTEGGQPGRKRRWGASTATTQKKPSISITTESLKSLIPDIKPLAGQEAVVDLHADDSRISEDETERNGDDGTHDKGLKICRTVTQVVPAEGQENGQREEEEEEKEPEAEPPVPPQVSVEVALPPPAEHEVKKVTLGDTLTRRSISQQKSGVSITIDDPVRTAQVPSPPRGKISNIVHISNLVRPFTLGQLKELLGRTGTLVEEAFWIDKIKSHCFVTYSTVEEAVATRTALHGVKWPQSNPKFLCADYAEQDELDYHRGLLVDRPSETKTEEQGIPRPLHPPPPPPVQPPQHPRAEQREQERAVREQWAEREREMERRERTRSEREWDRDKVREGPRSRSRSRDRRRKERAKSKEKKSEKKEKAQEEPPAKLLDDLFRKTKAAPCIYWLPLTDSQIVQKEAERAERAKEREKRRKEQEEEEQKEREKEAERERNRQLEREKRREHSRERDRERERERERDRGDRDRDRERDRERGRERDRRDTKRHSRSRSRSTPVRDRGGRR

SEQ ID NO: 10513 - protein, 614 aa, Homo sapiens
MSPADRCRSANTIEPATTSSLALFLLLQRDQSSRTRGLPEEKEEVTMDTSENRPENDVPEPPMPIADQVSNDDRPEGSVEDEEKKESSLPKSFKRKISVVSATKGVPAGNSDTEGGQPGRKRRWGASTATTQKKPSISITTESLKSLIPDIKPLAGQEAVVDLHADDSRISEDETERNGDDGTHDKGLKICRTVTQVVPAEGQENGQREEEEEEKEPEAEPPVPPQVSVEVALPPPAEHEVKKVTLGDTLTRRSISQQKSGVSITIDDPVRTAQVPSPPRGKISNIVHISNLVRPFTLGQLKELLGRTGTLVEEAFWIDKIKSHCFVTYSTVEEAVATRTALHGVKWPQSNPKFLCADYAEQDELDYHRGLLVDRPSETKTEEQGIPRPLHPPPPPPVQPPQHPRAEQREQERAVREQWAEREREMERRERTRSEREWDRDKVREGPRSRSRSRDRRRKERAKSKEKKSEKKEKAQEEPPAKLLDDLFRKTKAAPCIYWLPLTDSQIVQKEAERAERAKEREKRRKEQEEEEQKEREKEAERERNRQLEREKRREHSRERDRERERERERDRGDRDRDRERDRERGRERDRRDTKRHSRSRSRSTPVRDRGGRR

SEQ ID NO: 10514 - protein, 583 aa, Homo sapiens
MLSESKEGEEKEEVTMDTSENRPENDVPEPPMPIADQVSNDDRPEGSVEDEEKKESSLPKSFKRKISVVSATKGVPAGNSDTEGGQPGRKRRWGASTATTQKKPSISITTESLKSLIPDIKPLAGQEAVVDLHADDSRISEDETERNGDDGTHDKGLKICRTVTQVVPAEGQENGQREEEEEEKEPEAEPPVPPQVSVEVALPPPAEHEVKKVTLGDTLTRRSISQQKSGVSITIDDPVRTAQVPSPPRGKISNIVHISNLVRPFTLGQLKELLGRTGTLVEEAFWIDKIKSHCFVTYSTVEEAVATRTALHGVKWPQSNPKFLCADYAEQDELDYHRGLLVDRPSETKTEEQGIPRPLHPPPPPPVQPPQHPRAEQREQERAVREQWAEREREMERRERTRSEREWDRDKVREGPRSRSRSRDRRRKERAKSKEKKSEKKEKAQEEPPAKLLDDLFRKTKAAPCIYWLPLTDSQIVQKEAERAERAKEREKRRKEQEEEEQKEREKEAERERNRQLEREKRREHSRERDRERERERERDRGDRDRDRERDRERGRERDRRDTKRHSRSRSRSTPVRDRGGRR

SEQ ID NO: 10515 - protein, 1328 aa, Homo sapiens
MWRRKHPRTSGGTRGVLSGNRGVEYGSGRGHLGTFEGRWRKLPKMPEAVGTDPSTSRKMAELEEVTLDGKPLQALRVTDLKAALEQRGLAKSGQKSALVKRLKGALMLENLQKHSTPHAAFQPNSQIGEEMSQNSFIKQYLEKQQELLRQRLEREAREAAELEEASAESEDEMIHPEGVASLLPPDFQSSLERPELELSRHSPRKSSSISEEKGDSDDEKPRKGERRSSRVRQARAAKLSEGSQPAEEEEDQETPSRNLRVRADRNLKTEEEEEEEEEEEEDDEEEEGDDEGQKSREAPILKEFKEEGEEIPRVKPEEMMDERPKTRSQEQEVLERGGRFTRSQEEARKSHLARQQQEKEMKTTSPLEEEEREIKSSQGLKEKSKSPSPPRLTEDRKKASLVALPEQTASEEETPPPLLTKEASSPPPHPQLHSEEEIEPMEGPAPAVLIQLSPPNTDADTRELLVSQHTVQLVGGLSPLSSPSDTKAESPAEKVPEESVLPLVQKSTLADYSAQKDLEPESDRSAQPLPLKIEELALAKGITEECLKQPSLEQKEGRRASHTLLPSHRLKQSADSSSSRSSSSSSSSSRSRSRSPDSSGSRSHSPLRSKQRDVAQARTHANPRGRPKMGSRSTSESRSRSRSRSRSASSNSRKSLSPGVSRDSSTSYTETKDPSSGQEVATPPVPQLQVCEPKERTSTSSSSVQARRLSQPESAEKHVTQRLQPERGSPKKCEAEEAEPPAATQPQTSETQTSHLPESERIHHTVEEKEEVTMDTSENRPENDVPEPPMPIADQVSNDDRPEGSVEDEEKKESSLPKSFKRKISVVSTKGVPAGNSDTEGGQPGRKRRWGASTATTQKKPSISITTESLKEAVVDLHADDSRISEDETERNGDDGTHDKGLKICRTVTQVVPAEGQENGQREEEEEEKEPEAEPPVPPQVSVEVALPPPAEHEVKKVTLGDTLTRRSISQQKSGVSITIDDPVRTAQVPSPPRGKISNIVHISNLVRPFTLGQLKELLGRTGTLVEEAFWIDKIKSHCFVTYSTVEEAVATRTALHGVKWPQSNPKFLCADYAEQDELDYHRGLLVDRPSETKTEEQGIPRPLHPPPPPPVQPPQHPRAEQREQERAVREQWAEREREMERRERTRSEREWDRDKVREGPRSRSRSRDRRRKERAKSKEKKSEKKEKAQEEPPAKLLDDLFRKTKAAPCIYWLPLTDSQIVQKEAERAERAKEREKRRKEQEEEEQKEREKEAERERNRQLEREKRREHSRERDRERERERERDRGDRDRDRERDRERGRERDRRDTKRHSRSRSRSTPVRDRGGRR

SEQ ID NO: 10516 - protein, 259 aa, Homo sapiens
MGDAAADPPGPALPCEFLRPGCGAPLSPGAQLGRGAPTSAFPPPAAEAHPAARRGLRSPQLPSGAMSQNGAPGMQEESLQGSWVELHFSNNGNGGSVPASVSIYNGDMEKILLDAQHESGRSSSKSSHCDSPPRSQTPQDTNRASETDTHSIGEKNSSQSEEDDIERRKEVESILKKNSDWIWDWSSRPENIPPKEFLFKHPKRTATLSMRNTSVMKKGGIFSAEFLKVFLPSLLLSHLLAIGLGIYIGRRLTTSTSTF

SEQ ID NO: 10517 - protein, 372 aa, Homo sapiens
MGWSCLVTGAGGLLGQRIVRLLVEEKELKEIRALDKAFRPELREEFSKLQNRTKLTVLEGDILDEPFLKRACQDVSVVIHTACIIDVFGVTHRESIMNVNVKGTQLLLEACVQASVPVFIYTSSIEVAGPNSYKEIIQNGHEEEPLENTWPTPYPYSKKLAEKAVLAANGWNLKNGDTLYTCALRPTYIYGEGGPFLSASINEALNNNGILSSVGKFSTVNPVYVGNVAWAHILALRALRDPKKAPSVRGQFYYISDDTPHQSYDNLNYILSKEFGLRLDSRWSLPLTLMYWIGFLLEVVSFLLSPIYSYQPPFNRHTVTLSNSVFTFSYKKAQRDLAYKPLYSWEEAKQKTVEWVGSLVDRHKETLKSKTQ

SEQ ID NO: 10518 - protein, 222 aa, Homo sapiens
MGWSCLVTGAGGLLGQRIVRLLVEEKELKEIRALDKAFRPELREEFSKLQNRTKLTVLEGDILDEPFLKRACQDVSVVIHTACIIDVFGVTHRESIMNVNVKELQNKIKLTVLEGDILDEPFLKRACQDVSVVIHTACIIDVFGVTHRQSIMNVNVKGRVAWGGDKARWGNEDQKEGQEGKRSLSIEHLLCSGPSDFADHYQLGELKAAIFSFIDEKTRTEQ

SEQ ID NO: 10519 - protein, 246 aa, Homo sapiens
MTMDKSELVQKAKLAEQAERYDDMAAAMKAVTEQGHELSNEERNLLSVAYKNVVGARRSSWRVISSIEQKTERNEKKQQMGKEYREKIEAELQDICNDVLELLDKYLIPNATQPESKVFYLKMKGDYFRYLSEVASGDNKQTTVSNSQQAYQEAFEISKKEMQPTHPIRLGLALNFSVFYYEILNSPEKACSLAKTAFDEAIAELDTLNEESYKDSTLIMQLLRDNLTLWTSENQGDEGDAGEGEN

SEQ ID NO: 10520 - protein, 244 aa, Homo sapiens
MDKSELVQKAKLAEQAERYDDMAAAMKAVTEQGHELSNEERNLLSVAYKNVVGARRSSWRVISSIEQKTERNEKKQQMGKEYREKIEAELQDICNDVLELLDKYLIPNATQPESKVFYLKMKGDYFRYLSEVASGDNKQTTVSNSQQAYQEAFEISKKEMQPTHPIRLGLALNFSVFYYEILNSPEKACSLAKTAFDEAIAELDTLNEESYKDSTLIMQLLRDNLTLWTSENQGDEGDAGEGEN

SEQ ID NO: 10521 - protein, 255 aa, Homo sapiens
MDDREDLVYQAKLAEQAERYDEMVESMKKVAGMDVELTVEERNLLSVAYKNVIGARRASWRIISSIEQKEENKGGEDKLKMIREYRQMVETELKLICCDILDVLDKHLIPAANTGESKVFYYKMKGDYHRYLAEFATGNDRKEAAENSLVAYKAASDIAMTELPPTHPIRLGLALNFSVFYYEILNSPDRACRLAKAAFDDAIAELDTLSEESYKDSTLIMQLLRDNLTLWTSDMQGDGEEQNKEALQDVEDENQ

SEQ ID NO: 10522 - protein, 233 aa, Homo sapiens
MVESMKKVAGMDVELTVEERNLLSVAYKNVIGARRASWRIISSIEQKEENKGGEDKLKMIREYRQMVETELKLICCDILDVLDKHLIPAANTGESKVFYYKMKGDYHRYLAEFATGNDRKEAAENSLVAYKAASDIAMTELPPTHPIRLGLALNFSVFYYEILNSPDRACRLAKAAFDDAIAELDTLSEESYKDSTLIMQLLRDNLTLWTSDMQGDGEEQNKEALQDVEDENQ

SEQ ID NO: 10523 - protein, 369 aa, Homo sapiens
MADSAQAQKLVYLVTGGCGFLGEHVVRMLLQREPRLGELRVFDQHLGPWLEELKTGPVRVTAIQGDVTQAHEVAAAVAGAHVVIHTAGLVDVFGRASPKTIHEVNVQGTRNVIEACVQTGTRFLVYTSSMEVVGPNTKGHPFYRGNEDTPYEAVHRHPYPCSKALAEWLVLEANGRKVRGGLPLVTCALRPTGIYGEGHQIMRDFYRQGLRLGGWLFRAIPASVEHGRVYVGNVAWMHVLAARELEQRATLMGGQVYFCYDGSPYRSYEDFNMEFLGPCGLRLVGARPLLPYWLLVFLAALNALLQWLLRPLVLYAPLLNPYTLAVANTTFTVSTDKAQRHFGYEPLFSWEDSRTRTILWVQAATGSAQ

SEQ ID NO: 10524 - protein, 196 aa, Homo sapiens
MADSAQAQKLVYLVTGGCGFLGEHVVRMLLQREPRLGELRVFDQHLGPWLEELKTGPVRVTAIQGDVTQAHEVAAAVAGAHVVIHTAGLVDVFGRASPKTIHEVNVQGTRNVIEACVQTGTRFLVYTSSMEVVGPNTKGHPFYRGNEDTPYEAVHRHPYPCSKALAEWLVLEANGRKAMLPGCTCWQPGSWSSGQP

SEQ ID NO: 10525 - protein, 245 aa, Homo sapiens
MEKTELIQKAKLAEQAERYDDMATCMKAVTEQGAELSNEERNLLSVAYKNVVGGRRSAWRVISSIEQKTDTSDKKLQLIKDYREKVESELRSICTTVLELLDKYLIANATNPESKVFYLKMKGDYFRYLAEVACGDDRKQTIDNSQGAYQEAFDISKKEMQPTHPIRLGLALNFSVFYYEILNNPELACTLAKTAFDEAIAELDTLNEDSYKDSTLIMQLLRDNLTLWTSDSAGEECDAAEGAEN

SEQ ID NO: 10526 - protein, 275 aa, Homo sapiens [sequence omitted]

SEQ ID NO: 10527 - protein, 226 aa, Homo sapiens
MCLFRQYATCFNSGIYLIWTLLVVVGIGSVYFHATLSFLGQMLDELAVLWVLMCALAMWFPRRYLPKIFRNDRGRFKVVVSVLSAVTTCLAFVKPAINNISLMTLGVPCTALLIAELKRCDNMRVFKLGLFSGLWWTLALFCWISDRAFCELLSSFNFPYLHCMWHILICLAAYLGCVCFAYFDAASEIPEQGPVIKFWPNEKWAFIGVPYVSLLCANKKSSVKIT

SEQ ID NO: 10528 - protein, 140 aa, Homo sapiens
MCLFRQYATCFNSGIYLIWTLLVVVGIGSVYFHATLSFLGQMLDELAVLWVLMCALAMWFPRRYLPKIFRNDRGRFKVVVSVLSAVTTCLAFVKPAINNISLMTLGVPCTALLIAELKRHERNQRRRHRKGGQQGGGDKV

SEQ ID NO: 10529 - protein, 315 aa, Homo sapiens
MAAGVPCALVTSCSSVFSGDQLVQHILGTEDLIVEVTSNDAVRFYPWTIDNKYYSADINLCVVPNKFLVTAEIAESVQAFVVYFDSTQKSGLDSVSSWLPLAKAWLPEVMILVCDRVSEDGINRQKAQEWCIKHGFELVELSPEELPEEDDDFPESTGVKRIVQALNANVWSNVVMKNDRNQGFSLLNSLTGTNHSIGSADPCHPEQPHLPAADSTESLSDHRGGASNTTDAQVDSIVDPMLDLDIQELASLTTGGGDVENFERLFSKLKEMKDKAATLPHEQRKVHAEKVAKAFWMAIGGDRDEIEGLSSDEEH

SEQ ID NO: 10530 - protein, 206 aa, Homo sapiens
MILVCDRVSEDGINRQKAQEWCIKHGFELVELSPEELPEEDDDFPESTGVKRIVQALNANVWSNVVMKNDRNQGFSLLNSLTGTNHSIGSADPCHPEQPHLPAADSTESLSDHRGGASNTTDAQVDSIVDPMLDLDIQELASLTTGGGDVENFERLFSKLKEMKDKAATLPHEQRKVHAEKVAKAFWMAIGGDRDEIEGLSSDEEH

SEQ ID NO: 10531 - protein, 267 aa, Homo sapiens [sequence omitted]

SEQ ID NO: 10532 - protein, 134 aa, Homo sapiens
MAQSRLIGTSTSQVMYGMLVFTLVLRSIYIVTWVYPWLRGLGYTSLGIFLLGFLFWNIDNIFCESLRNFRKKVPPIIGITTQFHAWWHILTGLGSYLHILFSLYTRTLYLRYRPKVKFLFGIWPVILFEPLRKH

SEQ ID NO: 10533 - protein, 392 aa, Homo sapiens
MVLLSILRILFLCELVLFMEHRAQMAEGGQSSIALLAEAPTLPLIEELLEESPGEQPRKPRLLGHSLRYMLELYRRSADSHGHPRENRTIGATMVRLVKPLTNVARPHRGTWHIQILGFPLRPNRGLYQLVRATVVYRHHLQLTRFNLSCHVEPWVQKNPTNHFPSSEGDSSKPSLMSNAWKEMDITQLVQQRFWNNKGHRILRLRFMCQQQKDSGGLELWHGTSSLDIAFLLLYFNDTHKSIRKAKFLPRGMEEFMERESLLRRTRQADGISAEVTASSSKHSGPENNQCSLHPFQISFRQLGWDHWIIAPPFYTPNYCKGTCLRVLRDGLNSPNHAIIQNLINQLVDQSVPRPSCVPYKYVPISVLMIEANGSILYKEYEGMIAESCTCR

SEQ ID NO: 10534 - protein, 1161 aa, Homo sapiens
MKKFSRMPKSEGGSGGGAAGGGAGGAGAGAGCGSGGSSVGVRVFAVGRHQVTLEESLAEGGFSTVFLVRTHGGIRCALKRMYVNNMPDLNVCKREITIMKELSGHKNIVGYLDCAVNSISDNVWEVLILMEYCRAGQVVNQMNKKLQTGFTEPEVLQIFCDTCEAVARLHQCKTPIIHRDLKVENILLNDGGNYVLCDFGSATNKFLNPQKDGVNVVEEEIKKYTTLSYRAPEMINLYGGKPITTKADIWALGCLLYKLCFFTLPFGESQVAICDGNFTIPDNSRYSRNIHCLIRFMLEPDPEHRPDIFQVSYFAFKFAKKDCPVSNINNSSIPSALPEPMTASEAAARKSQIKARITDTIGPTETSIAPRQRPKANSATTATPSVLTIQSSATPVKVLAPGEFGNHRPKGALRPGNGPEILLGQGPPQQPPQQHRVLQQLQQGDWRLQQLHLQHRHPHQQQQQQQQQQQQQQQQQQQQQQQQQQQHHHHHHHHLLQDAYMQQYQHATQQQQMLQQQFLMHSVYQPQPSASQYPTMMPQYQQAFFQQQMLAQHQPSQQQASPEYLTSPQEFSPALVSYTSSLPAQVGTIMDSSYSANRSVADKEAIANFTNQKNISNPPDMSGWNPFGEDNFSKLTEEELLDREFDLLRSNRLEERASSDKNVDSLSAPHNHPPEDPFGSVPFISHSGSPEKKAEHSSINQENGTANPIKNGKTSPASKDQRTGKKTSVQGQVQKGNDESESDFESDPPSPKSSEEEEQDDEEVLQGEQGDFNDDDTEPENLGHRPLLMDSEDEEEEEKHSSDSDYEQAKAKYSDMSSVYRDRSGSGPTQDLNTILLTSAQLSSDVAVETPKQEFDVFGAVPFFAVRAQQPQQEKNEKNLPQHRFPAAGLEQEEFDVFTKAPFSKKVNVQECHAVGPEAHTIPGYPKSVDVFGSTPFQPFLTSTSKSESNEDLFGLVPFDEITGSQQQKVKQRSLQKLSSRQRRTKQDMSKSNGKRHHGTPTSTKKTLKPTYRTPERARRHKKVGRRDSQSSNEFLTISDSKENISVALTDGKDRGNVLQPEESLLDPFGAKPFHSPDLSWHPPHQGLSDIRADHNTVLPGRPRQNSLHGSFHSADVLKMDDFGAVPFTELVVQSITPHQSQQSQPVELDPFGAAPFPSKQ

SEQ ID NO: 10535 - protein, 662 aa, Homo sapiens
MKKFSRMPKSEGGSGGGAAGGGAGGAGAGAGCGSGGSSVGVRVFAVGRHQVTLEESLAEGGFSTVFLVRTHGGIRCALKRMYVNNMPDLNVCKREITIMKELSGHKNIVGYLDCAVNSISDNVWEVLILMEYCRAGQVVNQMNKKLQTGFTEPEVLQIFCDTCEAVARLHQCKTPIIHRDLKVENILLNDGGNYVLCDFGSATNKFLNPQKDGVNVVEEEIKKYTTLSYRAPEMINLYGGKPITTKADIWALGCLLYKLCFFTLPFGESQVAICDGNFTIPDNSRYSRNIHCLIRFMLEPDPEHRPDIFQVSYFAFKFAKKDCPVSNINNSSIPSALPEPMTASEAAARKSQIKARITDTIGPTETSIAPRQRPKANSATTATPSVLTIQSSATPVKVLAPGEFGNHRPKGALRPGNGPEILLGQGPPQQPPQQHRVLQQLQQGDWRLQQLHLQHRHPHQQQQQQQQQQQQQQQQQQQQQQQQQQQHHHHHHHHLLQDAYMQQYQHATQQQQMLQQQFLMHSVYQPQPSASQYPTMMPQYQQAFFQQQMLAQHQPSQQQASPEYLTSPQEFSPALVSYTSSLPAQVGTIMDSSYSANRSVADKEAIANFTNQKNISNPPDMSGWNPFGEDNFSKLTEEELLDREFDLLRSSKGHLKAYFASQ

SEQ ID NO: 10536 - protein, 677 aa, Homo sapiens
MKKFSRMPKSEGGSGGGAAGGGAGGAGAGAGCGSGGSSVGVRVFAVGRHQVTLEESLAEGGFSTVFLVRTHGGIRCALKRMYVNNMPDLNVCKREITIMKELSGHKNIVGYLDCAVNSISDNVWEVLILMEYCRAGQVVNQMNKKLQTGFTEPEVLQIFCDTCEAVARLHQCKTPIIHRDLKVENILLNDGGNYVLCDFGSATNKFLNPQKDGVNVVEEEIKKYTTLSYRAPEMINLYGGKPITTKADIWALGCLLYKLCFFTLPFGESQVAICDGNFTIPDNSRYSRNIHCLIRFMLEPDPEHRPDIFQVSYFAFKFAKKDCPVSNINKCCKQLLRHGALLTEILLFLQLFLNRMTASEAAARKSQIKARITDTIGPTETSIAPRQRPKANSATTATPSVLTIQSSATPVKVLAPGEFGNHRPKGALRPGNGPEILLGQGPPQQPPQQHRVLQQLQQGDWRLQQLHLQHRHPHQQQQQQQQQQQQQQQQQQQQQQQQQQQHHHHHHHHLLQDAYMQQYQHATQQQQMLQQQFLMHSVYQPQPSASQYPTMMPQYQQAFFQQQMLAQHQPSQQQASPEYLTSPQEFSPALVSYTSSLPAQVGTIMDSSYSANRSVADKEAIANFTNQKNISNPPDMSGWNPFGEDNFSKLTEEELLDREFDLLRSSKGHLKAYFASQ

SEQ ID NO: 10537 - protein, 450 aa, Homo sapiens
MGLRSHHLSLGLLLLFLLPAECLGAEGRLALKLFRDLFANYTSALRPVADTDQTLNVTLEVTLSQIIDMDERNQVLTLYLWIRQEWTDAYLRWDPNAYGGLDAIRIPSSLVWRPDIVLYNKADAQPPGSASTNVVLRHDGAVRWDAPAITRSSCRVDVAAFPFDAQHCGLTFGSWTHGGHQLDVRPRGAAASLADFVENVEWRVLGMPARRRVLTYGCCSEPYPDVTFTLLLRRRAAAYVCNLLLPCVLISLLAPLAFHLPADSGEKVSLGVTVLLALTVFQLLLAESMPPAESVPLIGKYYMATMTMVTFSTALTILIMNLHYCGPSVRPVPAWARALLLGHLARGLCVRERGEPCGQSRPPELSPSPQSPEGGAGPPAGPCHEPRCLCRQEALLHHVATIANTFRSHRAAQRCHEDWKRLARVMDRFFLAIFFSMALVMSLLVLVQAL

SEQ ID NO: 10538 - protein, 2177 aa, Homo sapiens
MEEILRKLQKEASGSKYKAIKESCTWALETLGGLDTIVKIPPHVLREKCLLPLQLALESKNVKLAQHALAGMQKLLSEERFVSMETDSDEKQLLNQILNAVKVTPSLNEDLQVEVMKVLLCITYTPTFDLNGSAVLKIAEVCIETYISSCHQRSINTAVRATLSQMLSDLTLQLRQRQENTIIENPDVPQDFGNQGSTVESLCDDVVSVLTVLCEKLQAAINDSQQLQLLYLECILSVLSSSSSSMHLHRRFTDLIWKNLCPALIVILGNPIHDKTITSAHTSSTSTSLESDSASPGVSDHGRGSGCSCTAPALSGPVARTIYYIAAELVRLVGSVDSMKPVLQSLYHRVLLYPPPQHRVEAIKIMKEILGSPQRLCDLAGPSSTESESRKRSISKRKSHLDLLKLIMDGMTEACIKGGIEACYAAVSCVCTLLGALDELSQGKGLSEGQVQLLLLRLEELKDGAEWSRDSMEINEADFRWQRRVLSSEHTPWESGNERSLDISISVTTDTGQTTLEGELGQTTPEDHSGNHKNSLKSPAIPEGKETLSKVLETEAVDQPDVVQRSHTVPYPDITNFLSVDCRTRSYGSRYSESNFSVDDQDLSRTEFDSCDQYSMAAEKDSGRSDVSDIGSDNCSLADEEQTPRDCLGHRSLRTAALSLKLLKNQEADQHSARLFIQSLEGLLPRLLSLSNVEEVDTALQNFASTFCSGMMHSPGFDGNSSLSFQMLMNADSLYTAAHCALLLNLKLSHGDYYRKRPTLAPGVMKDFMKQVQTSGVLMVFSQAWIEELYHQVLDRNMLGEAGYWGSPEDNSLPLITMLTDIDGLESSAIGGQLMASAATESPFAQSRRIDDSTVAGVAFARYILVGCWKNLIDTLSTPLTGRMAGSSKGLAFILGAEGIKEQNQKERDAICMSLDGLRKAARLSCALGVAANCASALAQMAAASCVQEEKEEREAQEPSDAITQVKLKVEQKLEQIGKVQGVWLHTAHVLCMEAILSVGLEMGSHNPDCWPHVFRVCEYVGTLEHNHFSDGASQPPLTISQPQKATGSAGLLGDPECEGSPPEHSPEQGRSLSTAPVVQPLSIQDLVREGSRGRASDFRGGSLMSGSSAAKVVLTLSTQADRLFEDATDKLNLMALGGFLYQLKKASQSQLFHSVTDTVDYSLAMPGEVKSTQDRKSALHLFRLGNAMLRIVRSKARPLLHVMRCWSLVAPHLVEAACHKERHVSQKAVSFIHDILTEVLTDWNEPPHFHFNEALFRPFERIMQLELCDEDVQDQVVTSIGELVEVCSTQIQSGWRPLFSALETVHGGNKSEMKEYLVGDYSMGKGQAPVFDVFEAFLNTDNIQVFANAATSYIMCLMKFVKGLGEVDCKEIGDCAPAPGAPSTDLCLPALDYLRRCSQLLAKIYKMPLKPIFLSGRLAGLPRRLQEQSASSEDGIESVLSDFDDDTGLIEVWIILLEQLTAAVSNCPRQHQPPTLDLLFELLRDVTKTPGPGFGIYAVVHLLLPVMSVWLRRSHKDHSYWDMASANFKHAIGLSCELVVEHIQSFLHSDIRYESMINTMLKDLFELLVACVAKPTETISRVGCSCIRYVLVTAGPVFTEEMWRLACCALQDAFSATLKPVKDLLGCFHSGTESFSGEGCQVRVAAPSSSPSAEAEYWRIRAMAQQVFMLDTQCSPKTPNNFDHAQSCQLIIELPPDEKPNGHTKKSVSFREIVVSLLSHQVLLQNLYDILLEEFVKGPSPGEEKTIQVPEAKLAGFLRYISMQNLAVIFDLLLDSYRTAREFDTSPGLKCLLKKVSGIGGAANLYRQSAMSFNIYFHALVCAVLTNQETITAEQVKKVLFEDDERSTDSSQQCSSEDEDIFEETAQVSPPRGKEKRQWRARMPLLSVQPVSNADWVWLVKRLHKLCMELCNNYIQMHLDLENCMEEPPIFKGDPFFILPSFQSESSTPSTGGFSGKETPSEDDRSQSREHMGESLSLKAGGGDLLLPPSPKVEKKDPSRKKEWWENAGNKIYTMAADKTISKLMTEYKKRKQQHNLSAFPKEVKVEKKGEPLGPRGQDSPLLQRPQHLMDQGQMRHSFSAGPELLRQDKRPRSGSTGSSLSVSVRDAEAQIQAWTNMVLTVLNQIQILPDQTFTALQPAVFPCISQLTCHVTDIRVRQAVREWLGRVGRVYDIIV

SEQ ID NO: 10539 - protein, 559 aa, Homo sapiens
MRRLSSWRKMATAEKQKHDGRVKIGHYILGDTLGVGTFGKVKVGKHELTGHKVAVKILNRQKIRSLDVVGKIRREIQNLKLFRHPHIIKLYQVISTPSDIFMVMEYVSGGELFDYICKNGRLDEKESRRLFQQILSGVDYCHRHMVVHRDLKPENVLLDAHMNAKIADFGLSNMMSDGEFLRTSCGSPNYAAPEVISGRLYAGPEVDIWSSGVILYALLCGTLPFDDDHVPTLFKKICDGIFYTPQYLNPSVISLLKHMLQVDPMKRATIKDIREHEWFKQDLPKYLFPEDPSYSSTMIDDEALKEVCEKFECSEEEVLSCLYNRNHQDPLAVAYHLIIDNRRIMNEAKDFYLATSPPDSFLDDHHLTRPHPERVPFLVAETPRARHTLDELNPQKSKHQGVRKAKWHLGIRSQSRPNDIMAEVCRAIKQLDYEWKVVNPYYLRVRRKNPVTSTYSKMSLQLYQVDSRTYLLDFRSIDDEITEAKSGTATPQRSGSVSNYRSCQRSDSDAEAQGKSSEVSLTSSVTSLDSSPVDLTPRPGSHTIEFFEMCANLIKILAQ

SEQ ID NO: 10540 - protein, 574 aa, Homo sapiens
MRRLSSWRKMATAEKQKHDGRVKIGHYILGDTLGVGTFGKVKVGKHELTGHKVAVKILNRQKIRSLDVVGKIRREIQNLKLFRHPHIIKLYQVISTPSDIFMVMEYVSGGELFDYICKNGRKSDVPGVVKTGSTKELDEKESRRLFQQILSGVDYCHRHMVVHRDLKPENVLLDAHMNAKIADFGLSNMMSDGEFLRTSCGSPNYAAPEVISGRLYAGPEVDIWSSGVILYALLCGTLPFDDDHVPTLFKKICDGIFYTPQYLNPSVISLLKHMLQVDPMKRATIKDIREHEWFKQDLPKYLFPEDPSYSSTMIDDEALKEVCEKFECSEEEVLSCLYNRNHQDPLAVAYHLIIDNRRIMNEAKDFYLATSPPDSFLDDHHLTRPHPERVPFLVAETPRARHTLDELNPQKSKHQGVRKAKWHLGIRSQSRPNDIMAEVCRAIKQLDYEWKVVNPYYLRVRRKNPVTSTYSKMSLQLYQVDSRTYLLDFRSIDDEITEAKSGTATPQRSGSVSNYRSCQRSDSDAEAQGKSSEVSLTSSVTSLDSSPVDLTPRPGSHTIEFFEMCANLIKILAQ

SEQ ID NO: 10541 - protein, 288 aa, Homo sapiens
MNNLSFSELCCLFCCPPCPGKIASKLAFLPPDPTYTLMCDESGSRWTLHLSERADWQYSSREKDAIECFMTRTSKGNRIACMFVRCSPNAKYTLLFSHGNAVDLGQMSSFYIGLGSRINCNIFSYDYSGYGASSGKPTEKNLYADIEAAWLALRTRYGIRPENVIIYGQSIGTVPSVDLAARYESAAVILHSPLTSGMRVAFPDTKKTYCFDAFPNIDKISKITSPVLIIHGTEDEVIDFSHGLALFERCQRPVEPLWVEGAGHNDVELYGQYLERLKQFVSQELVNL

SEQ ID NO: 10542 - protein, 293 aa, Homo sapiens
MNNLSFSELCCLFCCPPCPGKIASKLAFLPPDPTYTLMCDESGSRWTLHLSERADWQYSSREKDAIECFMTRTSKGNRIACMFVRCSPNAKYTLLFSHGNAVDLGQMSSFYIGLGSRINCNIFSYDYSGYGASSGKPTEKNLYADIEAAWLALRTRYGIRPENVIIYGQSIGTVPSVDLAARYESAAVILHSPLTSGMRVAFPDTKKTYCFDAFPNIDKISKITSPVLIIHGTEDEVIDFSHGLALFERCQRPVEPLWVEGAGHNDVELYGQYLERLKQFVSQELVQKHKEGK

SEQ ID NO: 10543 - protein, 377 aa, Homo sapiens
MSPLNQSAEGLPQEASNRSLNATETSEAWDPRTLQALKISLAVVLSVITLATVLSNAFVLTTILLTRKLHTPANYLIGSLATTDLLVSILVMPISIAYTITHTWNFGQILCDIWLSSDITCCTASILHLCVIALDRYWAITDALEYSKRRTAGHAATMIAIVWAISICISIPPLFWRQAKAQEEMSDCLVNTSQISYTIYSTCGAFYIPSVLLIILYGRIYRAARNRILNPPSLYGKRFTTAHLITGSAGSSLCSLNSSLHEGHSHSAGSPLFFNHVKIKLADSALERKRISAARERKATKILGIILGAFIICWLPFFVVSLVLPICRDSCWIHPALFDFFTWLGYLNSLINPIIYTVFNEEFRQAFQKIVPFRKAS

SEQ ID NO: 10544 - protein, 390 aa, Homo sapiens
MEEPGAQCAPPPPAGSETWVPQANLSSAPSQNCSAKDYIYQDSISLPWKVLLVMLLALITLATTLSNAFVIATVYRTRKLHTPANYLIASLAVTDLLVSILVMPISTMYTVTGRWTLGQVVCDFWLSSDITCCTASILHLCVIALDRYWAITDAVEYSAKRTPKRAAVMIALVWVFSISISLPPFFWRQAKAEEEVSECVVNTDHILYTVYSTVGAFYFPTLLLIALYGRIYVEARSRILKQTPNRTGKRLTRAQLITDSPGSTSSVTSINSRVPDVPSESGSPVYVNQVKVRVSDALLEKKKLMAARERKATKTLGIILGAFIVCWLPFFIISLVMPICKDACWFHLAIFDFFTWLGYLNSLINPIIYTMSNEDFKQAFHKLIRFKCTS

SEQ ID NO: 10545 - protein, 454 aa, Homo sapiens
MQKHSPGPPALALLSQSLLTTGNGDTLIINCPGFGQHRVDPAAFQAVFDRKAIGPVTNYSVATHVNISFTLSAIWNCYSRIHTFNCHHARPWHNQFVQWNPDECGGIKKSGMATENLWLSDVFIEESVDQTPAGLMASMSIVKATSNTISQCGWSASANWTPSISPSMDRARAWRRMSRSFQIHHRTSFRTRREWVLLGIQKRTIKVTVATNQYEQAIFHVAIRRRCRPSPYVVNFLVPSGILIAIDALSFYLPLESGNCAPFKMTVLLGYSVFLLMMNDLLPATSTSSHASLVAPLALMQTPLPAGVYFALCLSLMVGSLLETIFITHLLHVATTQPLPLPRWLHSLLLHCTGQGRCCPTAPQKGNKGPGLTPTHLPGVKEPEVSAGQMPGPGEAELTGGSEWTRAQREHEAQKQHSVELWVQFSHAMDALLFRLYLLFMASSIITVICLWNT

SEQ ID NO: 10546 - protein, 279 aa, Homo sapiens
MASMSIVKATSNTISQCGWSASANWTPSISPSMDRAERSPSALSPTQVAIRRRCRPSPYVVNFLVPSGILIAIDALSFYLPLESGNCAPFKMTVLLGYSVFLLMMNDLLPATSTSSHASLVRPHPSRDQKRGVYFALCLSLMVGSLLETIFITHLLHVATTQPLPLPRWLHSLLLHCTGQGRCCPTAPQKGNKGPGLTPTHLPGVKEPEVSAGQMPGPGEAELTGGSEWTRAQREHEAQKQHSVELWVQFSHAMDALLFRLYLLFMASSIITVICLWNT

SEQ ID NO: 10547 - protein, 233 aa, Homo sapiens
MVAIRRRCRPSPYVVNFLVPSGILIAIDALSFYLPLESGNCAPFKMTVLLGYSVFLLMMNDLLPATSTSSHASLVRPHPSRDQKRGVYFALCLSLMVGSLLETIFITHLLHVATTQPLPLPRWLHSLLLHCTGQGRCCPTAPQKGNKGPGLTPTHLPGVKEPEVSAGQMPGPGEAELTGGSEWTRAQREHEAQKQHSVELWVQFSHAMDALLFRLYLLFMASSIITVICLWNT

SEQ ID NO: 10548 - protein, 404 aa, Homo sapiens
MERGWFHGKGFLLGFILHLLLQDSHLQLVTSFLWLNMWNPDECGGIKKSGMATENLWLSDVFIEESVDQTPAGLMASMSIVKATSNTISQCGWSASANWTPSISPSMDRGERSPSALSPTQVTRAWRRMSRSFQIHHRTSFRTRREWVLLGIQKRTIKVTVATNQYEQAIFHVAIRRRCRPSPYVVNFLVPSGILIAIDALSFYLPLESGNCAPFKMTVLLGYSVFLLMMNDLLPATSTSSHASLVRPHPSRDQKRGVYFALCLSLMVGSLLETIFITHLLHVATTQPLPLPRWLHSLLLHCTGQGRCCPTAPQKGNKGPGLTPTHLPGVKEPEVSAGQMPGPGEAELTGGSEWTRAQREHEAQKQHSVELWVQFSHAMDALLFRLYLLFMASSIITVICLWNT

SEQ ID NO: 10549 - protein, 423 aa, Homo sapiens
MERMLPLLALGLLAAGFCPAVLCHPNSPLDEENLTQENQDRGTHVDLGLASANVDFAFSLYKQLVLKAPDKNVIFSPLSISTALAFLSLGAHNTTLTEILKGLKFNLTETSEAEIHQSFQHLLRTLNQSSDELQLSMGNAMFVKEQLSLLDRFTEDAKRLYGSEAFATDFQDSAAAKKLINDYVKNGTRGKITDLIKDLDSQTMMVLVNYIFFKAKWEMPFDPQDTHQSRFYLSKKKWVMVPMMSLHHLTIPYFRDEELSCTVVELKYTGNASALFILPDQDKMEEVEAMLLPETLKRWRDSLEFREIGELYLPKFSISRDYNLNDILLQLGIEEAFTSKADLSGITGARNLAVSQVVHKAVLDVFEEGTEASAATAVKITLLSALVETRTIVRFNRPFLMIIVPTDTQNIFFMSKVTNPKQA

SEQ ID NO: 10550 - protein, 216 aa, Homo sapiens
MERMLPLLALGLLAAGFCPAVLCHPNSPLDEENLTQENQDRGTHVDLGLASANVDFAFSLYKQLVLKAPDKNVIFSPLSISTALAFLSLGAHNTTLTEILKGLKFNLTETSEAEIHQSFQHLLRTLNQSSDELQLSMGNAMFVKEQLSLLDRFTEDAKRLYGSEAFATDFQDSAAAKKLINDYVKNGTRGKITDLIKDLDSQTMMVLVNYIFFKER

SEQ ID NO: 10551 - protein, 95 aa, Homo sapiens
MERMLPLLALGLLAAGFCPAVLCHPNSPLDEENLTQENQDRGTHVDLGLASANVDFAFSLYKQSPRWSIRLCLMYLRRAQKHLLPQQSKSPSFLH

SEQ ID NO: 10552 - protein, 318 aa, Homo sapiens
MPNNSTALSLANVTYITMEIFIGLCAIVGNVLVICVVKLNPSLQTTTFYFIVSLALADIAVGVLVMPLAIVVSLGITIHFYSCLFMTCLLLIFTHASIMSLLAIAVDRYLRVKLTVRYKRVTTHRRIWLALGLCWLVSFLVGLTPMFGWNMKLTSEYHRNVTFLSCQFVSVMRMDYMVYFSFLTWIFIPLVVMCAIYLDIFYIIRNKLSLNLSNSKETGAFYGREFKTAKSLFLVLFLFALSWLPLSIINCIIYFNGEVPQLVLYMGILLSHANSMMNPIVYAYKIKKFKETYLLILKACVVCHPSDSLDTSIEKNSE

SEQ ID NO: 10553 - protein, 561 aa, Homo sapiens
MSTSWSDRLQNAADMPANMDKHALKKYRREAYHRVFVNRSLAMEKIKCFGFDMDYTLAVYKSPEYESLGFELTVERLVSIGYPQELLSFAYDSTFPTRGLVFDTLYGNLLKVDAYGNLLVCAHGFNFIRGPETREQYPNKFIQRDDTERFYILNTLFNLPETYLLACLVDFFTNCPRYTSCETGFKDGDLFMSYRSMFQDVRDAVDWVHYKGSLKEKTVENLEKYVVKDGKLPLLLSRMKEVGKVFLATNSDYKYTDKIMTYLFDFPHGPKPGSSHRPWQSYFDLILVDARKPLFFGEGTVLRQVDTKTGKLKIGTYTGPLQHGIVYSGGSSDTICDLLGAKGKDILYIGDHIFGDILKSKKRQGWRTFLVIPELAQELHVWTDKSSLFEELQSLDIFLAELYKHLDSSSNERPDISSIQRRIKKVTHDMDMCYGMMGSLFRSGSRQTLFASQVMRYADLYAASFINLLYYPFSYLFRAAHVLMPHESTVEHTHVDINEMESPLATRNRTSVDFKDTDYKRHQLTRSISEIKPPNLFPLAPQEITHCHDEDDDEEEEEEEE

SEQ ID NO: 10554 - protein, 532 aa, Homo sapiens
MSKEGVFVNRSLAMEKIKCFGFDMDYTLAVYKSPEYESLGFELTVERLVSIGYPQELLSFAYDSTFPTRGLVFDTLYGNLLKVDAYGNLLVCAHGFNFIRGPETREQYPNKFIQRDDTERFYILNTLFNLPETYLLACLVDFFTNCPRYTSCETGFKDGDLFMSYRSMFQDVRDAVDWVHYKGSLKEKTVENLEKYVVKDGKLPLLLSRMKEVGKVFLATNSDYKYTDKIMTYLFDFPHGPKPGSSHRPWQSYFDLILVDARKPLFFGEGTVLRQVDTKTGKLKIGTYTGPLQHGIVYSGGSSDTICDLLGAKGKDILYIGDHIFGDILKSKKRQGWRTFLVIPELAQELHVWTDKSSLFEELQSLDIFLAELYKHLDSSSNERPDISSIQRRIKKVTHDMDMCYGMMGSLFRSGSRQTLFASQVMRYADLYAASFINLLYYPFSYLFRAAHVLMPHESTVEHTHVDINEMESPLATRNRTSVDFKDTDYKRHQLTRSISEIKPPNLFPLAPQEITHCHDEDDDEEEEEEEE

SEQ ID NO: 10555 - protein, 192 aa, Homo sapiens
MACGATLKRPMEFEAALLSPGSPKRRRCAPLPGPTPGLRPPDAEPPPPFQTQTPPQSLQQPAPPGSERRLPTPEQIFQNIKQEYSRYQRWRHLEVVLNQSEACASESQPHSSALTAPSSPGSSWMKKDQPTFTLRQVGIICERLLKDYEDKIREEYEQILNTKLAEQYESFVKFTHDQIMRRYGTRPTSYVS

SEQ ID NO: 10556 - protein, 147 aa, Homo sapiens
MACGATLKRPMEFEAALLSPGSPKRRRCAPLPGPTPGLRPPDAEPPPPFQTQTPPQSLQQPAPPGSERRLPTPEQIFQNIKQEYSRYQRWRHLEVVLNQSEACASESQPHSSALTAPSSPEQYESFVKFTHDQIMRRYGTRPTSYVS

SEQ ID NO: 10557 - protein, 299 aa, Homo sapiens
MAKWGQGNPHWIVEEREDGTNVNNWRWTERDATSLSKGKFQELLVGIVVENDAGRGEINELKQVEGEASCSSRKGKLIFFYEWNIKLGWKGIVKESGVKHKGLIEIPNLSEENEVDDTEVSLSKKKGDGVILKDLMKTAGTAKVREALGDYLKALKTEFTTGMILPTKAMATQELTVKRKLSGNTLQVQASSPVALGVRIPTVALHMMELFDTTVEQLYSIFTVKELTNKKIIMKWRCGNWPEEHYAMVALNFVPTLGQTELQLKEFLSICKEENMKFCWQKQHFEEIKGSLQLTPLNG

SEQ ID NO: 10558 - protein, 146 aa, Homo sapiens
MTLPEFTTGMILPTKAMATQELTVKRKLSGNTLQVQASSPVALGVRIPTVALHMMELFDTTVEQLYSIFTVKELTNKKIIMKWRCGNWPEEHYAMVALNFVPTLGQTELQLKEFLSICKEENMKFCWQKQHFEEIKGSLQLTPLNG

SEQ ID NO: 10559 - protein, 137 aa, Homo sapiens
MILPTKAMATQELTVKRKLSGNTLQVQASSPVALGVRIPTVALHMMELFDTTVEQLYSIFTVKELTNKKIIMKWRCGNWPEEHYAMVALNFVPTLGQTELQLKEFLSICKEENMKFCWQKQHFEEIKGSLQLTPLNG

SEQ ID NO: 10560 - protein, 973 aa, Homo sapiens [sequence omitted]

SEQ ID NO: 10561 - protein, 866 aa, Homo sapiens
MAGRVPSLLVLLVFPSSCLAFRSPLSVFKRFKETTRPFSNECLGTTRPVVPIDSSDFALDIRMPGVTPKQSDTYFCMSMRIPVDEEAFVIDFKPRASMDTVHHMLLFGCNMPSSTGSYWFCDEGTCTDKANILYAWARNAPPTRLPKGVGFRVGGETGSKYFVLQVHYGDISAFRDNNKDCSGVSLHLTRLPQPLIAGMYLMMSVDTVIPAGEKVVNSDISCHYKNYPMHVFAYRVHTHHLGKVVSGYRVRNGQWTLIGRQSPQLPQAFYPVGHPVDVSFGDLLAARCVFTGEGRTEATHIGGTSSDEMCNLYIMYYMEAKHAVSFMTCTQNVAPDMFRTIPPEANIPIPVKSDMVMMHEHHKETEYKDKIPLLQQPKREEEEVLDQDFHMEEALDWPGVYLLPGQVSGVALDPKNNLVIFHRGDHVWDGNSFDSKFVYQQIGLGPIEEDTILVIDPNNAAVLQSSGKNLFYLPHGLSIDKDGNYWVTDVALHQVFKLDPNNKEGPVLILGRSMQPGSDQNHFCQPTDVAVDPGTGAIYVSDGYCNSRIVQFSPSGKFITQWGEESSGSSPLPGQFTVPHSLALVPLLGQLCVADRENGRIQCFKTDTKEFVREIKHSSFGRNVFAISYIPGLLFAVNGKPHFGDQEPVQGFVMNFSNGEIIDIFKPVRKHFDMPHDIVASEDGTVYIGDAHTNTVWKFTLTEKLEHRSVKKAGIEVQEIKEAEAVVETKMENKPTSSELQKMQEKQKLIKEPGSGVPVVLITTLLVIPVVVLLAIAIFIRWKKSRAFGDSEHKLETSSGRVLGRFRGKGSGGLNLGNFFASRKGYSRKGFDRLSTEGSDQEKEDDGSESEEEYSAPLPALAPSSS

SEQ ID NO: 10562 - protein, 905 aa, Homo sapiens
MAGRVPSLLVLLVFPSSCLAFRSPLSVFKRFKETTRPFSNECLGTTRPVVPIDSSDFALDIRMPGVTPKQSDTYFCMSMRIPVDEEAFVIDFKPRASMDTVHHMLLFGCNMPSSTGSYWFCDEGTCTDKANILYAWARNAPPTRLPKGVGFRVGGETGSKYFVLQVHYGDISAFRDNNKDCSGVSLHLTRLPQPLIAGMYLMMSVDTVIPAGEKVVNSDISCHYKNYPMHVFAYRVHTHHLGKVVSGYRVRNGQWTLIGRQSPQLPQAFYPVGHPVDVSFGDLLAARCVFTGEGRTEATHIGGTSSDEMCNLYIMYYMEAKHAVSFMTCTQNVAPDMFRTIPPEANIPIPVKSDMVMMHEHHKETEYKDKIPLLQQPKREEEEVLDQGDFYSLLSKLLGEREDVVHVHKYNPTEKAESESDLVAEIANVVQKKDLGRSDAREGAEHERGNAILVRDRIHKFHRLVSTLRPPESRVFSLQQPPPGEGTWEPEHTGDFHMEEALDWPGVYLLPGQVSGVALDPKNNLVIFHRGDHVWDGNSFDSKFVYQQIGLGPIEEDTILVIDPNNAAVLQSSGKNLFYLPHGLSIDKDGNYWVTDVALHQVFKLDPNNKEGPVLILGRSMQPGSDQNHFCQPTDVAVDPGTGAIYVSDGYCNSRIVQFSPSGKFITQWGEESSGSSPLPGQFTVPHSLALVPLLGQLCVADRENGRIQCFKTDTKEFVREIKHSSFGRNVFAISYIPGLLFAVNGKPHFGDQEPVQGFVMNFSNGEIIDIFKPVRKHFDMPHDIVASEDGTVYIGDAHTNTVWKFTLTEKLEHRSVKKAGIEVQEIKDSEHKLETSSGRVLGRFRGKGSGGLNLGNFFASRKGYSRKGFDRLSTEGSDQEKEDDGSESEEEYSAPLPALAPSSS

SEQ ID NO: 10563 - protein, 887 aa, Homo sapiens
MAGRVPSLLVLLVFPSSCLAFRSPLSVFKRFKETTRPFSNECLGTTRPVVPIDSSDFALDIRMPGVTPKQSDTYFCMSMRIPVDEEAFVIDFKPRASMDTVHHMLLFGCNMPSSTGSYWFCDEGTCTDKANILYAWARNAPPTRLPKGVGFRVGGETGSKYFVLQVHYGDISAFRDNNKDCSGVSLHLTRLPQPLIAGMYLMMSVDTVIPAGEKVVNSDISCHYKNYPMHVFAYRVHTHHLGKVVSGYRVRNGQWTLIGRQSPQLPQAFYPVGHPVDVSFGDLLAARCVFTGEGRTEATHIGGTSSDEMCNLYIMYYMEAKHAVSFMTCTQNVAPDMFRTIPPEANIPIPVKSDMVMMHEHHKETEYKDKIPLLQQPKREEEEVLDQGDFYSLLSKLLGEREDVVHVHKYNPTEKAESESDLVAEIANVVQKKDLGRSDAREGAEHERGNAILVRDRIHKFHRLVSTLRPPESRVFSLQQPPPGEGTWEPEHTGDFHMEEALDWPGVYLLPGQVSGVALDPKNNLVIFHRGDHVWDGNSFDSKFVYQQIGLGPIEEDTILVIDPNNAAVLQSSGKNLFYLPHGLSIDKDGNYWVTDVALHQVFKLDPNNKEGPVLILGRSMQPGSDQNHFCQPTDVAVDPGTGAIYVSDGYCNSRIVQFSPSGKFITQWGEESSGSSPLPGQFTVPHSLALVPLLGQLCVADRENGRIQCFKTDTKEFVREIKHSSFGRNVFAISYIPGLLFAVNGKPHFGDQEPVQGFVMNFSNGEIIDIFKPVRKHFDMPHDIVASEDGTVYIGDAHTNTVWKFTLTEKLEHRSVKKAGIEVQEIKGKGSGGLNLGNFFASRKGYSRKGFDRLSTEGSDQEKEDDGSESEEEYSAPLPALAPSSS

SEQ ID NO: 10564 - protein, 974 aa, Homo sapiens
MAGRVPSLLVLLVFPSSCLAFRSPLSVFKRFKETTRPFSNECLGTTRPVVPIDSSDFALDIRMPGVTPKQSDTYFCMSMRIPVDEEAFVIDFKPRASMDTVHHMLLFGCNMPSSTGSYWFCDEGTCTDKANILYAWARNAPPTRLPKGVGFRVGGETGSKYFVLQVHYGDISAFRDNNKDCSGVSLHLTRLPQPLIAGMYLMMSVDTVIPAGEKVVNSDISCHYKNYPMHVFAYRVHTHHLGKVVSGYRVRNGQWTLIGRQSPQLPQAFYPVGHPVDVSFGDLLAARCVFTGEGRTEATHIGGTSSDEMCNLYIMYYMEAKHAVSFMTCTQNVAPDMFRTIPPEANIPIPVKSDMVMMHEHHKETEYKDKIPLLQQPKREEEEVLDQGDFYSLLSKLLGEREDVVHVHKYNPTEKAESESDLVAEIANVVQKKDLGRSDAREGAEHERGNAILVRDRIHKFHRLVSTLRPPESRVFSLQQPPPGEGTWEPEHTGDFHMEEALDWPGVYLLPGQVSGVALDPKNNLVIFHRGDHVWDGNSFDSKFVYQQIGLGPIEEDTILVIDPNNAAVLQSSGKNLFYLPHGLSIDKDGNYWVTDVALHQVFKLDPNNKEGPVLILGRSMQPGSDQNHFCQPTDVAVDPGTGAIYVSDGYCNSRIVQFSPSGKFITQWGEESSGSSPLPGQFTVPHSLALVPLLGQLCVADRENGRIQCFKTDTKEFVREIKHSSFGRNVFAISYIPGLLFAVNGKPHFGDQEPVQGFVMNFSNGEIIDIFKPVRKHFDMPHDIVASEDGTVYIGDAHTNTVWKFTLTEKLEHRSVKKAGIEVQEIKEAEAVVETKMENKPTSSELQKMQEKQKLIKEPGSGVPVVLITTLLVIPVVVLLAIAIFIRWKKSRAFGADSEHKLETSSGRVLGRFRGKGSGGLNLGNFFASRKGYSRKGFDRLSTEGSDQEKEDDGSESEEEYSAPLPALAPSSS

SEQ ID NO: 10565 - protein, 955 aa, Homo sapiens
MAGRVPSLLVLLVFPSSCLAFRSPLSVFKRFKETTRPFSNECLGTTRPVVPIDSSDFALDIRMPGVTPKQSDTYFCMSMRIPVDEEAFVIDFKPRASMDTVHHMLLFGCNMPSSTGSYWFCDEGTCTDKANILYAWARNAPPTRLPKGVGFRVGGETGSKYFVLQVHYGDISAFRDNNKDCSGVSLHLTRLPQPLIAGMYLMMSVDTVIPAGEKVVNSDISCHYKNYPMHVFAYRVHTHHLGKVVSGYRVRNGQWTLIGRQSPQLPQAFYPVGHPVDVSFGDLLAARCVFTGEGRTEATHIGGTSSDEMCNLYIMYYMEAKHAVSFMTCTQNVAPDMFRTIPPEANIPIPVKSDMVMMHEHHKETEYKDKIPLLQQPKREEEEVLDQGDFYSLLSKLLGEREDVVHVHKYNPTEKAESESDLVAEIANVVQKKDLGRSDAREGAEHERGNAILVRDRIHKFHRLVSTLRPPESRVFSLQQPPPGEGTWEPEHTGDFHMEEALDWPGVYLLPGQVSGVALDPKNNLVIFHRGDHVWDGNSFDSKFVYQQIGLGPIEEDTILVIDPNNAAVLQSSGKNLFYLPHGLSIDKDGNYWVTDVALHQVFKLDPNNKEGPVLILGRSMQPGSDQNHFCQPTDVAVDPGTGAIYVSDGYCNSRIVQFSPSGKFITQWGEESSGSSPLPGQFTVPHSLALVPLLGQLCVADRENGRIQCFKTDTKEFVREIKHSSFGRNVFAISYIPGLLFAVNGKPHFGDQEPVQGFVMNFSNGEIIDIFKPVRKHFDMPHDIVASEDGTVYIGDAHTNTVWKFTLTEKLEHRSVKKAGIEVQEIKEAEAVVETKMENKPTSSELQKMQEKQKLIKEPGSGVPVVLITTLLVIPVVVLLAIAIFIRWKKSRAFGGKGSGGLNLGNFFASRKGYSRKGFDRLSTEGSDQEKEDDGSESEEEYSAPLPALAPSSS

SEQ ID NO: 10566 - protein, 605 aa, Homo sapiens
MALRKGGLALALLLLSWVALGPRSLEGADPGTPGEAEGPACPAACVCSYDDDADELSVFCSSRNLTRLPDGVPGGTQALWLDGNNLSSVPPAAFQNLSSLGFLNLQGGQLGSLEPQALLGLENLCHLHLERNQLRSLALGTFAHTPALASLGLSNNRLSRLEDGLFEGLGSLWDLNLGWNSLAVLPDAAFRGLGSLRELVLAGNRLAYLQPALFSGLAELRELDLSRNALRAIKANVFVQLPRLQKLYLDRNLIAAVAPGAFLGLKALRWLDLSHNRVAGLLEDTFPGLLGLRVLRLSHNAIASLRPRTFKDLHFLEELQLGHNRIRQLAERSFEGLGQLEVLTLDHNQLQEVKAGAFLGLTNVAVMNLSGNCLRNLPEQVFRGLGKLHSLHLEGSCLGRIRPHTFTGLSGLRRLFLKDNGLVGIEEQSLWGLAELLELDLTSNQLTHLPHRLFQGLGKLEYLLLSRNRLAELPADALGPLQRAFWLDVSHNRLEALPNSLLAPLGRLRYLSLRNNSLRTFTPQPPGLERLWLEGNPWDCGCPLKALRDFALQNPSAVPRFVQAICEGDDCQPPAYTYNNITCASPPEVVGLDLRDLSEAHFAPC

SEQ ID NO: 10567 - protein, 643 aa, Homo sapiens
MALRKAGDLEPQFTPERRFRLCWYQAHSGRALLGPPPQASPPAGGLALALLLLSWVALGPRSLEGADPGTPGEAEGPACPAACVCSYDDDADELSVFCSSRNLTRLPDGVPGGTQALWLDGNNLSSVPPAAFQNLSSLGFLNLQGGQLGSLEPQALLGLENLCHLHLERNQLRSLALGTFAHTPALASLGLSNNRLSRLEDGLFEGLGSLWDLNLGWNSLAVLPDAAFRGLGSLRELVLAGNRLAYLQPALFSGLAELRELDLSRNALRAIKANVFVQLPRLQKLYLDRNLIAAVAPGAFLGLKALRWLDLSHNRVAGLLEDTFPGLLGLRVLRLSHNAIASLRPRTFKDLHFLEELQLGHNRIRQLAERSFEGLGQLEVLTLDHNQLQEVKAGAFLGLTNVAVMNLSGNCLRNLPEQVFRGLGKLHSLHLEGSCLGRIRPHTFTGLSGLRRLFLKDNGLVGIEEQSLWGLAELLELDLTSNQLTHLPHRLFQGLGKLEYLLLSRNRLAELPADALGPLQRAFWLDVSHNRLEALPNSLLAPLGRLRYLSLRNNSLRTFTPQPPGLERLWLEGNPWDCGCPLKALRDFALQNPSAVPRFVQAICEGDDCQPPAYTYNNITCASPPEVVGLDLRDLSEAHFAPC

SEQ ID NO: 10568 - protein, 643 aa, Homo sapiens
MPLLFLERFPWPSLRTYTGLSGLALLGTIISAYRALSQPEAGPGEPDQLTASLQPEPPAPARPSAGGPRARDVAQYLLSDSLFVWVLVNTACCVLMLVAKLIQCIVFGPLRVSERQHLKDKFWNFIFYKFIFIFGVLNVQTVEEVVMWCLWFAGLVFLHLMVQLCKDRFEYLSFSPTTPMSSHGRVLSLLVAMLLSCCGLAAVCSITGYTHGMHTLAFMAAESLLVTVRTAHVILRYVIHLWDLNHEGTWEGKGTYVYYTDFVMELTLLSLDLMHHIHMLLFGNIWLSMASLVIFMQLRYLFHEVQRRIRRHKNYLRVVGNMEARFAVATPEELAVNNDDCAICWDSMQAARKLPCGHLFHNSCLRSWLEQDTSCPTCRMSLNIADNNRVREEHQGENLDENLVPVAAAEGRPRLNQHNHFFHFDGSRIASWLPSFSVEVMHTTNILGITQASNSQLNAMAHQIQEMFPQVPYHLVLQDLQLTRSVEITTDNILEGRIQVPFPTQRSDSIRPALNSPVERPSSDQEEGETSAQTERVPLDLSPRLEETLDFGEVEVEPSEVEDFEARGSRFSKSADERQRMLVQRKDELLQQARKRFLNKSSEDDAASESFLPSEGASSDPVTLRRRMLAAAAERRLQKQQTS

SEQ ID NO: 10569 - protein, 191 aa, Homo sapiens
MGTWILFACLLGAAFAMPLPPHPGHPGYINFSYEVLTPLKWYQSIRPPYPSYGYEPMGGWLHHQIIPVLSQQHPPTHTLQPHHHIPVVPAQQPVIPQQPMMPVPGQHSMTPIQHHQPNLPPPAQQPYQPQPVQPQPHQPMQPQPPVHPMQPLPPQPPLPPMFPMQPLPPMLPDLTLEAWPSTDKTKREEVD

SEQ ID NO: 10570 - protein, 175 aa, Homo sapiens
MGTWILFACLLGAAFAMPVLTPLKWYQSIRPPYPSYGYEPMGGWLHHQIIPVLSQQHPPTHTLQPHHHIPVVPAQQPVIPQQPMMPVPGQHSMTPIQHHQPNLPPPAQQPYQPQPVQPQPHQPMQPQPPVHPMQPLPPQPPLPPMFPMQPLPPMLPDLTLEAWPSTDKTKREEVD

SEQ ID NO: 10571 - protein, 205 aa, Homo sapiens
MGTWILFACLLGAAFAMPLPPHPGHPGYINFSYENSHSQAINVDRTALVLTPLKWYQSIRPPYPSYGYEPMGGWLHHQIIPVLSQQHPPTHTLQPHHHIPVVPAQQPVIPQQPMMPVPGQHSMTPIQHHQPNLPPPAQQPYQPQPVQPQPHQPMQPQPPVHPMQPLPPQPPLPPMFPMQPLPPMLPDLTLEAWPSTDKTKREEVD

SEQ ID NO: 10572 - protein, 504 aa, Homo sapiens
MTWLVLLGTLLCMLRVGLGTPDSEGFPPRALHNCPYKCICAADLLSCTGLGLQDVPAELPAATADLDLSHNALQRLRPGWLAPLFQLRALHLDHNELDALGRGVFVNASGLRLLDLSSNTLRALGRHDLDGLGALEKLLLFNNRLVHLDEHAFHGLRALSHLYLGCNELASFSFDHLHGLSATHLLTLDLSSNRLGHISVPELAALPAFLKNGLYLHNNPLPCDCRLYHLLQRWHQRGLSAVRDFAREYVCLAFKVPASRVRFFQHSRVFENCSSAPALGLERPEEHLYALVGRSLRLYCNTSVPAMRIAWVSPQQELLRAPGSRDGSIAVLADGSLAIGNVQEQHAGLFVCLATGPRLHHNQTHEYNVSVHFPRPEPEAFNTGFTTLLGCAVGLVLVLLYLFAPPCRCCRRACRCRRWPQTPSPLQELSAQSSVLSTTPPDAPSRKASVHKHVVFLEPGRRGLNGRVQLAVAEEFDLYNPGGLQLKAGSESASSIGSEGPMTT

SEQ ID NO: 10573 - protein, 626 aa, Homo sapiens
MMARPVDPQRSPDPTFRSSTRHSGKLEPMEATAHLLRKQCPSRLNSPAWEASGLHWSSLDSPVGSMQALRPSAQHSWSPEPSVVPDQAWEDTALHQKKLCPLSLTSLPREAAVNFSYRSQTLLQEAQVLQGSPELLPRSPKPSGLQRLAPEEATALPLRRLCHLSLMEKDLGTTAHPRGFPELSHKSTAAASSRQSRPRVRSASLPPRTRLPSGSQAPSAAHPKRLSDLLLTSRAAAPGWRSPDPRSRLAAPPLGSTTLPSTWTAPQSRLTARPSRSPEPQIRESEQRDPQLRRKQQRWKEPLMPRREEKYPLRGTDPLPPGQPQRIPLPGQPLQPQPILTPGQPQKIPTPGQHQPILTPGHSQPIPTPGQPLPPQPIPTPGRPLTPQPIPTPGRPLTPQPIQMPGRPLRLPPPLRLLRPGQPMSPQLRQTQGLPLPQPLLPPGQPKSAGRPLQPLPPGPDARSISDPPAPRSRLPIRLLRGLLARLPGGASPRAAAAAACTTMKGWPAATMTPAETSPTMGPPDASAGFSIGEIAAAESPSATYSATFSCKPSGAASVDLRVPSPKPRALSRSRRYPWRRSADRCAKKPWRSGPRSAQRRNAVSSSTNNSRTKRWATCVRTACCF

SEQ ID NO: 10574 - protein, 1244 aa, Homo sapiens
MNNQKVVAVLLQECKQVLDQLLLEAPDVSEEDKSEDQRCRALLPSELRTLIQEAKEMKWPFVPEKWQYKQAVGPEDKTNLKDVIGAGLQQLLASLRASILARDCAAAAAIVFLVDRFLYGLDVSGKLLQVAKGLHKLQPATPIAPQVVIRQARISVNSGKLLKAEYILSSLISNNGATGTWLYRNESDKVLVQSVCIQIRGQILQKLGMWYEAAELIWASIVGYLALPQPDKKGLSTSLGILADIFVSMSKNDYEKFKNNPQINLSLLKEFDHHLLSAAEACKLAAAFSAYTPLFVLTAVNIRGTCLLSYSSSNDCPPELKNLHLCEAKEAFEIGLLTKRDDEPVTGKQELHSFVKAAFGLTTVHRRLHGETGTVHAASQLCKEAMGKLYNFSTSSRSQDREALSQEVMSVIAQVKEHLQVQSFSNVDDRSYVPESFECRLDKLILHGQGDFQKILDTYSQHHTSVCEVFESDCGNNKNEQKDAKTGVCITALKTEIKNIDTVSTTQEKPHCQRDTGISSSLMGKNVQRELRRGGRRNWTHSDAFRVSLDQDVETETEPSDYSNGEGAVFNKSLSGSQTSSAWSNLSGFSSSASWEEVNYHVDDRSARKEPGKEHLVDTQCSTALSEELENDREGRAMHSLHSQLHDLSLQEPNNDNLEPSQNQPQQQMPLTPFSPHNTPGIFLAPGAGLLEGAPEGIQEVRNMGPRNTSAHSRPSYRSASWSSDSGRPKNMGTHPSVQKEEAFEIIVEFPETNCDVKDRQGKEQGEEISERGAGPTFKASPSWVDPEGETAESTEDAPLDFHRVLHNSLGNISMLPCSSFTPNWPVQNPDSRKSGGPVAEQGIDPDASTVDEEGQLLDSMDVPCTNGHGSHRLCILRQPPGQRAETPNSSVSGNILFPVLSEDCTTTEEGNQPGNMLNCSQNSSSSSVWWLKSPAFSSGSSEGDSPWSYLNSSGSSWVSLPGKMRKEILEARTLQPDDFEKLLAGVRHDWLFQRLENTGVFKPSQLHRAHSALLLKYSKKSELWTAQETIVYLGDYLTVKKKGRQRNAFWVHHLHQEEILGRYVGKDYKEQKGLWHHFTDVERQMTAQHYVTEFNKRLYEQNIPTQIFYIPSTILLILEDKTIKGCISVEPYILGEFVKLSNNTKVVKTEYKATEYGLAYGHFSYEFSNHRDVVVDLQGWVTGNGKGLIYLTDPQIHSVDQKVFTTNFGKRGIFYFFNNQHVECNEICHRLSLTRPSMEKPCT

SEQ ID NO: 10575 - protein, 1166 aa, Homo sapiens
MCRKRTRARTSAAEASLRASILARDCAAAAAIVFLVDRFLYGLDVSGKLLQVAKGLHKLQPATPIAPQVVIRQARISVNSGKLLKAEYILSSLISNNGATGTWLYRNESDKVLVQSVCIQIRGQILQKLGMWYEAAELIWASIVGYLALPQPDKKGLSTSLGILADIFVSMSKNDYEKFKNNPQINLSLLKEFDHHLLSAAEACKLAAAFSAYTPLFVLTAVNIRGTCLLSYSSSNDCPPELKNLHLCEAKEAFEIGLLTKRDDEPVTGKQELHSFVKAAFGLTTVHRRLHGETGTVHAASQLCKEAMGKLYNFSTSSRSQDREALSQEVMSVIAQVKEHLQVQSFSNVDDRSYVPESFECRLDKLILHGQGDFQKILDTYSQHHTSVCEVFESDCGNNKNEQKDAKTGVCITALKTEIKNIDTVSTTQEKPHCQRDTGISSSLMGKNVQRELRRGGRRNWTHSDAFRVSLDQDVETETEPSDYSNGEGAVFNKSLSGSQTSSAWSNLSGFSSSASWEEVNYHVDDRSARKEPGKEHLVDTQCSTALSEELENDREGRAMHSLHSQLHDLSLQEPNNDNLEPSQNQPQQQMPLTPFSPHNTPGIFLAPGAGLLEGAPEGIQEVRNMGPRNTSAHSRPSYRSASWSSDSGRPKNMGTHPSVQKEEAFEIIVEFPETNCDVKDRQGKEQGEEISERGAGPTFKASPSWVDPEGETAESTEDAPLDFHRVLHNSLGNISMLPCSSFTPNWPVQNPDSRKSGGPVAEQGIDPDASTVDEEGQLLDSMDVPCTNGHGSHRLCILRQPPGQRAETPNSSVSGNILFPVLSEDCTTTEEGNQPGNMLNCSQNSSSSSVWWLKSPAFSSGSSEGDSPWSYLNSSGSSWVSLPGKMRKEILEARTLQPDDFEKLLAGVRHDWLFQRLENTGVFKPSQLHRAHSALLLKYSKKSELWTAQETIVYLGDYLTVKKKGRQRNAFWVHHLHQEEILGRYVGKDYKEQKGLWHHFTDVERQMTAQHYVTEFNKRLYEQNIPTQIFYIPSTILLILEDKTIKGCISVEPYILGEFVKLSNNTKVVKTEYKATEYGLAYGHFSYEFSNHRDVVVDLQGWVTGNGKGLIYLTDPQIHSVDQKVFTTNFGKRGIFYFFNNQHVECNEICHRLSLTRPSMEKPCT

SEQ ID NO: 10576 - protein, 496 aa, Homo sapiens
MASSTGDRSQAVRHGLRAKVLTLDGMNPRVRRVEYAVRGPIVQRALELEQELRQGVKKPFTEVIRANIGDAQAMGQRPITFLRQVLALCVNPDLLSSPNFPDDAKKRAERILQACGGHSLGAYSVSSGIQLIREDVARYIERRDGGIPADPNNVFLSTGASDAIVTVLKLLVAGEGHTRTGVLIPIPQYPLYSATLAELGAVQVDYYLDEERAWALDVAELHRALGQARDHCRPRALCVINPGNPTGQVQTRECIEAVIRFAFEERLFLLADEVYQDNVYAAGSQFHSFKKVLMEMGPPYAGQQELASFHSTSKGYMGECGFRGGYVEVVNMDAAVQQQMLKLMSVRLCPPVPGQALLDLVVSPPAPTDPSFAQFQAEKQAVLAELAAKAKLTEQVFNEAPGISCNPVQGAMYSFPRVQLPPRAVERAQELGLAPDMFFCLRLLEETGICVVPGSGFGQREGTYHFRMTILPPLEKLRLLLEKLSRFHAKFTLEYS

SEQ ID NO: 10577 - protein, 706 aa, Homo sapiens
MSSDASQGVITTPPPPSMPHKERYFDRINENDPEYIRERNMSPDLRQDFNMMEQRKRVTQILQSPAFREDLECLIQEQMKKGHNPTGLLALQQIADYIMANSFSGFSSPPLSLGMVTPINDLPGADTSSYVKGEKLTRCKLASLYRLVDLFGWAHLANTYISVRISKEQDHIIIIPRGLSFSEATASNLVKVNIIGEVVDQGSTNLKIDHTGFSPHAAIYSTRPDVKCVIHIHTLATAAVSSMKCGILPISQESLLLGDVAYYDYQGSLEEQEERIQLQKVLGPSCKVLVLRNHGVVALGETLEEAFHYIFNVQLACEIQVQALAGAGGVDNLHVLDFQKYKAFTYTVAASGGGGVNMGSHQKWKVGEIEFEGLMRTLDNLGYRTGYAYRHPLIREKPRHKSDVEIPATVTAFSFEDDTVPLSPLKYMAQRQQREKTRWLNSPNTYMKVNVPEESRNGETSPRTKITWMKAEDSSKVSGGTPIKIEDPNQFVPLNTNPNEVLEKRNKIREQNRYDLKTAGPQSQLLAGIVVDKPPSTMQFEDDDHGPPAPPNPFSHLTEGELEEYKRTIERKQQGLEDAEQELLSDDASSVSQIQSQTQSPQNVPEKLEENHELFSKSFISMEVPVMVVNGKDDMHDVEDELAKRVSRLSTSTTIENIEITIKSPEKIEEVLSPEGSPSKSPSKKKKKFRTPSFLKKNKKKEKVEA

SEQ ID NO: 10578 - protein, 674 aa, Homo sapiens
MSSDASQGVITTPPPPSMPHKERYFDRINENDPEYIRERNMSPDLRQDFNMMEQRKRVTQILQSPAFREDLECLIQEQMKKGHNPTGLLALQQIADYIMANSFSGFSSPPLSLGMVTPINDLPGADTSSYVKGEKLTRCKLASLYRLVDLFGWAHLANTYISVRISKEQDHIIIIPRGLSFSEATASNLVKVNIIGEVVDQGSTNLKIDHTGFSPHAAIYSTRPDVKCVIHIHTLATAAVSSMKCGILPISQESLLLGDVAYYDYQGSLEEQEERIQLQKVLGPSCKVLVLRNHGVVALGETLEEAFHYIFNVQLACEIQVQALAGAGGVDNLHVLDFQKYKAFTYTVAASGGGGVNMGSHQKWKVGEIEFEGLMRTLDNLGYRTGYAYRHPLIREKPRHKSDVEIPATVTAFSFEDDTVPLSPLKYMAQRQQREKTRWLNSPNTYMKVNVPEESRNGETSPRTKITWMKAEDSSKVSGGTPIKIEDPNQFVPLNTNPNEVLEKRNKIREQNRYDLKTAGPQSQLLAGIVVDKPPSTMQFEDDDHGPPAPPNPFSHLTEGELEEYKRTIERKQQGLEENHELFSKSFISMEVPVMVVNGKDDMHDVEDELAKRVSRLSTSTTIENIEITIKSPEKIEEVLSPEGSPSKSPSKKKKKFRTPSFLKKNKKKEKVEA

SEQ ID NO: 10579 - protein, 722 aa, Homo sapiens
MAVDGTLVYIRVTLLLLWLGVFLSISGYCQAGPSQHFTSPEVVIPLKVISRGRSAKAPGWLSYSLRFGGQKHVVHMRVKKLLVSRHLPVFTYTDDRALLEDQLFIPDDCYYHGYVEAAPESLVVFSACFGGFRGVLKISGLTYEIEPIRHSATFEHLVYKINSNETQFPAMRCGLTEKEVARQQLEFEEAENSALEPKSAGDWWTHAWFLELVVVVNHDFFIYSQSNISKVQEDVFLVVNIVDSMYKQLGTYIILIGIEIWNQGNVFPMTSIEQVLNDFSQWKQISLSQLQHDAAHMFIKNSLISILGLAYVAGICRPPIDCGVDNFQGDTWSLFANTVAHELGHTLGMQHDEEFCFCGERGCIMNTFRVPAEKFTNCSYADFMKTTLNQGSCLHNPPRLGEIFMLKRCGNGVVEREEQCDCGSVQQCEQDACCLLNCTLRPGAACAFGLCCKDCKFMPSGELCRQEVNECDLPEWCNGTSHQCPEDRYVQDGIPCSDSAYCYQKRCNNHDQHCREIFGKDAKSASQNCYKEINSQGNRFGHCGINGTTYLKCHISDVFCGRVQCENVRDIPLLQDHFTLQHTHINGVTCWGIDYHLRMNISDIGEVKDGTVCGPGKICIHKKCVSLSVLSHVCLPETCNMKGICNNKHHCHCGYGWSPPYCQHRGYGGSIDSGPASAKRGVFLPLIVIPSLSVLTFLFTVGLLMYLRQCSGPKETKAHSSG

SEQ ID NO: 10580 - protein, 576 aa, Homo sapiens
MASNNHWFQSSQVPSFAQMLKKNLPVQPATKTITTPTGWSSESYGLSKMASKVTQVTGNFPEPLLSKNLSSISNPVLPPKKIPKEFIMKYKRGEINPVSALHQFAQMQRVQLDLKETVTTGNVMGPYFAFCAVVDGIQYKTGLGQNKKESRSNAAKLALDELLQLDEPEPRILETSGPPPFPAEPVVLSELAYVSKVHYEGRHIQYAKISQIVKERFNQLISNRSEYLKYSSSLAAFIIERAGQHEVVAIGTGEYNYSQDIKPDGRVLHDTHAVVTARRSLLRYFYRQLLLFYSKNPAMMEKSIFCTEPTSNLLTLKQNINICLYMNQLPKGSAQIKSQLRLNPHSISAFEANEELCLHVAVEGKIYLTVYCPKDGVNRISSMSSSDKLTRWEVLGVQGALLSHFIQPVYISSILIGDGNCSDTRGLEIAIKQRVDDALTSKLPMFYLVNRPHISLVPSAYPLQMNLEYKFLSLNWAQGDVSLEIVDGLSGKITESSPFKSGMSMASRLCKAAMLSRFNLLAKEAKKELLEAGTYHAAKCMSASYQEAKCKLKSYLQQHGYGSWIVKSPCIEQFNM

SEQ ID NO: 10581 - protein, 565 aa, Homo sapiens
MASNNHWFQSSQVPSFAQMLKKNLPVQPATKTITTPTGWSSESYGLSKMASKVTQVTGNFPEPLLSKNLSSISNPVLPPKKIPKEFIMKYKRGEINPVSALHQFAQMQRVQLDLKETVTTGNVMGPYFAFCAVVDGIQYKTGLGQNKKESRSNAAKLALDELLQLDEPEPRILETSGPPPFPAEPVVLSELAYVSKVHYEGRHIQYAKISQIVKERFNQLISNRSEYLKYSSSLAAFIIERAGQHEVVAIGTGEYNYSQDIKPDGRVLHDTHAVVTARRSLLSKNPAMMEKSIFCTEPTSNLLTLKQNINICLYMNQLPKGSAQIKSQLRLNPHSISAFEANEELCLHVAVEGKIYLTVYCPKDGVNRISSMSSSDKLTRWEVLGVQGALLSHFIQPVYISSILIGDGNCSDTRGLEIAIKQRVDDALTSKLPMFYLVNRPHISLVPSAYPLQMNLEYKFLSLNWAQGDVSLEIVDGLSGKITESSPFKSGMSMASRLCKAAMLSRFNLLAKEAKKELLEAGTYHAAKCMSASYQEAKCKLKSYLQQHGYGSWIVKSPCIEQFNM

SEQ ID NO: 10582 - protein, 558 aa, Homo sapiens
MLKKNLPVQPATKTITTPTGWSSESYGLSKMASKVTQVTGNFPEPLLSKNLSSISNPVLPPKKIPKEFIMKYKRGEINPVSALHQFAQMQRVQLDLKETVTTGNVMGPYFAFCAVVDGIQYKTGLGQNKKESRSNAAKLALDELLQLDEPEPRILETSGPPPFPAEPVVLSELAYVSKVHYEGRHIQYAKISQIVKERFNQLISNRSEYLKYSSSLAAFIIERAGQHEVVAIGTGEYNYSQDIKPDGRVLHDTHAVVTARRSLLRYFYRQLLLFYSKNPAMMEKSIFCTEPTSNLLTLKQNINICLYMNQLPKGSAQIKSQLRLNPHSISAFEANEELCLHVAVEGKIYLTVYCPKDGVNRISSMSSSDKLTRWEVLGVQGALLSHFIQPVYISSILIGDGNCSDTRGLEIAIKQRVDDALTSKLPMFYLVNRPHISLVPSAYPLQMNLEYKFLSLNWAQGDVSLEIVDGLSGKITESSPFKSGMSMASRLCKAAMLSRFNLLAKEAKKELLEAGTYHAAKCMSASYQEAKCKLKSYLQQHGYGSWIVKSPCIEQFNM

SEQ ID NO: 10583 - protein, 583 aa, Homo sapiens
MASASQGADDDGSRRKPRLAASLQISPQPRPWRPLPAQAQSAWGPAPAPATYRAEGGWPQVSVLRDSGPGAGAGVGELGAARAWENLGEQMGKAPRVPVPPAGLSLPLKDPPASQAVSLLTEYAASLGIFLLFREDQPPGPCFPFSVSAELDGVVCPAGTANSKTEAKQQAALSALCYIRSQLENPESPQTSSRPPLAPLSVENILTHEQRCAALVSAGFDLLLDERSPYWACKGTVAGVILEREIPRARGHVKEIYKLVALGTGSSCCAGWLEFSGQQLHDCHGLVIARRALLRFLFRQLLLATQGGPKGKEQSVLAPQPGPGPPFTLKPRVFLHLYISNTPKGAARDIYLPPTSEGGLPHSPPMRLQAHVLGQLKPVCYVAPSLCDTHVGCLSASDKLARWAVLGLGGALLAHLVSPLYSTSLILADSCHDPPTLSRAIHTRPCLDSVLGPCLPPPYVRTALHLFAGPPVAPSEPTPDTCRGLSLNWSLGDPGIEVVDVATGRVKANAALGPPSRLCKASFLRAFHQAARAVGKPYLLALKTYEAAKAGPYQEARRQLSLLLDQQGLGAWPSKPLVGKFRN

SEQ ID NO: 10584 - protein, 665 aa, Homo sapiens
MASASQGADDDGSRRKPRLAASLQISPQPRPWRPLPAQAQSAWGPAPAPATYRAEGGWPQVSVLRDSGPGAGAGVGELGAARAWENLGEQMGKAPRVPVPPAGLSLPLKDPPASQAVSLLTEYAASLGIFLLFREDQPPGKVFKYRAPGGEELKAMCLWQVEVLRAFLLRTGWRGLWRGDLDLGPDSSWANRLPFLLICEMESRIPAVEELGPCFPFSVSAELDGVVCPAGTANSKTEAKQQAALSALCYIRSQLENPESPQTSSRPPLAPLSVENILTHEQRCAALVSAGFDLLLDERSPYWACKGTVAGVILERGWAVSAPSCTEIPRARGHVKEIYKLVALGTGSSCCAGWLEFSGQQLHDCHGLVIARRALLRFLFRQLLLATQGGPKGKEQSVLAPQPGPGPPFTLKPRVFLHLYISNTPKGAARDIYLPPTSEGGLPHSPPMRLQAHVLGQLKPVCYVAPSLCDTHVGCLSASDKLARWAVLGLGGALLAHLVSPLYSTSLILADSCHDPPTLSRAIHTRPCLDSVLGPCLPPPYVRTALHLFAGPPVAPSEPTPDTCRGLSLNWSLGDPGIEVVDVATGRVKANAALGPPSRLCKASFLRAFHQAARAVGKPYLLALKTYEAAKAGPYQEARRQLSLLLDQQGLGAWPSKPLVGKFRN

SEQ ID NO: 10585 - protein, 99 aa, Homo sapiens
MAEGNTLISVDYEIFGKVQGVFFRKHTQAEGKKLGLVGWVQNTDRGTVQGQLQGPISKVRHMQEWLETRGSPKSHIDKANFNNEKVILKLDYSDFQIVK

SEQ ID NO: 10586 - protein, 55 aa, Homo sapiens
MAEGNTLISVDYEIFGKVQGVFFRKHTQEMTVENRIAETHSKSCVPVSFATSYAG

SEQ ID NO: 10587 - protein, 104 aa, Homo sapiens
MGQLCCFPFSRDEGKISELESSSSAVLQRYSKDIPSWSSGEKNGGEPDDAELVRLSKRLVENAVLKAVQQYLEETQNKNKPGEGSSVKTEAADQNGNDNENNRK

SEQ ID NO: 10588 - protein, 81 aa, Homo sapiens
MGQLCCFPFSRDEGKISEKNGGEPDDAELVRLSKRLVENAVLKAVQQYLEETQNKNKPGEGSSVKTEAADQNGNDNENNRK

SEQ ID NO: 10589 - protein, 114 aa, Homo sapiens
MAEPEQDIGEKPAVRIQNPKENDFIEIELKRQELSYQNLLNVSCCELGIKPERVEKIRKLPNTLLRKDKDIRRLRDFQEVELILMKNGSSRLTEYVPSLTERPCYDSKAAKMTY

SEQ ID NO: 10590 - protein, 221 aa, Homo sapiens
MAGTGLLALRTLPGPSWVRGSGPSVLSRLQDAAVVRPGFLSTAEEETLSRELEPELRRRRYEYDHWDAAIHGFRETEKSRWSEASRAILQRVQAAAFGPGQTLLSSVHVLDLEARGYIKPHVDSIKFCGATIAGLSLLSPSVMRLVHTQEPGEWLELLLEPGSLYILRGSARYDFSHEILRDEESFFGERRIPRGRRISVICRSLPEGMGPGESGQPPPAC

SEQ ID NO: 10591 - protein, 254 aa, Homo sapiens
MGAAGSDGRCCVRSGRAGTGGAGSKWVVMDLWTGGAGSRRAVLGPDGRWVRWAVLGSVRMGGARSKWAAPDPMGGAGFGPDWRVRVWTGGAGSKWGCSAGSGRAVLGPNGRWVPWAVLGSVRTGGAGSKWAALGPMGGTGSGRAVLGLDGRCSIQMGAAGSGRAVLGSVRTGGAGSKWAVLGSAGDRWAWRHRYGAQGRWSALSEGPCAPRARCSSCPRIAPGLLRVSSRVIPFRWVTSKPTFSSCFLPRRTRC

SEQ ID NO: 10592 - protein, 240 aa, Homo sapiens
MGAAGSDGRCCVRSGRAGTGGAGSRRAVLGPDGRWVRWAVLGSVRMGGARSKWAAPDPMGGAGFGPDWRVRVWTGGAGSKWGCSAGSGRAVLGPNGRWVPWAVLGSVRTGGAGSKWAALGPMGGTGSGRAVLGLDGRCSIQMGAAGSGRAVLGSVRTGGAGSKWAVLGSAGDRWAWRHRYGAQGRWSALSEGPCAPRARCSSCPRIAPGLLRVSSRVIPFRWVTSKPTFSSCFLPRRTRC

SEQ ID NO: 10593 - protein, 730 aa, Homo sapiens
MEELIVELRLFLELLDHEYLTSTVREKKAVITNILLRIQSSKGFDVKDHAQKQETANSLPAPPQMPLPEIPQPWLPPDSGPPPLPTSSLPEGYYEEAVPLSPGKAPEYITSNYDSDAMSSSYESYDEEEEDGKGKKTRHQWPSEEASMDLVKDAKICAFLLRKKRFGQWTKLLCVIKDTKLLCYKSSKDQQPQMELPLQGCNITYIPKDSKKKKHELKITQQGTDPLVLAVQSKEQAEQWLKVIKEAYSGCSGPVDSECPPPPSSPVHKAELEKKLSSERPSSDGEGVVENGITTCNGKEQVKRKKSSKSEAKGTVSKVTGKKITKIISLGKKKPSTDEQTSSAEEDVPTCGYLNVLSNSRWRERWCRVKDNKLIFHKDRTDLKTHIVSIPLRGCEVIPGLDSKHPLTFRLLRNGQEVAVLEASSSEDMGRWIGILLAETGSSTDPEALHYDYIDVEMSASVIQTAKQTFCFMNRRVISANPYLGGTSNGYAHPSGTALHYDDVPCINGSLKGKKPPVASNGVTGKGKTLSSQPKKADPAAVVKRTGSNAAQYKYGKNRVEADAKRLQTKEEELLKRKEALRNRLAQLRKERKDLRAAIEVNAGRKPQAILEEKLKQLEEECRQKEAERVSLELELTEVKESLKKALAGGVTLGLAIEPKSGTSSPQSPVFRHRTLENSPISSCDTSDTEGPVPVNSAAVLKKSQAAPGSSPCRGHVLRKAKEWELKNGT

SEQ ID NO: 10594 - protein, 814 aa, Homo sapiens
MEELIVELRLFLELLDHEYLTSTVREKKAVITNILLRIQSSKGFDVKDHAQKQETANSLPAPPQMPLPEIPQPWLPPDSGPPPLPTSSLPEGYYEEAVPLSPGKAPEYITSNYDSDAMSSSYESYDEEEEDGKGKKTRHQWPSEEASMDLVKDAKICAFLLRKKRFGQWTKLLCVIKDTKLLCYKSSKDQQPQMELPLQGCNITYIPKDSKKKKHELKITQQGTDPLVLAVQSKEQAEQWLKVIKEAYSGCSGPVDSECPPPPSSPVHKAELEKKLSSERPSSDGEGVVENGITTCNGKEQVKRKKSSKSEAKGTVSKVTGKKITKIISLGKKKPSTDEQTSSAEEDVPTCGYLNVLSNSRWRERWCRVKDNKLIFHKDRTDLKTHIVSIPLRGCEVIPGLDSKHPLTFRLLRNGQEVAVLEASSSEDMGRWIGILLAETGSSTDPEALHYDYIDVEMSASVIQTAKQTFCFMNRRVISANPYLGGTSNGYAHPSGTALHYDDVPCINGSWEPEDGFPASCSRGLGEEVLYDNAGLYDNLPPPHIFARYSPADRKASRLSADKLSSNHYKYPASAQSVTNTSSVGRASLGLNSQLKGKKPPVASNGVTGKGKTLSSQPKKADPAAVVKRTGSNAAQYKYGKNRVEADAKRLQTKEEELLKRKEALRNRLAQLRKERKDLRAAIEVNAGRKPQAILEEKLKQLEEECRQKEAERVSLELELTEVKESLKKALAGGVTLGLAIEPKSGTSSPQSPVFRHRTLENSPISSCDTSDTEGPVPVNSAAVLKKSQAAPGSSPCRGHVLRKAKEWELKNGT

SEQ ID NO: 10595 - protein, 824 aa, Homo sapiens
MRGLGLWLLGAMMLPAIAPSRPWALMEQYEVVLPWRLPGPRVRRALPSHLGLHPERVSYVLGATGHNFTLHLRKNRDLLGSGYTETYTAANGSEVTEQPRGQDHCFYQGHVEGYPDSAASLSTCAGLRGFFQVGSDLHLIEPLDEGGEGGRHAVYQAEHLLQTAGTCGVSDDSLGSLLGPRTAAVFRPRPGDSLPSRETRYVELYVVVDNAEFQMLGSEAAVRHRVLEVVNHVDKLYQKLNFRVVLVGLEIWNSQDRFHVSPDPSVTLENLLTWQARQRTRRHLHDNVQLITGVDFTGTTVGFARVSAMCSHSSGAVNQDHSKNPVGVACTMAHEMGHNLGMDHDENVQGCRCQERFEAGRCIMAGSIGSSFPRMFSDCSQAYLESFLERPQSVCLANAPDLSHLVGGPVCGNLFVERGEQCDCGPPEDCRNRCCNSTTCQLAEGAQCAHGTCCQECKVKPAGELCRPKKDMCDLEEFCDGRHPECPEDAFQENGTPCSGGYCYNGACPTLAQQCQAFWGPGGQAAEESCFSYDILPGCKASRYRADMCGVLQCKGGQQPLGRAICIVDVCHALTTEDGTAYEPVPEGTRCGPEKVCWKGRCQDLHVYRSSNCSAQCHNHGVCNHKQECHCHAGWAPPHCAKLLTEVHAASGSLPVFVVVVLVLLAVVLVTLAGIIVYRKARSRILSRNVAPKTTMGRSNPLFHQAASRVPAKGGAPAPSRGPQELVPTTHPGQPARHPASSVALKRPPPAPPVTVSSPPFPVPVYTRQAPKQVIKPTFAPPVPPVKPGAGAANPGPAEGAVGPKVALKPPIQRKQGAGAPTAP

SEQ ID NO: 10596 - protein, 733 aa, Homo sapiens
MRGLGLWLLGAMMLPGPAPREGELRPWGHRAQLHPPPAEEQGPAGLRLHRDLYGCQWLRGDGAASRAGPLLLPGPRRGVPGLSRQPQHLCRPQVGSDLHLIEPLDEGGEGGRHAVYQAEHLLQTAGTCGVSDDSLGSLLGPRTAAVFRPRPGDSLPSRETRYVELYVVVDNAEFQMLGSEAAVRHRVLEVVNHVDKLYQKLNFRVVLVGLEIWNSQDRFHVSPDPSVTLENLLTWQARQRTRRHLHDNVQLITGVDFTGTTVGFARVSAMCSHSSGAVNQDHSKNPVGVACTMAHEMGHNLGMDHDENVQGCRCQERFEAGRCIMAGSIGSSFPRMFSDCSQAYLESFLERPQSVCLANAPDLSHLVGGPVCGNLFVERGEQCDCGPPEDCRNRCCNSTTCQLAEGAQCAHGTCCQECKVKPAGELCRPKKDMCDLEEFCDGRHPECPEDAFQENGTPCSGGYCYNGACPTLAQQCQAFWGPGGQAAEESCFSYDILPGCKASRYRADMCGVLQCKGGQQPLGRAICIVDVCHALTTEDGTAYEPVPEGTRCGPEKVCNHKQECHCHAGWAPPHCAKLLTEVHAASGSLPVFVVVVLVLLAVVLVTLAGIIVYRKARSRILSRNVAPKTTMGRSNPLFHQAASRVPAKGGAPAPSRGPQELVPTTHPGQPARHPASSVALKRPPPAPPVTVSSPPFPVPVYTRQAPKQGAVGPKVALKPPIQRKQGAGAPTAP

SEQ ID NO: 10597 - protein, 742 aa, Homo sapiens
MRGLGLWLLGAMMLPAIAPSRPWALMEQYEVVLPWRLPGPRVRRALPSHLGLHPERVSYVLGATGHNFTLHLRKNRDLLGSGYTETYTAANGSEVTEQPRGQDHCFYQGHVEGYPDSAASLSTCAGLRGFFQVGSDLHLIEPLDEGGEGGRHAVYQAEHLLQTAGTCGVSDDSLGSLLGPRTAAVFRPRPGDSLPSRETRYVELYVVVDNAEFQMLGSEAAVRHRVLEVVNHVDKLYQKLNFRVVLVGLEIWNSQDRFHVSPDPSVTLENLLTWQARQRTRRHLHDNVQLITGVDFTGTTVGFARVSAMCSHSSGAVNQDHSKNPVGVACTMAHEMGHNLGMDHDENVQGCRCQERFEAGRCIMAGSIGSSFPRMFSDCSQAYLESFLERPQSVCLANAPDLSHLVGGPVCGNLFVERGEQCDCGPPEDCRNRCCNSTTCQLAEGAQCAHGTCCQECKVKPAGELCRPKKDMCDLEEFCDGRHPECPEDAFQENGTPCSGGYCYNGACPTLAQQCQAFWGPGGQAAEESCFSYDILPGCKASRYRADMCGVLQCKGGQQPLGRAICIVDVCHALTTEDGTAYEPVPEGTRCGPEKVCWKGRCQDLHVYRSSNCSAQCHNHGVCNHKQECHCHAGWAPPHCAKLLTEVHAGCQPRAGQGRGSSPIQGPPRAGPHHPPGPARPTPGLLGGSEEAAPCSSGHCVQPTLPSSCLHPAGTKAGHQANVRTPSAPSQTRGWCGQPWSS

SEQ ID NO: 10598 - protein, 375 aa, Homo sapiens
MEEEIAALVIDNGSGMCKAGFAGDDAPRAVFPSIVGRPRHQGVMVGMGQKDSYVGDEAQSKRGILTLKYPIEHGIVTNWDDMEKIWHHTFYNELRVAPEEHPVLLTEAPLNPKANREKMTQIMFETFNTPAMYVAIQAVLSLYASGRTTGIVMDSGDGVTHTVPIYEGYALPHAILRLDLAGRDLTDYLMKILTERGYSFTTTAEREIVRDIKEKLCYVALDFEQEMATAASSSSLEKSYELPDGQVITIGNERFRCPEALFQPSFLGMESCGIHETTFNSIMKCDVDIRKDLYANTVLSGGTTMYPGIADRMQKEITALAPSTMKIKIIAPPERKYSVWIGGSILASLSTFQQMWISKQEYDESGPSIVHRKCF

SEQ ID NO: 10599 - protein, 893 aa, Homo sapiens
MSSKKNRKRLNQSAENGSSLPSAASSCAEARAPSAGSDFAATSGTLTVTNLLEKVDDKIPKTFQNSLIHLGLNTMKSANICIGRPVLLTSLNGKQEVYTAWPMAGFPGGKVGLSEMAQKNVGVRPGDAIQVQPLVGAVLQAEEMDVALSDKDMEINEEELTGCILRKLDGKIVLPGNFLYCTFYGRPYKLQVLRVKGADGMILGGPQSDSDTDAQRMAFEQSSMETSSLELSLQLSQLDLEDTQIPTSRSTPYKPIDDRITNKASDVLLDVTQSPGDGSGLMLEEVTGLKCNFESAREGNEQLTEEERLLKFSIGAKCNTDTFYFISSTTRVNFTEIDKNSKEQDNQFKVTYDMIGGLSSQLKAIREIIELPLKQPELFKSYGIPAPRGVLLYGPPGTGKTMIARAVANEVGAYVSVINGPEIISKFYGETEAKLRQIFAEATLRHPSIIFIDELDALCPKREGAQNEVEKRVVASLLTLMDGIGSEVSEGQVLVLGATNRPHALDAALRRPGRFDKEIEIGVPNAQDRLDILQKLLRRVPHLLTEAELLQLANSAHGYVGADLKVLCNEAGLCALRRILKKQPNLPDVKVAGLVKITLKDFLQAMNDIRPSAMREIAIDVPNVSWSDIGGLESIKLKLEQAVEWPLKHPESFIRMGIQPPKGVLLYGPPGCSKTMIAKALANESGLNFLAIKGPELMNKYVGESERAVRETFRKARAVAPSIIFFDELDALAVERGSSLGAGNVADRVLAQLLTEMDGIEQLKDVTILAATNRPDRIDKALMRPGRIDRIIYVPLPDAATRREIFKLQFHSMPVSNEVDLDELILQTDAYSGAEIVAVCREAALLALEEDIQANLIMKRHFTQALSTVTPRIPESLRRFYEDYQEKSGLHTL

SEQ ID NO: 10600 - protein, 790 aa, Homo sapiens
MSSKKNRKRLNQSAENGSSLPSAASSCAEARAPSAGSDFAATSGTLTVTNLLEKVDDKIPKTFQNSLIHLGLNTMKSANICIGRPVLLTSLNGKQEVYTAWPMAGFPGGKVGLSEMAQKNVGVRPGDAIQVQPLVGAVLQAEEMDVALSDKDMEINEEELTGCILRKLDGKIVLPGNFLYCTFYGRPYKLQVLRVKGADGMILGGPQSDSDTDAQRMAFEQSSMETSSLELSLQLSQLDLEDTQIPTSRSTPYKPIDDRITNKASDVLLDVTQSPGDGSGLMLEEVTGLKCNFESAREGNEQLTEEERLLKFSIGAKCNTDTFYFISSTTRVNFTEIDKNSKEQDNQFKVTYDMIGGLSSQLKAIREIIELPLKQPELFKSYGIPAPRGVLLYGPPGTGKTMIARAVANEVGAYVSVINGPEIISKFYGETEAKLRQIFAEATLRHPSIIFIDELDALCPKREGAQNEVEKRVVASLLTLMDGIGSEVSEGQVLVLGATNRPHALDAALRRPGRFDKEIEIGVPNAQDRLDILQKLLRRVPHLLTEAELLQLANSAHGYVGADLKVLCNEAGLCALRRILKKQPNLPDVKVAGLVKITLKDFLQAMNDIRPSAMREIAIDVPNVSWSDIGGLESIKLKLEQAVEWPLKHPESFIRMGIQPPKGVLLYGPPGCSKTMIAKALANESGLNFLAIKGPELMNKYVGESERAVRETFRKARAVAPSIIFFDELDALAVERGSSLGAGNVADRVLAQLLTEMDGIEQLKDVTILAATNRPDRIDKVPPSQTFLLL

SEQ ID NO: 10601 - protein, 696 aa, Homo sapiens
MSSKKNRKRLNQSAENGSSLPSAASSCAEARAPSAGSDFAATSGTLTVTNLLEKVDDKIPKTFQNSLIHLGLNTMKSANICIGRPVLLTSLNGKQEVYTAWPMAGFPGGKVGLSEMAQKNVGVRPGDAIQVQPLVGAVLQAEEMDVALSDKDMEINEEELTGCILRKLDGKIVLPGNFLYCTFYGRPYKLQVLRVKGADGMILGGPQSDSDTDAQRMAFEQSSMETSSLELSLQLSQLDLEDTQIPTSRSTPYKPIDDRITNKASDVLLDVTQSPGDGSGLMLEEVTGLKCNFESAREGNEQLTEEERLLKFSIGAKCNTDTFYFISSTTRVNFTEIDKNSKEQDNQFKVTYDMIGGLSSQLKAIREIIELPLKQPELFKSYGIPAPRGVLLYGPPGTGKTMIARAVANEVGAYVSVINGPEIISKFYGETEAKLRQIFAEATLRHPSIIFIDELDALCPKREGAQNEVEKRVVASLLTLMDGIGSEVSEGQVLVLGATNRPHALDAALRRPGRFDKEIEIGVPNAQDRLDILQKLLRRVPHLLTEAELLQLANSAHGYVGADLKVLCNEAGLCALRRILKKQPNLPDVKVAGLVKITLKDFLQAMNDIRPSAMREIAIDVPNVSWSDIGGLESIKLKLEQAVEWPLKHPESFIRMGIQPPKGVLLYGPPGCSKTMIAKALANESGLNFLAIKVGC

SEQ ID NO: 10602 - protein, 297 aa, Homo sapiens
MKHIINSYENINNTARNNSDCPRVVLPEEIFFTISIVGVLENLIVLLAVFKNKNLQAPMYFFICSLAISDMLGSLYKILENILIILRNMGYLKPRGSFETTADDIIDSLFVLSLLGSIFSLSVIAADRYITIFHALRYHSIVTMRRTVVVLTVIWTFCTGTGITMVIFSHHVPTVITFTSLFPLMLVFILCLYVHMFLLARSHTRKISTLPRANMKGAITLTILLGVFIFCWAPFVLHVLLMTFCPSNPYCACYMSLFQVNGMLIMCNAVIDPFIYAFRSPELRDAFKKMIFCSRYW

SEQ ID NO: 10603 - protein, 797 aa, Homo sapiens
MAHRCLRLWGRGGCWPRGLQQLLVPGGVGPGEQPCLRTLYRFVTTQARASRNSLLTDIIAAYQRFCSRPPKGFEKYFPNGKNGKKASEPKEVMGEKKESKPAATTRSSGGGGGGGGKRGGKKDDSHWWSRFQKGDIPWDDKDFRMFFLWTALFWGGVMFYLLLKRSGREITWKDFVNNYLSKGVVDRLEVVNKRFVRVTFTPGKTPVDGQYVWFNIGSVDTFERNLETLQQELGIEGENRVPVVYIAESDGSFLLSMLPTVLIIAFLLYTIRRGPAGIGRTGRGMGGLFSVGETTAKVLKDEIDVKFKDVAGCEEAKLEIMEFVNFLKNPKQYQDLGAKIPKGAILTGPPGTGKTLLAKATAGEANVPFITVSGSEFLEMFVGVGPARVRDLFALARKNAPCILFIDEIDAVGRKRGRGNFGGQSEQENTLNQLLVEMDGFNTTTNVVILAGTNRPDILDPALLRPGRFDRQIFIGPPDIKGRASIFKVHLRPLKLDSTLEKDKLARKLASLTPGFSGADVANVCNEAALIAARHLSDSINQKHFEQAIERVIGGLEKKTQVLQPEEKKTVAYHEAGHAVAGWYLEHADPLLKVSIIPRGKGLGYAQYLPKEQYLYTKEQLLDRMCMTLGGRVSEEIFFGRITTGAQDDLRKVTQSAYAQIVQFGMNEKVGQISFDLPRQGDMVLEKPYSEATARLIDDEVRILINDAYKRTVALLTEKKADVEKVALLLLEKEVLDKNDMVELLGPRPFAEKSTYEEFVEGTGSLDEDTSLPEGLKDWNKEREKEKEEPPGEKVAN

SEQ ID NO: 10604 - protein, 697 aa, Homo sapiens
MQTQEILRILRLPELGDLGQFFRSLSATTLVSMGALAAILAYWFTHRPKALQPPCNLLMQSEEVEDSGGARRSVIGSGPQLLTHYYDDARTMYQVFRRGLSISGNGPCLGFRKPKQPYQWLSYQEVADRAEFLGSGLLQHNCKACTDQFIGVFAQNRPEWIIVELACYTYSMVVVPLYDTLGPGAIRYIINTADISTVIVDKPQKAVLLLEHVERKETPGLKLIILMDPFEEALKERGQKCGVVIKSMQAVEDCGQENHQAPVPPQPDDLSIVCFTSGTTGNPKGAMLTHGNVVADFSGFLKVTEKVIFPRQDDVLISFLPLAHMFERVIQSVVYCHGGRVGFFQGDIRLLSDDMKALCPTIFPVVPRLLNRMYDKIFSQANTPLKRWLLEFAAKRKQAEVRSGIIRNDSIWDELFFNKIQASLGGCVRMIVTGAAPASPTVLGFLRAALGCQVYEGYGQTECTAGCTFTTPGDWTSGHVGAPLPCNHIKLVDVEELNYWACKGEGEICVRGPNVFKGYLKDPDRTKEALDSDGWLHTGDIGKWLPAGTLKIIDRKKHIFKLAQGEYVAPEKIENIYIRSQPVAQIYVHGDSLKAFLVGIVVPDPEVMPSWAQKRGIEGTYADLCTNKDLKKAILEDMVRLGKESGLHSFEQVKAIHIHSDMFSVQNGLLTPTLKAKRPELREYFKKQIEELYSISM

SEQ ID NO: 10605 - protein, 722 aa, Homo sapiens
MLTFFLVSGGSLWLFVEFVLSLLEKMQTQEILRILRLPELGDLGQFFRSLSATTLVSMGALAAILAYWFTHRPKALQPPCNLLMQSEEVEDSGGARRSVIGSGPQLLTHYYDDARTMYQVFRRGLSISGNGPCLGFRKPKQPYQWLSYQEVADRAEFLGSGLLQHNCKACTDQFIGVFAQNRPEWIIVELACYTYSMVVVPLYDTLGPGAIRYIINTADISTVIVDKPQKAVLLLEHVERKETPGLKLIILMDPFEEALKERGQKCGVVIKSMQAVEDCGQENHQAPVPPQPDDLSIVCFTSGTTGNPKGAMLTHGNVVADFSGFLKVTEKVIFPRQDDVLISFLPLAHMFERVIQSVVYCHGGRVGFFQGDIRLLSDDMKALCPTIFPVVPRLLNRMYDKIFSQANTPLKRWLLEFAAKRKQAEVRSGIIRNDSIWDELFFNKIQASLGGCVRMIVTGAAPASPTVLGFLRAALGCQVYEGYGQTECTAGCTFTTPGDWTSGHVGAPLPCNHIKLVDVEELNYWACKGEGEICVRGPNVFKGYLKDPDRTKEALDSDGWLHTGDIGKWLPAGTLKIIDRKKHIFKLAQGEYVAPEKIENIYIRSQPVAQIYVHGDSLKAFLVGIVVPDPEVMPSWAQKRGIEGTYADLCTNKDLKKAILEDMVRLGKESGLHSFEQVKAIHIHSDMFSVQNGLLTPTLKAKRPELREYFKKQIEELYSISM

SEQ ID NO: 10606 - protein, 667 aa, Homo sapiens
MQTQEILRILRLPELGDLGQFFRSLSATTLVSMGALAAILAYWFTHRPKALQPPCNLLMQSEEVEDSGGARRSVIGSGPQLLTHYYDDARTMYQVFRRGLSISGNGPCLGFRKPKQPYQWLSYQEVADRAEFLGSGLLQHNCKACTDQFIGVFAQNRPEWIIVELACYTYSMVVVPLYDTLGPGAIRYIINTADISTVIVDKPQKAVLLLEHVERKETPGLKLIILMDPFEEALKERGQKCGVVIKSMQAVEDCGQENHQAPVPPQPDDLSIVCFTSGTTGNPKGAMLTHGNVVADFSGFLKVTESQWAPTCADVHISYLPLAHMFERMVQSVVYCHGGRVGFFQGDIRLLSDDMKALCPTIFPVVPRLLNRMYDKIFSQANTPLKRWLLEFAAKRKQAEVRSGIIRNDSIWDELFFNKIQASLGGCVRMIVTGAAPASPTVLGFLRAALGCQVYEGYGQTECTAGCTFTTPGDWTSGHVGAPLPCNHIKLVDVEELNYWACKGEGEICVRGPNVFKGYLKDPDRTKEALDSDGWLHTGDIGKWLPAGTLKIIDRKKHIFKLAQGEYVAPEKIENIYIRSQPVAQIYVHGDSLKAFLVGIVVPDPEVMPSWAQKRGIEGTYADLCTNKDLKKAILEDMVRLGKESGLHSFEQDLPQCLIQIKVFSKY

SEQ ID NO: 10607 - protein, 697 aa, Homo sapiens
MQTQEILRILRLPELGDLGQFFRSLSATTLVSMGALAAILAYWFTHRPKALQPPCNLLMQSEEVEDSGGARRSVIGSGPQLLTHYYDDARTMYQVFRRGLSISGNGPCLGFRKPKQPYQWLSYQEVADRAEFLGSGLLQHNCKACTDQFIGVFAQNRPEWIIVELACYTYSMVVVPLYDTLGPGAIRYIINTADISTVIVDKPQKAVLLLEHVERKETPGLKLIILMDPFEEALKERGQKCGVVIKSMQAVEDCGQENHQAPVPPQPDDLSIVCFTSGTTGNPKGAMLTHGNVVADFSGFLKVTESQWAPTCADVHISYLPLAHMFERMVQSVVYCHGGRVGFFQGDIRLLSDDMKALCPTIFPVVPRLLNRMYDKIFSQANTPLKRWLLEFAAKRKQAEVRSGIIRNDSIWDELFFNKIQASLGGCVRMIVTGAAPASPTVLGFLRAALGCQVYEGYGQTECTAGCTFTTPGDWTSGHVGAPLPCNHIKLVDVEELNYWACKGEGEICVRGPNVFKGYLKDPDRTKEALDSDGWLHTGDIGKWLPAGTLKIIDRKKHIFKLAQGEYVAPEKIENIYIRSQPVAQIYVHGDSLKAFLVGIVVPDPEVMPSWAQKRGIEGTYADLCTNKDLKKAILEDMVRLGKESGLHSFEQVKAIHIHSDMFSVQNGLLTPTLKAKRPELREYFKKQIEELYSISM

SEQ ID NO: 10608 - protein, 690 aa, Homo sapiens
MQTQEILRILRLPELGDLGQFFRSLSATTLVSMGALAAILAYWFTHRPKALQPPCNLLMQSEEVEDSGGARRSVIGSGPQLLTHYYDDARTMYQVFRRGLSISGNGPCLGFRKPKQPYQWLSYQEVADRAEFLGSGLLQHNCKACTDQFIGVFAQNRPEWIIVELACYTYSMVVVPLYDTLGPGAIRYIINTADISTVIVDKPQKAVLLLEHVERKETPGLKLIILMDPFEEALKERGQKCGVVIKSMQAVEDCGQENHQAPVPPQPDDLSIVCFTSGTTGNPKGAMLTHGNVVADFSGFLKVTEDDVLISFLPLAHMFERVIQSVVYCHGGRVGFFQGDIRLLSDDMKALCPTIFPVVPRLLNRMYDKIFSQANTPLKRWLLEFAAKRKQAEVRSGIIRNDSIWDELFFNKIQASLGGCVRMIVTGAAPASPTVLGFLRAALGCQVYEGYGQTECTAGCTFTTPGDWTSGHVGAPLPCNHIKLVDVEELNYWACKGEGEICVRGPNVFKGYLKDPDRTKEALDSDGWLHTGDIGKWLPAGTLKIIDRKKHIFKLAQGEYVAPEKIENIYIRSQPVAQIYVHGDSLKAFLVGIVVPDPEVMPSWAQKRGIEGTYADLCTNKDLKKAILEDMVRLGKESGLHSFEQVKAIHIHSDMFSVQNGLLTPTLKAKRPELREYFKKQIEELYSISM

SEQ ID NO: 10609 - protein, 712 aa, Homo sapiens
MQTQEILRILRLPELGDLGQFFRSLSATTLVSMGALAAILAYWFTHRPKALQPPCNLLMQSEEVEDSGGARRSVIGSGPQLLTHYYDDARTMYQVFRRGLSISGNGPCLGFRKPKQPYQWLSYQEVADRAEFLGSGLLQHNCKACTDQFIGVFAQNRPEWIIVELACYTYSMVVVPLYDTLGPGAIRYIINTGLSCQEGASATASTQADISTVIVDKPQKAVLLLEHVERKETPGLKLIILMDPFEEALKERGQKCGVVIKSMQAVEDCGQENHQAPVPPQPDDLSIVCFTSGTTGNPKGAMLTHGNVVADFSGFLKVTEKVIFPRQDDVLISFLPLAHMFERVIQSVVYCHGGRVGFFQGDIRLLSDDMKALCPTIFPVVPRLLNRMYDKIFSQANTPLKRWLLEFAAKRKQAEVRSGIIRNDSIWDELFFNKIQASLGGCVRMIVTGAAPASPTVLGFLRAALGCQVYEGYGQTECTAGCTFTTPGDWTSGHVGAPLPCNHIKLVDVEELNYWACKGEGEICVRGPNVFKGYLKDPDRTKEALDSDGWLHTGDIGKWLPAGTLKIIDRKKHIFKLAQGEYVAPEKIENIYIRSQPVAQIYVHGDSLKAFLVGIVVPDPEVMPSWAQKRGIEGTYADLCTNKDLKKAILEDMVRLGKESGLHSFEQVKAIHIHSDMFSVQNGLLTPTLKAKRPELREYFKKQIEELYSISM

SEQ ID NO: 10610 - protein, 622 aa, Homo sapiens
MQTQEILRILRLPELGDLGQFFRSLSATTLDSGGARRSVIGSGPQLLTHYYDDARTMYQVFRRGLSISGNGPCLGFRKPKQPYQWLSYQEVADRAEFLGSGLLQHNCKACTDQFIGVFAQNRPEWIIVELACYTYSMVVVPLYDTLGPGAIRYIINTADISTVIVDKPQKAVLLLEHVERKETPGLKLIILMDPFEEALKERGQKCGVVIKSMQAVEDCGQENHQAPVPPQPDDLSIVCFTSGTTGNPKGAMLTHGNVVADFSGFLKVTEGDIRLLSDDMKALCPTIFPVVPRLLNRMYDKIFSQANTPLKRWLLEFAAKRKQAEVRSGIIRNDSIWDELFFNKIQASLGGCVRMIVTGAAPASPTVLGFLRAALGCQVYEGYGQTECTAGCTFTTPGDWTSGHVGAPLPCNHIKLVDVEELNYWACKGEGEICVRGPNVFKGYLKDPDRTKEALDSDGWLHTGDIGKWLPAGTLKIIDRKKHIFKLAQGEYVAPEKIENIYIRSQPVAQIYVHGDSLKAFLVGIVVPDPEVMPSWAQKRGIEGTYADLCTNKDLKKAILEDMVRLGKESGLHSFEQVKAIHIHSDMFSVQNGLLTPTLKAKRPELREYFKKQIEELYSISM

SEQ ID NO: 10611 - protein, 722 aa, Homo sapiens
MLTFFLVSGGSLWLFVEFVLSLLEKMQTQEILRILRLPELGDLGQFFRSLSATTLVSMGALAAILAYWFTHRPKALQPPCNLLMQSEEVEDSGGARRSVIGSGPQLLTHYYDDARTMYQVFRRGLSISGNGPCLGFRKPKQPYQWLSYQEVADRAEFLGSGLLQHNCKACTDQFIGVFAQNRPEWIIVELACYTYSMVVVPLYDTLGPGAIRYIINTADISTVIVDKPQKAVLLLEHVERKETPGLKLIILMDPFEEALKERGQKCGVVIKSMQAVEDCGQENHQAPVPPQPDDLSIVCFTSGTTGNPKGAMLTHGNVVADFSGFLKVTESQWAPTCADVHISYLPLAHMFERMVQSVVYCHGGRVGFFQGDIRLLSDDMKALCPTIFPVVPRLLNRMYDKIFSQANTPLKRWLLEFAAKRKQAEVRSGIIRNDSIWDELFFNKIQASLGGCVRMIVTGAAPASPTVLGFLRAALGCQVYEGYGQTECTAGCTFTTPGDWTSGHVGAPLPCNHIKLVDVEELNYWACKGEGEICVRGPNVFKGYLKDPDRTKEALDSDGWLHTGDIGKWLPAGTLKIIDRKKHIFKLAQGEYVAPEKIENIYIRSQPVAQIYVHGDSLKAFLVGIVVPDPEVMPSWAQKRGIEGTYADLCTNKDLKKAILEDMVRLGKESGLHSFEQVKAIHIHSDMFSVQNGLLTPTLKAKRPELREYFKKQIEELYSISM

SEQ ID NO: 10612 - protein, 708 aa, Homo sapiens
MPEFVLSLLEKMQTQEILRILRLPELGDLGQFFRSLSATTLVSMGALAAILAYWFTHRPKALQPPCNLLMQSEEVEDSGGARRSVIGSGPQLLTHYYDDARTMYQVFRRGLSISGNGPCLGFRKPKQPYQWLSYQEVADRAEFLGSGLLQHNCKACTDQFIGVFAQNRPEWIIVELACYTYSMVVVPLYDTLGPGAIRYIINTADISTVIVDKPQKAVLLLEHVERKETPGLKLIILMDPFEEALKERGQKCGVVIKSMQAVEDCGQENHQAPVPPQPDDLSIVCFTSGTTGNPKGAMLTHGNVVADFSGFLKVTEKVIFPRQDDVLISFLPLAHMFERVIQSVVYCHGGRVGFFQGDIRLLSDDMKALCPTIFPVVPRLLNRMYDKIFSQANTPLKRWLLEFAAKRKQAEVRSGIIRNDSIWDELFFNKIQASLGGCVRMIVTGAAPASPTVLGFLRAALGCQVYEGYGQTECTAGCTFTTPGDWTSGHVGAPLPCNHIKLVDVEELNYWACKGEGEICVRGPNVFKGYLKDPDRTKEALDSDGWLHTGDIGKWLPAGTLKIIDRKKHIFKLAQGEYVAPEKIENIYIRSQPVAQIYVHGDSLKAFLVGIVVPDPEVMPSWAQKRGIEGTYADLCTNKDLKKAILEDMVRLGKESGLHSFEQVKAIHIHSDMFSVQNGLLTPTLKAKRPELREYFKKQIEELYSISM

SEQ ID NO: 10613 - protein, 1098 aa, Homo sapiens
MTLQELVHKAASCYMDRVAVCFDECNNQLPVYYTYKTVVNAASELSNFLLLHCDFQGIREIGLYCQPGIDLPSWILGILQVPAAYVPIEPDSPPSLSTHFMKKCNLKYILVEKKQINKFKSFHETLLNYDTFTVEHNDLVLFRLHWKNTEVNLMLNDGKEKYEKEKIKSISSEHVNEEKAEEHMDLRLKHCLAYVLHTSGTTGIPKIVRVPHKCIVPNIQHFRVLFDITQEDVLFLASPLTFDPSVVEIFLALSSGASLLIVPTSVKLLPSKLASVLFSHHRVTVLQATPTLLRRFGSQLIKSTVLSATTSLRVLALGGEAFPSLTVLRSWRGEGNKTQIFNVYGITEVSSWATIYRIPEKTLNSTLKCELPVQLGFPLLGTVVEVRDTNGFTIQEGSGQVFLGGRNRVCFLDDEVTVPLGTMRATGDFVTVKDGEIFFLGRKDSQIKRHGKRLNIELVQQVAEELQQVESCAVTWYNQEKLILFMVSKDASVKEYIFKELQKYLPSHAVPDELVLIDSLPFTSHGKIDVSELNKIYLNYINLKSENKLSGKEDLWEKLQYLWKSTLNLPEDLLRVPDESLFLNSGGDSLKSIRLLSEIEKLVGTSVPGLLEIILSSSILEIYNHILQTVVPDEDVTFRKSCATKRKLSDINQEEASGTSLHQKAIMTFTCHNEINAFVVLSRGSQILSLNSTRFLTKLGHCSSACPSDSVSQTNIQNLKGLNSPVLIGKSKDPSCVAKVSEEGKPAIGTQKMELHVRWRSDTGKCVDASPLVVIPTFDKSSTTVYIGSHSHRMKAVDFYSGKVKWEQILGDRIESSACVSKCGNFIVVGCYNGLVYVLKSNSGEKYWMFTTEDAVKSSATMDPTTGLIYIGSHDQHAYALDIYRKKCVWKSKCGGTVFSSPCLNLIPHHLYFATLGGLLLAVNPATGNVIWKHSCGKPLFSSPQCCSQYICIGCVDGNLLCFTHFGEQVWQFSTSGPIFSSPCTSPSEQKIFFGSHDCFIYCCNMKGHLQWKFETTSRVYATPFAFHNYNGSNEMLLAAASTDGKVWILESQSGQLQSVYELPGEVFSSPVVLESMLIIGCRDNYVYCLDLLGGNQK

SEQ ID NO: 10614 - protein, 998 aa, Homo sapiens
MKKCNLKYILVEKKQINKFKSFHETLLNYDTFTVEHNDLVLFRLHWKNTEVNLMLNDGKEKYEKEKIKSISSEHVNEEKAEEHMDLRLKHCLAYVLHTSGTTGIPKIVRVPHKCIVPNIQHFRVLFDITQEDVLFLASPLTFDPSVVEIFLALSSGASLLIVPTSVKLLPSKLASVLFSHHRVTVLQATPTLLRRFGSQLIKSTVLSATTSLRVLALGGEAFPSLTVLRSWRGEGNKTQIFNVYGITEVSSWATIYRIPEKTLNSTLKCELPVQLGFPLLGTVVEVRDTNGFTIQEGSGQVFLGGRNRVCFLDDEVTVPLGTMRATGDFVTVKDGEIFFLGRKDSQIKRHGKRLNIELVQQVAEELQQVESCAVTWYNQEKLILFMVSKDASVKEYIFKELQKYLPSHAVPDELVLIDSLPFTSHGKIDVSELNKIYLNYINLKSENKLSGKEDLWEKLQYLWKSTLNLPEDLLRVPDESLFLNSGGDSLKSIRLLSEIEKLVGTSVPGLLEIILSSSILEIYNHILQTVVPDEDVTFRKSCATKRKLSDINQEEASGTSLHQKAIMTFTCHNEINAFVVLSRGSQILSLNSTRFLTKLGHCSSACPSDSVSQTNIQNLKGLNSPVLIGKSKDPSCVAKVSEEGKPAIGTQKMELHVRWRSDTGKCVDASPLVVIPTFDKSSTTVYIGSHSHRMKAVDFYSGKVKWEQILGDRIESSACVSKCGNFIVVGCYNGLVYVLKSNSGEKYWMFTTEDAVKSSATMDPTTGLIYIGSHDQHAYALDIYRKKCVWKSKCGGTVFSSPCLNLIPHHLYFATLGGLLLAVNPATGNVIWKHSCGKPLFSSPQCCSQYICIGCVDGNLLCFTHFGEQVWQFSTSGPIFSSPCTSPSEQKIFFGSHDCFIYCCNMKGHLQWKFETTSRVYATPFAFHNYNGSNEMLLAAASTDGKVWILESQSGQLQSVYELPGEVFSSPVVLESMLIIGCRDNYVYCLDLLGGNQK

SEQ ID NO: 10615 - protein, 841 aa, Homo sapiens
MTLQELVHKAASCYMDRVAVCFDECNNQLPVYYTYKTVVNAASELSNFLLLHCDFQGIREIGLYCQPGIDLPSWILGILQVPAAYVPIEPDSPPSLSTHFMKKCNLKYILVEKKQINKFKSFHETLLNYDTFTVEHNDLVLFRLHWKNTEVNLMLNDGKEKYEKEKIKSISSEHVNEEKAEEHMDLRLKHCLAYVLHTSGTTGIPKIVRVPHKCIVPNIQHFRVLFDITQEDVLFLASPLTFDPSVVEIFLALSSGASLLIVPTSVKLLPSKLASVLFSHHRVTVLQATPTLLRRFGSQLIKSTVLSATTSLRVLALGGEAFPSLTVLRSWRGEGNKTQIFNVYGITEVSSWATIYRIPEKTLNSTLKCELPVQLGFPLLGTVVEVRDTNGFTIQEGSGQVFLGGRNRVCFLDDEVTVPLGTMRATGDFVTVKDGEIFFLGRKDSQIKRHGKRLNIELVQQVAEELQQVESCAVTWYNQEKLILFMVSKDASVKEYIFKELQKYLPSHAVPDELVLIDSLPFTSHGKIDVSELNKIYLNYINLKSENKLSGKEDLWEKLQYLWKSTLNLPEDLLRVPDESLFLNSGGDSLKSIRLLSEIEKLVGTSVPGLLEIILSSSILEIYNHILQTVVPDEDVTFRKSCATKRKLSDINQEEASGTSLHQKAIMTFTCHNEINAFVVLSRGSQILSLNSTRFLTKLGHCSSACPSDSVSQTNIQNLKGLNSPVLIGKSKDPSCVAKVSEEGKPAIGTQKMELHVRWRSDTGKCVDASPLVVIPTFDKSSTTVYIGSHSHRMKAVDFYSGKVKWEQILGDRIESSACVSKCGNFIVVGKFLNLRFVELN

SEQ ID NO: 10616 - protein, 857 aa, Homo sapiens
MTLQELVHKAASCYMDRVAVCFDECNNQLPVYYTYKTVVNAASELSNFLLLHCDFQGIREIGLYCQPGIDLPSWILGILQVPAAYVPIEPDSPPSLSTHFMKKCNLKYILVEKKQINKFKSFHETLLNYDTFTVEHNDLVLFRLHWKNTEVNLMLNDGKEKYEKEKIKSISSEHVNEEKAEEHMDLRLKHCLAYVLHTSGTTGIPKIVRVPHKCIVPNIQHFRVLFDITQEDVLFLASPLTFDPSVVEIFLALSSGASLLIVPTSVKLLPSKLASVLFSHHRVTVLQATPTLLRRFGSQLIKSTVLSATTSLRVLALGGEAFPSLTVLRSWRGEGNKTQIFNVYGITEVSSWATIYRIPEKTLNSTLKCELPVQLGFPLLGTVVEVRDTNGFTIQEGSGQVFLGGRNRVCFLDDEVTVPLGTMRATGDFVTVKDGEIFFLGRKDSQIKRHGKRLNIELVQQVAEELQQVESCAVTWYNQEKLILFMVSKDASVKEYIFKELQKYLPSHAVPDELVLIDSLPFTSHGKIDVSELNKIYLNYINLKSENKLSGKEDLWEKLQYLWKSTLNLPEDLLRVPDESLFLNSGGDSLKSIRLLSEIEKLVGTSVPGLLEIILSSSILEIYNHILQTVVPDEDVTFRKSCATKRKLSDINQEEASGTSLHQKAIMTFTCHNEINAFVVLSRGSQILSLNSTRFLTKLGHCSSACPSDSVSQTNIQNLKGLNSPVLIGKSKDPSCVAKVSEEGKPAIGTQKMELHVRWRSDTGKCVDASPLVVIPTFDKSSTTVYIGSHSHRMKAVDFYSGKVKWEQILGDRIESSACVSKCGNFIVVGLAVLYQWTNLFIPVYLTIRAKNIFWFP

SEQ ID NO: 10617 - protein, 184 aa, Homo sapiens
MAAAGGARLLRAASAVLGGPAGRWLHHAGSRAGSSGLLRNRGPGGSAEASRSLSVSARARSSSEDKITVHFINRDGETLTTKGKVGDSLLDVVVENNLDIDGFGACEGTLACSTCHLIFEDHIYEKLDAITDEENDMLDLAYGLTDRSRLGCQICLTKSMDNMTVRVPETVADARQSIDVGKTS

SEQ ID NO: 10618 - protein, 737 aa, Homo sapiens
MNGDSRAAVVTSPPPTTAPHKERYFDRVDENNPEYLRERNMAPDLRQDFNMMEQKKRVSMILQSPAFCEELESMIQEQFKKGKNPTGLLALQQIADFMTTNVPNVYPAAPQGGMAALNMSLGMVTPVNDLRGSDSIAYDKGEKLLRCKLAAFYRLADLFGWSQLIYNHITTRVNSEQEHFLIVPFGLLYSEVTASSLVKINLQGDIVDRGSTNLGVNQAGFTLHSAIYAARPDVKCVVHIHTPAGAAVSAMKCGLLPISPEALSLGEVAYHDYHGILVDEEEKVLIQKNLGPKSKVLILRNHGLVSVGESVEEAFYYIHNLVVACEIQVRTLASAGGPDNLVLLNPEKYKAKSRSPGSPVGEGTGSPPKWQIGEQEFEALMRMLDNLGYRTGYPYRYPALREKSKKYSDVEVPASVTGYSFASDGDSGTCSPLRHSFQKQQREKTRWLNSGRGDEASEEGQNGSSPKSKTKWTKEDGHRTSTSAVPNLFVPLNTNPKEVQEMRNKIREQNLQDIKTAGPQSQVLCGVVMDRSLVQGELVTASKAIIEKEYQPHVIVSTTGPNPFTTLTDRELEEYRREVERKQKGSEENLDEAREQKEKSPPDQPAVPHPPPSTPIKLEEDLVPEPTTGDDSDAATFKPTLPDLSPDEPSEALGFPMLEKEEEAHRPPSPTEAPTEASPEPAPDPAPVAEEAAPSAVEEGAAADPGSDGSPGKSPSKKKKKFRTPSFLKKSKKKSDS

SEQ ID NO: 10619 - protein, 631 aa, Homo sapiens
MNGDSRAAVVTSPPPTTAPHKERYFDRVDENNPEYLRERNMAPDLRQDFNMMEQKKRVSMILQSPAFCEELESMIQEQFKKGKNPTGLLALQQIADFMTTNVPNVYPAAPQGGMAALNMSLGMVTPVNDLRGSDSIAYDKGEKLLRCKLAAFYRLADLFGWSQLIYNHITTRVNSEQEHFLIVPFGLLYSEVTASSLVKINLQGDIVDRGSTNLGVNQAGFTLHSAIYAARPDVKCVVHIHTPAGAAVSAMKCGLLPISPEALSLGEVAYHDYHGILVDEEEKVLIQKNLGPKSKVLILRNHGLVSVGESVEEAFYYIHNLVVACEIQVRTLASAGGPDNLVLLNPEKYKAKSRSPGSPVGEGTGSPPKWQIGEQEFEALMRMLDNLGYRTGYPYRYPALREKSKKYSDVEVPASVTGYSFASDGDSGTCSPLRHSFQKQQREKTRWLNSGRGDEASEEGQNGSSPKSKTKWTKEDGHRTSTSAVPNLFVPLNTNPKEVQEMRNKIREQNLQDIKTAGPQSQVLCGVVMDRSLVQGELVTASKAIIEKEYQPHVIVSTTGPNPFTTLTDRELEEYRREVERKQKGSEENLDEAREQKEKSPPDQPAVPHPPPSTPIKLEEGDGCAREYLLP

SEQ ID NO: 10620 - protein, 768 aa, Homo sapiens
MNGDSRAAVVTSPPPTTAPHKERYFDRVDENNPEYLRERNMAPDLRQDFNMMEQKKRVSMILQSPAFCEELESMIQEQFKKGKNPTGLLALQQIADFMTTNVPNVYPAAPQGGMAALNMSLGMVTPVNDLRGSDSIAYDKGEKLLRCKLAAFYRLADLFGWSQLIYNHITTRVNSEQEHFLIVPFGLLYSEVTASSLVKINLQGDIVDRGSTNLGVNQAGFTLHSAIYAARPDVKCVVHIHTPAGAAVSAMKCGLLPISPEALSLGEVAYHDYHGILVDEEEKVLIQKNLGPKSKVLILRNHGLVSVGESVEEAFYYIHNLVVACEIQVRTLASAGGPDNLVLLNPEKYKAKSRSPGSPVGEGTGSPPKWQIGEQEFEALMRMLDNLGYRTGYPYRYPALREKSKKYSDVEVPASVTGYSFASDGDSGTCSPLRHSFQKQQREKTRWLNSGRGDEASEEGQNGSSPKSKTKVWTNITHDHVKPLLQSLSSGVCVPSCITNCLWTKEDGHRTSTSAVPNLFVPLNTNPKEVQEMRNKIREQNLQDIKTAGPQSQVLCGVVMDRSLVQGELVTASKAIIEKEYQPHVIVSTTGPNPFTTLTDRELEEYRREVERKQKGSEENLDEAREQKEKSPPDQPAVPHPPPSTPIKLEEDLVPEPTTGDDSDAATFKPTLPDLSPDEPSEALGFPMLEKEEEAHRPPSPTEAPTEASPEPAPDPAPVAEEAAPSAVEEGAAADPGSDGSPGKSPSKKKKKFRTPSFLKKSKKKSDS

SEQ ID NO: 10621 - protein, 662 aa, Homo sapiens
MNGDSRAAVVTSPPPTTAPHKERYFDRVDENNPEYLRERNMAPDLRQDFNMMEQKKRVSMILQSPAFCEELESMIQEQFKKGKNPTGLLALQQIADFMTTNVPNVYPAAPQGGMAALNMSLGMVTPVNDLRGSDSIAYDKGEKLLRCKLAAFYRLADLFGWSQLIYNHITTRVNSEQEHFLIVPFGLLYSEVTASSLVKINLQGDIVDRGSTNLGVNQAGFTLHSAIYAARPDVKCVVHIHTPAGAAVSAMKCGLLPISPEALSLGEVAYHDYHGILVDEEEKVLIQKNLGPKSKVLILRNHGLVSVGESVEEAFYYIHNLVVACEIQVRTLASAGGPDNLVLLNPEKYKAKSRSPGSPVGEGTGSPPKWQIGEQEFEALMRMLDNLGYRTGYPYRYPALREKSKKYSDVEVPASVTGYSFASDGDSGTCSPLRHSFQKQQREKTRWLNSGRGDEASEEGQNGSSPKSKTKWTKEDGHRTSTSAVPNLFVPLNTNPKEVQEMRNKIREQNLQDIKTAGPQSQVLCGVVMDRSLVQDAPLSDCTETIEGLELTEQTFSPAKSLSFRKGELVTASKAIIEKEYQPHVIVSTTGPNPFTTLTDRELEEYRREVERKQKGSEENLDEAREQKEKSPPDQPAVPHPPPSTPIKLEEGDGCAREYLLP

SEQ ID NO: 10622 - protein, 511 aa, Homo sapiens
MNGDSRAAVVTSPPPTTAPHKERYFDRVDENNPEYLRERNMAPDLRQDFNMMEQKKRVSMILQSPAFCEELESMIQEQFKKGKNPTGLLALQQIADFMTTNVPNVYPAAPQGGMAALNMSLGMVTPVNDLRGSDSIAYDKGEKLLRCKLAAFYRLADLFGWSQLIYNHITTRVNSEQEHFLIVPFGLLYSEVTASSLVKINLQGDIVDRGSTNLGVNQAGFTLHSAIYAARPDVKCVVHIHTPAGAAVSAMKCGLLPISPEALSLGEVAYHDYHGILVDEEEKVLIQKNLGPKSKVLILRNHGLVSVGESVEEAFYYIHNLVVACEIQVRTLASAGGPDNLVLLNPEKYKAKSRSPGSPVGEGTGSPPKWQIGEQEFEALMRMLDNLGYRTGYPYRYPALREKSKKYSDVEVPASVTGYSFASDGDSGTCSPLRHSFQKQQREKTRWLNSGRGDEASEEGQNGSSPKSKTKVWTNITHDHVKPLLQSLSSGVCVPSCITNCLVCAYLTVHS

SEQ ID NO: 10623 - protein, 662 aa, Homo sapiens
MNGDSRAAVVTSPPPTTAPHKERYFDRVDENNPEYLRERNMAPDLRQDFNMMEQKKRVSMILQSPAFCEELESMIQEQFKKGKNPTGLLALQQIADFMTTNVPNVYPAAPQGGMAALNMSLGMVTPVNDLRGSDSIAYDKGEKLLRCKLAAFYRLADLFGWSQLIYNHITTRVNSEQEHFLIVPFGLLYSEVTASSLVKINLQGDIVDRGSTNLGVNQAGFTLHSAIYAARPDVKCVVHIHTPAGAAVSAMKCGLLPISPEALSLGEVAYHDYHGILVDEEEKVLIQKNLGPKSKVLILRNHGLVSVGESVEEAFYYIHNLVVACEIQVRTLASAGGPDNLVLLNPEKYKAKSRSPGSPVGEGTGSPPKWQIGEQEFEALMRMLDNLGYRTGYPYRYPALREKSKKYSDVEVPASVTGYSFASDGDSGTCSPLRHSFQKQQREKTRWLNSGRGDEASEEGQNGSSPKSKTKVWTNITHDHVKPLLQSLSSGVCVPSCITNCLWTKEDGHRTSTSAVPNLFVPLNTNPKEVQEMRNKIREQNLQDIKTAGPQSQVLCGVVMDRSLVQGELVTASKAIIEKEYQPHVIVSTTGPNPFTTLTDRELEEYRREVERKQKGSEENLDEAREQKEKSPPDQPAVPHPPPSTPIKLEEGDGCAREYLLP

SEQ ID NO: 10624 - protein, 683 aa, Homo sapiens
MLFIFNFLFSPLPTPALICILTFGAAIFLWLITRPQPVLPLLDLNNQSVGIEGGARKGVSQKNNDLTSCCFSDAKTMYEVFQRGLAVSDNGPCLGYRKPNQPYRWLSYKQVSDRAEYLGSCLLHKGYKSSPDQFVGIFAQNRPEWIISELACYTYSMVAVPLYDTLGPEAIVHIVNKADIAMVICDTPQKALVLIGNVEKGFTPSLKVIILMDPFDDDLKQRGEKSGIEILSLYDAENLGKEHFRKPVPPSPEDLSVICFTSGTTGDPKGAMITHQNIVSNAAAFLKCVEHAYEPTPDDVAISYLPLAHMFERIVQAVVYSCGARVGFFQGDIRLLADDMKTLKPTLFPAVPRLLNRIYDKVQNEAKTPLKKFLLKLAVSSKFKELQKGIIRHDSFWDKLIFAKIQDSLGGRVRVIVTGAAPMSTSVMTFFRAAMGCQVYEAYGQTECTGGCTFTLPGDWTSGHVGVPLACNYVKLEDVADMNYFTVNNEGEVCIKGTNVFKGYLKDPEKTQEALDSDGWLHTGDIGRWLPNGTLKIIDRKKNIFKLAQGEYIAPEKIENIYNRSQPVLQIFVHGESLRSSLVGVVVPDTDVLPSFAAKLGVKGSFEELCQNQVVREAILEDLQKIGKESGLKTFEQVKAIFLHPEPFSIENGLLTPTLKAKRGELSKYFRTQIDSLYEHIQD

SEQ ID NO: 10625 - protein, 739 aa, Homo sapiens
MDALKPPCLWRNHERGKKDRDSCGRKNSEPGSPHSLEALRDAAPSQGLNFLLLFTKMLFIFNFLFSPLPTPALICILTFGAAIFLWLITRPQPVLPLLDLNNQSVGIEGGARKGVSQKNNDLTSCCFSDAKTMYEVFQRGLAVSDNGPCLGYRKPNQPYRWLSYKQVSDRAEYLGSCLLHKGYKSSPDQFVGIFAQNRPEWIISELACYTYSMVAVPLYDTLGPEAIVHIVNKADIAMVICDTPQKALVLIGNVEKGFTPSLKVIILMDPFDDDLKQRGEKSGIEILSLYDAENLGKEHFRKPVPPSPEDLSVICFTSGTTGDPKGAMITHQNIVSNAAAFLKCVEHAYEPTPDDVAISYLPLAHMFERIVQAVVYSCGARVGFFQGDIRLLADDMKTLKPTLFPAVPRLLNRIYDKVQNEAKTPLKKFLLKLAVSSKFKELQKGIIRHDSFWDKLIFAKIQDSLGGRVRVIVTGAAPMSTSVMTFFRAAMGCQVYEAYGQTECTGGCTFTLPGDWTSGHVGVPLACNYVKLEDVADMNYFTVNNEGEVCIKGTNVFKGYLKDPEKTQEALDSDGWLHTGDIGRWLPNGTLKIIDRKKNIFKLAQGEYIAPEKIENIYNRSQPVLQIFVHGESLRSSLVGVVVPDTDVLPSFAAKLGVKGSFEELCQNQVVREAILEDLQKIGKESGLKTFEQVKAIFLHPEPFSIENGLLTPTLKAKRGELSKYFRTQIDSLYEHIQD

SEQ ID NO: 10626 - protein, 659 aa, Homo sapiens
MLFIFNFLFSPLPTPALICILTFGAAIFLWLITRPQPVLPLLDLNNQSVGIEGGARKGVSQKNNDLTSCCFSDAKTMYEVFQRGLAVSDNGPCLGYRKPNQPYRWLSYKQVSDRAEYLGSCLLHKGYKSSPDQFVGIFAQNRPEWIISELACYTYSMVAVPLYDTLGPEAIVHIVNKADIAMVICDTPQKALVLIGNVEKGFTPSLKVIILMDPFDDDLKQRGEKSGIEILSLYDAENLGKEHFRKPVPPSPEDLSVICFTSGTTGDPKGAMITHQNIVSNAAAFLKCVEHAYEPTPDDVAISYLPLAHMFERIVQAVVYSCGARVGFFQGDIRLLADDMKTLKPTLFPAVPRLLNRIYDKVQNEAKTPLKKFLLKLAVSSKFKELQKGIIRHDSFWDKLIFAKIQDSLGGRVRVIVTGAAPMSTSVMTFFRAAMGCQVYEAYGQTECTGGCTFTLPGDWTSGHVGVPLACNYVKLEDVADMNYFTVNNEGEVCIKGTNVFKGYLKDPEKTQEALDSDGWLHTGDIGRWLPNGTLKIIDRKKNIFKLAQGEYIAPEKIENIYNRSQPVLQIFVHGESLRSSLVGVVVPDTDVLPSFAAKLGVKGSFEELCQNQVKAIFLHPEPFSIENGLLTPTLKAKRGELSKYFRTQIDSLYEHIQD

SEQ ID NO: 10627 - protein, 488 aa, Homo sapiens
MAGKGSSGRRPLLLGLLVAVATVHLVICPYTKVEESFNLQATHDLLYHWQDLEQYDHLEFPGVVPRTFLGPVVIAVFSSPAVYVLSLLEMSKFYSQLIVRGVLGLGVIFGLWTLQKEVRRHFGAMVATMFCWVTAMQFHLMFYCTRTLPNVLALPVVLLALAAWLRHEWARFIWLSAFAIIVFRVELCLFLGLLLLLALGNRKVSVVRALRHAVPAGILCLGLTVAVDSYFWRQLTWPEGKVLWYNTVLNKSSNWGTSPLLWYFYSALPRGLGCSLLFIPLGLVDRRTHAPTVLALGFMALYSLLPHKELRFIIYAFPMLNITAARGCSYLLNNYKKSWLYKAGSLLVIGHLVVNAAYSATALYVSHFNYPGGVAMQRLHQLVPPQTDVLLHIDVAAAQTGVSRFLQVNSAWRYDKREDVQPGTGMLAYTHILMEAAPGLLALYRDTHRVLASVVGTTGVSLNLTQLPPFNVHLQTKLVLLERLPRPS

SEQ ID NO: 10628 - protein, 1321 aa, Homo sapiens
MEPPGRRRGRAQPPLLLPLSLLALLALLGGGGGGGAAALPAGCKHDGRPRGAGRAAGAAEGKVVCSSLELAQVLPPDTLPNRTVTLILSNNKISELKNGSFSGLSLLERLDLRNNLISSIDPGAFWGLSSLKRLDLTNNRIGCLNADIFRGLTNLVRLNLSGNLFSSLSQGTFDYLASLRSLEFQTEYLLCDCNILWMHRWVKEKNITVRDTRCVYPKSLQAQPVTGVKQELLTCDPPLELPSFYMTPSHRQVVFEGDSLPFQCMASYIDQDMQVLWYQDGRIVETDESQGIFVEKNMIHNCSLIASALTISNIQAGSTGNWGCHVQTKRGNNTRTVDIVVLESSAQYCPPERVVNNKGDFRWPRTLAGITAYLQCTRNTHGSGIYPGNPQDERKAWRRCDRGGFWADDDYSRCQYANDVTRVLYMFNQMPLNLTNAVATARQLLAYTVEAANFSDKMDVIFVAEMIEKFGRFTKEEKSKELGDVMVDIASNIMLADERVLWLAQREAKACSRIVQCLQRIATYRLAGGAHVYSTYSPNIALEAYVIKSTGFTGMTCTVFQKVAASDRTGLSDYGRRDPEGNLDKQLSFKCNVSNTFSSLALKNTIVEASIQLPPSLFSPKQKRELRPTDDSLYKLQLIAFRNGKLFPATGNSTNLADDGKRRTVVTPVILTKIDGVNVDTHHIPVNVTLRRIAHGADAVAARWDFDLLNGQGGWKSDGCHILYSDENITTIQCYSLSNYAVLMDLTGSELYTQAASLLHPVVYTTAIILLLCLLAVIVSYIYHHSLIRISLKSWHMLVNLCFHIFLTCVVFVGGITQTRNASICQAVGIILHYSTLATVLWVGVTARNIYKQVTKKAKRCQDPDEPPPPPRPMLRFYLIGGGIPIIVCGITAAANIKNYGSRPNAPYCWMAWEPSLGAFYGPASFITFVNCMYFLSIFIQLKRHPERKYELKEPTEEQQRLAANENGEINHQDSMSLSLISTSALENEHTFHSQLLGASLTLLLYVALWMFGALAVSLYYPLDLVFSFVFGATSLSFSAFFVVHHCVNREDVRLAWIMTCCPGRSSYSVQVNVQPPNSNGTNGEAPKCPNSSAESSCTNKSASSFKNSSQGCKLTNLQAAAAQCHANSLPLNSTPQLDNSLTEHSMDNDIKMHVAPLEVQFRTNVHSSRHHKNRSKGHRASRLTVLREYAYDVPTSVEGSVQNGLPKSRLGNNEGHSRSRRAYLAYRERQYNPPQQDSSDACSTLPKSSRNFEKPVSTTSKKDALRKPAVVELENQQKSYGLNLAIQNGPIKSNGQEGPLLGTDSTGNVRTGLWKHETTV

SEQ ID NO: 10629 - protein, 616 aa, Homo sapiens
MEPPGRRRGRAQPPLLLPLSLLALLALLGGGGGGGAAALPAGCKHDGRPRGAGRAAGAAEGKVVCSSLELAQVLPPDTLPNRTVTLILSNNKISELKNGSFSGLSLLERLDLRNNLISSIDPGAFWGLSSLKRLDLTNNRIGCLNADIFRGLTNLVRLNLSGNLFSSLSQGTFDYLASLRSLEFQTEYLLCDCNILWMHRWVKEKNITVRDTRCVYPKSLQAQPVTGVKQELLTCDPPLELPSFYMTPSHRQVVFEGDSLPFQCMASYIDQDMQVLWYQDGRIVETDESQGIFVEKNMIHNCSLIASALTISNIQAGSTGNWGCHVQTKRGNNTRTVDIVVLESSAQYCPPERVVNNKGDFRWPRTLAGITAYLQCTRNTHGSGIYPGNPQDERKAWRRCDRGGFWADDDYSRCQYANDVTRVLYMFNQMPLNLTNAVATARQLLAYTVEAANFSDKMDVIFVAEMIEKFGRFTKEEKSKELGDVMVDIASNIMLADERVLWLAQREAKACSRIVQCLQRIATYRLAGGAHVYSTYSPNIALEAYVIKSTGFTGMTCTVFQKVAASDRTGLSDYGRRDPEGNLDKQLSFKCNVSNTFSSLALKVCYILQSFKTIYS

SEQ ID NO: 10630 - protein, 1178 aa, Homo sapiens
MMRVMPCQVDLTNNRIGCLNADIFRGLTNLVRLNLSGNLFSSLSQGTFDYLASLRSLEFQTEYLLCDCNILWMHRWVKEKNITVRDTRCVYPKSLQAQPVTGVKQELLTCDPPLELPSFYMTPSHRQVVFEGDSLPFQCMASYIDQDMQVLWYQDGRIVETDESQGIFVEKNMIHNCSLIASALTISNIQAGSTGNWGCHVQTKRGNNTRTVDIVVLESSAQYCPPERVVNNKGDFRWPRTLAGITAYLQCTRNTHGSGIYPGNPQDERKAWRRCDRGGFWADDDYSRCQYANDVTRVLYMFNQMPLNLTNAVATARQLLAYTVEAANFSDKMDVIFVAEMIEKFGRFTKEEKSKELGDVMVDIASNIMLADERVLWLAQREAKACSRIVQCLQRIATYRLAGGAHVYSTYSPNIALEAYVIKSTGFTGMTCTVFQKVAASDRTGLSDYGRRDPEGNLDKQLSFKCNVSNTFSSLALKQKRELRPTDDSLYKLQLIAFRNGKLFPATGNSTNLADDGKRRTVVTPVILTKIDGVNVDTHHIPVNVTLRRIAHGADAVAARWDFDLLNGQGGWKSDGCHILYSDENITTIQCYSLSNYAVLMDLTGSELYTQAASLLHPVVYTTAIILLLCLLAVIVSYIYHHSLIRISLKSWHMLVNLCFHIFLTCVVFVGGITQTRNASICQAVGIILHYSTLATVLWVGVTARNIYKQVTKKAKRCQDPDEPPPPPRPMLRFYLIGGGIPIIVCGITAAANIKNYGSRPNAPYCWMAWEPSLGAFYGPASFITFVNCMYFLSIFIQLKRHPERKYELKEPTEEQQRLAANENGEINHQDSMSLSLISTSALENEHTFHSQLLGASLTLLLYVALWMFGALAVSLYYPLDLVFSFVFGATSLSFSAFFVVHHCVNREDVRLAWIMTCCPGRSSYSVQVNVQPPNSNGTNGEAPKCPNSSAESSCTNKSASSFKNSSQGCKLTNLQAAAAQCHANSLPLNSTPQLDNSLTEHSMDNDIKMHVAPLEVQFRTNVHSSRHHKNRSKGHRASRLTVLREYAYDVPTSVEGSVQNGLPKSRLGNNEGHSRSRRAYLAYRERQYNPPQQDSSDACSTLPKSSRNFEKPVSTTSKKDALRKPAVVELENQQKSYGLNLAIQNGPIKSNGQEGPLLGTDSTGNVRTGLWKHETTV

SEQ ID NO: 10631 - protein, 381 aa, Homo sapiens
MPLKRNNSKYPPLELPSFYMTPSHRQVVFEGDSLPFQCMASYIDQDMQVLWYQDGRIVETDESQGIFVEKNMIHNCSLIASALTISNIQAGSTGNWGCHVQTKRGNNTRTVDIVVLESSAQYCPPERVVNNKGDFRWPRTLAGITAYLQCTRNTHGSGIYPGNPQDERKAWRRCDRGGFWADDDYSRCQYANDVTRVLYMFNQMPLNLTNAVATARQLLAYTVEAANFSDKMDVIFVAEMIEKFGRFTKEEKSKELGDVMVDIASNIMLADERVLWLAQREAKACSRIVQCLQRIATYRLAGGAHVYSTYSPNIALEAYVIKSTGFTGMTCTVFQKVAASDRTGLSDYGRRDPEGNLDKQLSFKCNVSNTFSSLALKGKFR

SEQ ID NO: 10632 - protein, 1261 aa, Homo sapiens
MSGSKSVSPPGYAAQKTAAPAPRGGPEHRSAWGEADSRANGYPHAPGGSARGSTKKPGGAVTPQQQQRLASRWRSDDDDDPPLSGDDPLAGGFGFSFRSKSAWQERGGDDCGRGSRRQRRGAASGGSTRAPPAGGGGGSAAAAASAGGTEVRPRSVEVGLEERRGKGRAADELEAGAVEGGEGSGDGGSSADSGSGAGPGAVLSLGACCLALLQIFRSKKFPSDKLERLYQRYFFRLNQSSLTMLMAVLVLVCLVMLAFHAARPPLQLPYLAVLAAAVGVILIMAVLCNRAAFHQDHMGLACYALIAVVLAVQVVGLLLPQPRSASEGIWWTVFFIYTIYTLLPVRMRAAVLSGVLLSALHLAIALRTNAQDQFLLKQLVSNVLIFSCTNIVGVCTHYPAEVSQRQAFQETRECIQARLHSQRENQQQERLLLSVLPRHVAMEMKADINAKQEDMMFHKIYIQKHDNVSILFADIEGFTSLASQCTAQELVMTLNELFARFDKLAAENHCLRIKILGDCYYCVSGLPEARADHAHCCVEMGMDMIEAISLVREVTGVNVNMRVGIHSGRVHCGVLGLRKWQFDVWSNDVTLANHMEAGGKAGRIHITKATLNYLNGDYEVEPGCGGERNAYLKEHSIETFLILRCTQKRKEEKAMIAKMNRQRTNSIGHNPPHWGAERPFYNHLGGNQVSKEMKRMGFEDPKDKNAQESANPEDEVDEFLGRAIDARSIDRLRSEHVRKFLLTFREPDLEKKYSKQVDDRFGAYVACASLVFLFICFVQITIVPHSIFMLSFYLTCSLLLTLVVFVSVIYSCVKLFPSPLQTLSRKIVRSKMNSTLVGVFTITLVFLAAFVNMFTCNSRDLLGCLAQEHNISASQVNACHVAESAVNYSLGDEQGFCGSPWPNCNFPEYFTYSVLLSLLACSVFLQISCIGKLVLMLAIELIYVLIVEVPGVTLFDNADLLVTANAIDFFNNGTSQCPEHATKVALKVVTPIIISVFVLALYLHAQQVESTARLDFLWKLQATEEKEEMEELQAYNRRLLHNILPKDVAAHFLARERRNDELYYQSCECVAVMFASIANFSEFYVELEANNEGVECLRLLNEIIADFDEIISEDRFRQLEKIKTIGSTYMAASGLNDSTYDKVGKTHIKALADFAMKLMDQMKYINEHSFNNFQMKIGLNIGPVVAGVIGARKPQYDIWGNTVNVASRMDSTGVPDRIQVTTDMYQVLAANTYQLECRGVVKVKGKGEMMTYFLNGGPPLS

SEQ ID NO: 10633 - protein, 911 aa, Homo sapiens
MKSQKEGCCSRGDLSIQTGPGGEWAPRRLVSNVLIFSCTNIVGVCTHYPAEVSQRQAFQETRECIQARLHSQRENQQQERLLLSVLPRHVAMEMKADINAKQEDMMFHKIYIQKHDNVSILFADIEGFTSLASQCTAQELVMTLNELFARFDKLAAENHCLRIKILGDCYYCVSGLPEARADHAHCCVEMGMDMIEAISLVREVTGVNVNMRVGIHSGRVHCGVLGLRKWQFDVWSNDVTLANHMEAGGKAGRIHITKATLNYLNGDYEVEPGCGGERNAYLKEHSIETFLILRCTQKRKEEKAMIAKMNRQRTNSIGHNPPHWGAERPFYNHLGGNQVSKEMKRMGFEDPKDKNAQESANPEDEVDEFLGRAIDARSIDRLRSEHVRKFLLTFREPDLEKKYSKQVDDRFGAYVACASLVFLFICFVQITIVPHSIFMLSFYLTCSLLLTLVVFVSVIYSCVKLFPSPLQTLSRKIVRSKMNSTLVGVFTITLVFLAAFVNMFTCNSRDLLGCLAQEHNISASQVNACHVAESAVNYSLGDEQGFCGSPWPNCNFPEYFTYSVLLSLLACSVFLQISCIGKLVLMLAIELIYVLIVEVPGVTLFDNADLLVTANAIDFFNNGTSQCPEHATKVALKVVTPIIISVFVLALYLHAQQVESTARLDFLWKLQATEEKEEMEELQAYNRRLLHNILPKDVAAHFLARERRNDELYYQSCECVAVMFASIANFSEFYVELEANNEGVECLRLLNEIIADFDEIISEDRFRQLEKIKTIGSTYMAASGLNDSTYDKVGKTHIKALADFAMKLMDQMKYINEHSFNNFQMKIGLNIGPVVAGVIGARKPQYDIWGNTVNVASRMDSTGVPDRIQVTTDMYQVLAANTYQLECRGVVKVKGKGEMMTYFLNGGPPLS

SEQ ID NO: 10634 - protein, 586 aa, Homo sapiens
MLARVTRKMLRHAKCFQRLAIFGSVRALHKDNRTATPQNFSNYESMKQDFKLGIPEYFNFAKDVLDQWTDKEKAGKKPSNPAFWWINRNGEEMRWSFEELGSLSRKFANILSEACSLQRGDRVILILPRVPEWWLANVACLRTGTVLIPGTTQLTQKDILYRLQSSKANCIITNDVLAPAVDAVASKCENLHSKLIVSENSREGWGNLKELMKHASDSHTCVKTKHNEIMAIFFTSGTSGYPKMTAHTHSSFGLGLSVNGRFWLDLTPSDVMWNTSDTGWAKSAWSSVFSPWIQGACVFTHHLPRFEPTSILQTLSKYPITVFCSAPTVYRMLVQNDITSYKFKSLKHCVSAGEPITPDVTEKWRNKTGLDIYEGYGQTETVLICGNFKGMKIKPGSMGKPSPAFDVKIVDVNGNVLPPGQEGDIGIQVLPNRPFGLFTHYVDNPSKTASTLRGNFYITGDRGYMDKDGYFWFVARADDVILSSGYRIGPFEVENALNEHPSVAESAVVSSPDPIRGEVVKAFVVLNPDYKSHDQEQLIKEIQEHVKKTTAPYKYPRKVEFIQELPKTISGKTKRNELRKKEWKTI

SEQ ID NO: 10635 - protein, 438 aa, Homo sapiens
MLARVTRKMLRHAKCFQRLAIFGSVRALHKDNRTATPQNFSNYESMKQDFKLGIPEYFNFAKDVLDQWTDKEKAGKKPSNPAFWWINRNGEEMRWSFEELGSLSRKFANILSEACSLQRGDRVILILPRVPEWWLANVACLRTGTVLIPGTTQLTQKDILYRLQSSKANCIITNDVLAPAVDAVASKCENLHSKLIVSENSREGWGNLKELMKHASDSHTCVKTKHNEIMAIFFTSGTSGYPKMTAHTHSSFGLGLSVNGRFWLDLTPSDVMWNTSDTGWAKSAWSSVFSPWIQGACVFTHHLPRFEPTSILQTLSKYPITVFCSAPTVYRMLVQNDITSYKFKSLKHCVSAGEPITPDVTEKWRNKTGLDIYEGYGQTETVLICGNFKGMKIKPGSMGKPSPAFDVKVCTSPSRRMFNNPICTLPTYRLPPYKLSLL

SEQ ID NO: 10636 - protein, 726 aa, Homo sapiens
MEDRLHMDNGLVPQKIVSVHLQDSTLKEVKDQVSNKQAQILEPKPEPSLEIKPEQDGMEHVGRDDPKALGEEPKQRRGSASGSEPAGDSDRGGGPVEHYHLHLSSCHECLELENSTIESVKFASAENIPDLPYDYSSSLESVADETSPEREGRRVNLTGKAPNILLYVGSDSQEALGRFHEVRSVLADCVDIDSYILYHLLEDSALRDPWTDNCLLLVIATRESIPEDLYQKFMAYLSQGGKVLGLSSSFTFGGFQVTSKGALHKTVQNLVFSKADQSEVKLSVLSSGCRYQEGPVRLSPGRLQGHLENEDKDRMIVHVPFGTRGGEAVLCQVHLELPPSSNIVQTPEDFNLLKSSNFRRYEVLREILTTLGLSCDMKQVPALTPLYLLSAAEEIRDPLMQWLGKHVDSEGEIKSGQLSLRFVSSYVSEVEITPSCIPVVTNMEAFSSEHFNLEIYRQNLQTKQLGKVILFAEVTPTTMRLLDGLMFQTPQEMGLIVIAARQTEGKGRGGNVWLSPVGCALSTLLISIPLRSQLGQRIPFVQHLMSVAVVEAVRSIPEYQDINLRVKWPNDIYYSDLMKIGGVLVNSTLMGETFYILIGCGFNVTNSNPTICINDLITEYNKQHKAELKPLRADYLIARVVTVLEKLIKEFQDKGPNSVLPLYYRYWVHSGQQVHLGSAEGPKVSIVGLDDSGFLQVHQEGGEVVTVHPDGNSFDMLRNLILPKRR

SEQ ID NO: 10637 - protein, 216 aa, Homo sapiens
MVCVLVLAAAAGAVAVFLILRIWVVLRSMDVTPRESLSILVVAGSGGHTTEILRLLGSLSNAYSPRHYVIADTDEMSANKINSFELDRADRDPSNMYTKYYIHRIPRSREVQQSWPSTVFTTLHSMWLSFPLIHRVKPDLVLCNGPGTCVPICVSALLLGILGIKKVIIVYVESICRVETLSMSGKILFHLSDYFIVQWPALKEKYPKSVYLGRIV

SEQ ID NO: 10638 - protein, 726 aa, Homo sapiens
MSEETVPEAASPPPPQGQPYFDRFSEDDPEYMRLRNRAADLRQDFNLMEQKKRVTMILQSPSFREELEGLIQEQMKKGNNSSNIWALRQIADFMASTSHAVFPTSSMNVSMMTPINDLHTADSLNLAKGERLMRCKISSVYRLLDLYGWAQLSDTYVTLRVSKEQDHFLISPKGVSCSEVTASSLIKVNILGEVVEKGSSCFPVDTTGFCLHSAIYAARPDVRCIIHLHTPATAAVSAMKWGLLPVSHNALLVGDMAYYDFNGEMEQEADRINLQKCLGPTCKILVLRNHGVVALGDTVEEAFYKIFHLQAACEIQVSALSSAGGVENLILLEQEKHRPHEVGSVQWAGSTFGPMQKSRLGEHEFEALMRMLDNLGYRTGYTYRHPFVQEKTKHKSEVEIPATVTAFVFEEDGAPVPALRQHAQKQQKEKTRWLNTPNTYLRVNVADEVQRSMGSPRPKTTWMKADEVEKSSSGMPIRIENPNQFVPLYTDPQEVLEMRNKIREQNRQDVKSAGPQSQLLASVIAEKSRSPSTESQLMSKGDEDTKDDSEETVPNPFSQLTDQELEEYKKEVERKKLELDGEKETAPEEPGSPAKSAPASPVQSPAKEAETKSPLVSPSKSLEEGTKKTETSKAATTEPETTQPEGVVVNGREEEQTAEEILSKGLSQMTTSADTDVDTSKDKTESVTSGPMSPEGSPSKSPSKKKKKFRTPSFLKKSKKKEKVES

SEQ ID NO: 10639 - protein, 559 aa, Homo sapiens
MSEETVPEAASPPPPQGQPYFDRFSEDDPEYMRLRNRAADLRQDFNLMEQKKRVTMILQSPSFREELEGLIQEQMKKGNNSSNIWALRQIADFMASTSHAVFPTSSMNVSMMTPINDLHTADSLNLAKGERLMRCKISSVYRLLDLYGWAQLSDTYVTLRVSKEQDHFLISPKGVSCSEVTASSLIKVNILGEVVEKGSSCFPVDTTGFCLHSAIYAARPDVRCIIHLHTPATAAVSAMKWGLLPVSHNALLVGDMAYYDFNGEMEQEADRINLQKCLGPTCKILVLRNHGVVALGDTVEEAFYKIFHLQAACEIQVSALSSAGGVENLILLEQEKHRPHEVGSVQWAGSTFGPMQKSRLGEHEFEALMRMLDNLGYRTGYTYRHPFVQEKTKHKSEVEIPATVTAFVFEEDGAPVPALRQHAQKQQKEKTRWLNTPNTYLRVNVADEVQRSMGSPRPKTTWMKADEVEKSSSGMPIRIENPNQFVPLYTDPQEVLEMRNKIREQNRQDVKSAGPQSQLLASVIAEKSRSPVEQRLPLTGGETCLPSGSSVPGAGLQDP

SEQ ID NO: 10640 - protein, 643 aa, Homo sapiens
MSEETVPEAASPPPPQGQPYFDRFSEDDPEYMRLRNRAADLRQDFNLMEQKKRVTMILQSPSFREELEGLIQEQMKKGNNSSNIWALRQIADFMASTSHAVFPTSSMNVSMMTPINDLHTADSLNLAKGERLMRCKISSVYRLLDLYGWAQLSDTYVTLRVSKEQDHFLISPKGVSCSEVTASSLIKVNILGEVVEKGSSCFPVDTTGFCLHSAIYAARPDVRCIIHLHTPATAAVSAMKWGLLPVSHNALLVGDMAYYDFNGEMEQEADRINLQKCLGPTCKILVLRNHGVVALGDTVEEAFYKIFHLQAACEIQVSALSSAGGVENLILLEQEKHRPHEVGSVQWAGSTFGPMQKSRLGEHEFEALMRMLDNLGYRTGYTYRHPFVQEKTKHKSEVEIPATVTAFVFEEDGAPVPALRQHAQKQQKEKTRWLNTPNTYLRVNVADEVQRSMGSPRPKTTWMKADEVEKSSSGMPIRIENPNQFVPLYTDPQEVLEMRNKIREQNRQDVKSAGPQSQLLASVIAEKSRSPSTESQLMSKGDEDTKDDSEETVPNPFSQLTDQELEEYKKEVERKKLELDETGQEREPGSGPAVCEFFSVALHIWSNILERKKLPQKSLAHLQSLHLLLQCRAQRRRQRQRAL

SEQ ID NO: 10641 - protein, 587 aa, Homo sapiens
MSEETVPEAASPPPPQGQPYFDRFSEDDPEYMRLRNRAADLRQDFNLMEQKKRVTMILQSPSFREELEGLIQEQMKKGNNSSNIWALRQIADFMASTSHAVFPTSSMNVSMMTPINDLHTADSLNLAKGERLMRCKISSVYRLLDLYGWAQLSDTYVTLRVSKEQDHFLISPKGVSCSEVTASSLIKVNILGEVVEKGSSCFPVDTTGFCLHSAIYAARPDVRCIIHLHTPATAAVSAMKWGLLPVSHNALLVGDMAYYDFNGEMEQEADRINLQKCLGPTCKILVLRNHGVVALGDTVEEAFYKIFHLQAACEIQVSALSSAGGVENLILLEQEKHRPHEVGSVQWAGSTFGPMQKSRLGEHEFEALMRMLDNLGYRTGYTYRHPFVQEKTKHKSEVEIPATVTAFVFEEDGAPVPALRQHAQKQQKEKTRWLNTPNTYLRVNVADEVQRSMGSPRPKTTWMKADEVEKSSSGMPIRIENPNQFVPLYTDPQEVLEMRNKIREQNRQDVKSAGPQSQLLASVIAEKSRSPSTESQLMSKGDEDTKDDSEETVPNPFSQLTDQELEEYKKEVERKKLELDAPGWFSS

SEQ ID NO: 10642 - protein, 280 aa, Homo sapiens
MSEETVPEAASPPPPQGQPYFDRFSEDDPEYMRLRNRAADLRQDFNLMEQKKRVTMILQSPSFREELEGLIQEQMKKGNNSSNIWALRQIADFMASTSHAVFPTSSMNVSMMTPINDLHTADSLNLAKGERLMRCKISSVYRLLDLYGWAQLSDTYVTLRVSKEQDHFLISPKGVSCSEVTASSLIKEVLEMRNKIREQNRQDVKSAGPQSQLLASVIAEKSRSPSTESQLMSKGDEDTKDDSEETVPNPFSQLTDQELEEYKKEVERKKLELDETGQER

SEQ ID NO: 10643 - protein, 281 aa, Homo sapiens
MSEETVPEAASPPPPQGQPYFDRFSEDDPEYMRLRNRAADLRQDFNLMEQKKRVTMILQSPSFREELEGLIQEQMKKGNNSSNIWALRQIADFMASTSHAVFPTSSMNVSMMTPINDLHTADSLNLAKGERLMRCKISSVYRLLDLYGWAQLSDTYVTLRVSKEQDHFLISPKGVSCSEVTASSLIKEVLEMRNKIREQNRQDVKSAGPQSQLLASVIAEKSRSPSTESQLMSKGDEDTKDDSEETVPNPFSQLTDQELEEYKKEVERKKLELDAPGWFSS

SEQ ID NO: 10644 - protein, 98 aa, Homo sapiens
MSEETVPEAASPPPPQGQPYFDRFSEDDPEYMRLRNRAADLRQDFNLMEQKKRVTMILQSPSFREELEGLIQEQMKKEYKKEVERKKLELDAPGWFSS

SEQ ID NO: 10645 - protein, 574 aa, Homo sapiens
MPRRRVPGANCKPTGKSEETVPEAASPPPPQGQPYFDRFSEDDPEYMRLRNRAADLRQDFNLMEQKKRVTMILQSPSFREELEGLIQEQMKKGNNSSNIWALRQIADFMASTSHAVFPTSSMNVSMMTPINDLHTADSLNLAKGERLMRCKISSVYRLLDLYGWAQLSDTYVTLRVSKEQDHFLISPKGVSCSEVTASSLIKVNILGEVVEKGSSCFPVDTTGFCLHSAIYAARPDVRCIIHLHTPATAAVSAMKWGLLPVSHNALLVGDMAYYDFNGEMEQEADRINLQKCLGPTCKILVLRNHGVVALGDTVEEAFYKIFHLQAACEIQVSALSSAGGVENLILLEQEKHRPHEVGSVQWAGSTFGPMQKSRLGEHEFEALMRMLDNLGYRTGYTYRHPFVQEKTKHKSEVEIPATVTAFVFEEDGAPVPALRQHAQKQQKEKTRWLNTPNTYLRVNVADEVQRSMGSPRPKTTWMKADEVEKSSSGMPIRIENPNQFVPLYTDPQEVLEMRNKIREQNRQDVKSAGPQSQLLASVIAEKSRSPVEQRLPLTGGETCLPSGSSVPGAGLQDP

SEQ ID NO: 10646 - protein, 575 aa, Homo sapiens
MPRRRVPGANCKPTGKMSEETVPEAASPPPPQGQPYFDRFSEDDPEYMRLRNRAADLRQDFNLMEQKKRVTMILQSPSFREELEGLIQEQMKKGNNSSNIWALRQIADFMASTSHAVFPTSSMNVSMMTPINDLHTADSLNLAKGERLMRCKISSVYRLLDLYGWAQLSDTYVTLRVSKEQDHFLISPKGVSCSEVTASSLIKVNILGEVVEKGSSCFPVDTTGFCLHSAIYAARPDVRCIIHLHTPATAAVSAMKWGLLPVSHNALLVGDMAYYDFNGEMEQEADRINLQKCLGPTCKILVLRNHGVVALGDTVEEAFYKIFHLQAACEIQVSALSSAGGVENLILLEQEKHRPHEVGSVQWAGSTFGPMQKSRLGEHEFEALMRMLDNLGYRTGYTYRHPFVQEKTKHKSEVEIPATVTAFVFEEDGAPVPALRQHAQKQQKEKTRWLNTPNTYLRVNVADEVQRSMGSPRPKTTWMKADEVEKSSSGMPIRIENPNQFVPLYTDPQEVLEMRNKIREQNRQDVKSAGPQSQLLASVIAEKSRSPVEQRLPLTGGETCLPSGSSVPGAGLQDP

SEQ ID NO: 10647 - protein, 1079 aa, Homo sapiens
MVCSAAPLLLLATTLPLLGSPVAQASQPVSETGVRPREGLQRRQWGPLIGRDKAWNERIDRPFPACPIPLSSSFGRWPKGQTMWAQTSTLTLTEEELGQSQAGGESGSGQLLDQENGAGESALVSVYVHLDFPDKTWPPELSRTLTLPAASASSSPRPLLTGLRLTTECNVNHKGNFYCACLSGYQWNTSICLHYPPCQSLHNHQPCGCLVFSHPEPGYCQLLPPGSPVTCLPAVPGILNLNSQLQMPGDTLSLTLHLSQEATNLSWFLRHPGSPSPILLQPGTQVSVTSSHGQAALSVSNMSHHWAGEYMSCFEAQGFKWNLYEVVRVPLKATDVARLPYQLSISCATSPGFQLSCCIPSTNLAYTAAWSPGEGSKASSFNESGSQCFVLAVQRCPMADTTYACDLQSLGLAPLRVPISITIIQDGDITCPEDASVLTWNVTKAGHVAQAPCPESKRGIVRRLCGADGVWGPVHSSCTDARLLALFTRTKLLQAGQGSPAEEVPQILAQLPGQAAEASSPSDLLTLLSTMKYVAKVVAEARIQLDRRALKNLLIATDKVLDMDTRSLWTLAQARKPWAGSTLLLAVETLACSLCPQDHPFAFSLPNVLLQSQLFGPTFPADYSISFPTRPPLQAQIPRHSLAPLVRNGTEISITSLVLRKLDHLLPSNYGQGLGDSLYATPGLVLVISIMAGDRAFSQGEVIMDFGNTDGSPHCVFWDHSLFQGRGGWSKEGCQAQVASASPTAQCLCQHLTAFSVLMSPHTVPEEPALALLTQVGLGASILALLVCLGVYWLVWRVVVRNKISYFRHAALLNMVFCLLAADTCFLGAPFLSPGPRSPLCLAAAFLCHFLYLATFFWMLAQALVLAHQLLFVFHQLAKHRVLPLMVLLGYLCPLGLAGVTLGLYLPQGQYLREGECWLDGKGGALYTFVGPVLAIIGVNGLVLAMAMLKLLRPSLSEGPPAEKRQALLGVIKALLILTPIFGLTWGLGLATLLEEVSTVPHYIFTILNTLQGVFILLFGCLMDRKIQEALRKRFCRAQAPSSTISLVSCCLQILSCASKSMSEGIPWPSSEDMGTARS

SEQ ID NO: 10648 - protein, 873 aa, Homo sapiens
MTTRKLSAHSAATPGYKAVTHKHHTGWARMAKTGLPEKGQSQAGGESGSGQLLDQENGAGESALVSVYVHLDFPDKTWPPELSRTLTLPAASASSSPRPLLTGLRLTTGEYMSCFEAQGFKWNLYEVVRVPLKATDVARLPYQLSISCATSPGFQLSCCIPSTNLAYTAAWSPGEGSKASSFNESGSQCFVLAVQRCPMADTTYACDLQSLGLAPLRVPISITIIQDGDITCPEDASVLTWNVTKAGHVAQAPCPESKRGIVRRLCGADGVWGPVHSSCTDARLLALFTRTKLLQAGQGSPAEEVPQILAQLPGQAAEASSPSDLLTLLSTMKYVAKVVAEARIQLDRRALKNLLIATDKVLDMDTRSLWTLAQARKPWAGSTLLLAVETLACSLCPQDHPFAFSLPNVLLQSQLFGPTFPADYSISFPTRPPLQAQIPRHSLAPLVRNGTEISITSLVLRKLDHLLPSNYGQGLGDSLYATPGLVLVISIMAGDRAFSQGEVIMDFGNTDGSPHCVFWDHSLFQGRGGWSKEGCQAQVASASPTAQCLCQHLTAFSVLMSPHTVPEEPALALLTQVGLGASILALLVCLGVYWLVWRVVVRNKISYFRHAALLNMVFCLLAADTCFLGAPFLSPGPRSPLCLAAAFLCHFLYLATFFWMLAQALVLAHQLLFVFHQLAKHRVLPLMVLLGYLCPLGLAGVTLGLYLPQGQYLREGECWLDGKGGALYTFVGPVLAIIGVNGLVLAMAMLKLLRPSLSEGPPAEKRQALLGVIKALLILTPIFGLTWGLGLATLLEEVSTVPHYIFTILNTLQGVFILLFGCLMDRKIQEALRKRFCRAQAPSSTISLATNEGCILEHSKGGSDTARKTDASE

SEQ ID NO: 10649 - protein, 997 aa, Homo sapiens
MVCSAAPLLLLATTLPLLGSPVAQASQPGQSQAGGESGSGQLLDQENGAGESALVSVYVHLDFPDKTWPPELSRTLTLPAASASSSPRPLLTGLRLTTECNVNHKGNFYCACLSGYQWNTSICLHYPPCQSLHNHQPCGCLVFSHPEPGYCQLLPPGSPVTCLPAVPGILNLNSQLQMPGDTLSLTLHLSQEATNLSWFLRHPGSPSPILLQPGTQVSVTSSHGQAALSVSNMSHHWAGEYMSCFEAQGFKWNLYEVVRVPLKATDVARLPYQLSISCATSPGFQLSCCIPSTNLAYTAAWSPGEGSKASSFNESGSQCFVLAVQRCPMADTTYACDLQSLGLAPLRVPISITIIQDGDITCPEDASVLTWNVTKAGHVAQAPCPESKRGIVRRLCGADGVWGPVHSSCTDARLLALFTRTKLLQAGQGSPAEEVPQILAQLPGQAAEASSPSDLLTLLSTMKYVAKVVAEARIQLDRRALKNLLIATDKVLDMDTRSLWTLAQARKPWAGSTLLLAVETLACSLCPQDHPFAFSLPNVLLQSQLFGPTFPADYSISFPTRPPLQAQIPRHSLAPLVRNGTEISITSLVLRKLDHLLPSNYGQGLGDSLYATPGLVLVISIMAGDRAFSQGEVIMDFGNTDGSPHCVFWDHSLFQGRGGWSKEGCQAQVASASPTAQCLCQHLTAFSVLMSPHTVPEEPALALLTQVGLGASILALLVCLGVYWLVWRVVVRNKISYFRHAALLNMVFCLLAADTCFLGAPFLSPGPRSPLCLAAAFLCHFLYLATFFWMLAQALVLAHQLLFVFHQLAKHRVLPLMVLLGYLCPLGLAGVTLGLYLPQGQYLREGECWLDGKGGALYTFVGPVLAIIGVNGLVLAMAMLKLLRPSLSEGPPAEKRQALLGVIKALLILTPIFGLTWGLGLATLLEEVSTVPHYIFTILNTLQGVFILLFGCLMDRKIQEALRKRFCRAQAPSSTISLATNEGCILEHSKGGSDTAR

SEQ ID NO: 10650 - protein, 708 aa, Homo sapiens
MGLTAYGNRRVQPGELPFGANLTLIHTRAQPVICSKLLLTKRVSPISFFLSKFQNSWGEDGWVQLDQLPSPNAVSSDQVHCSAGCTHRKCGWAASKSKEKVPARPHGVCDGVCTDYSQCTQPCPPDTQGNMGFSCRQKTWHKITDTCQTLNALNIFEEDSRLVQPFEDNIKISVYTGKSETITDMLLQKCPTDLSCVIRNIQQSPWIPGNIAVIVQLLHNISTAIWTGVDEAKMQSYSTIANHILNSKSISNWTFIPDRNSSYILLHSVNSFARRLFIDKHPVDISDVFIHTMGTTISGDNIGKNFTFSMRINDTSNEVTGRVLISRDELRKVPSPSQVISIAFPTIGAILEASLLENVTVNGLVLSAILPKELKRISLIFEKISKSEERRTQCVGWHSVENRWDQQACKMIQENSQQAVCKCRPSKLFTSFSILMSPHILESLILTYITYVGLGISICSLILCLSIEVLVWSQVTKTEITYLRHVCIVNIAATLLMADVWFIVASFLSGPITHHKGCVAATFFVHFFYLSVFFWMLAKALLILYGIMIVFHTLPKSVLVASLFSVGYGCPLAIAAITVAATEPGKGYLRPEICWLNWDMTKALLAFVIPALAIVVVNLITVTLVIVKTQRAAIGNSMFQEVRAIVRISKNIAILTPLLGLTWGFGVATVIDDRSLAFHIIFSLLNAFQVSPDASDQVQSERIHEDVL

SEQ ID NO: 10651 - protein, 642 aa, Homo sapiens
MTHILLLYYLVFLLPTESCRTLYQAASKSKEKVPARPHGVCDGVCTDYSQCTQPCPPDTQGNMGFSCRQKTWHKITDTCQTLNALNIFEEDSRLVQPFEDNIKISVYTGKSETITDMLLQKCPTDLSCVIRNIQQSPWIPGNIAVIVQLLHNISTAIWTGVDEAKMQSYSTIANHILNSKSISNWTFIPDRNSSYILLHSVNSFARRLFIDKHPVDISDVFIHTMGTTISGDNIGKNFTFSMRINDTSNEVTGRVLISRDELRKVPSPSQVISIAFPTIGAILEASLLENVTVNGLVLSAILPKELKRISLIFEKISKSEERRTQCVGWHSVENRWDQQACKMIQENSQQAVCKCRPSKLFTSFSILMSPHILESLILTYITYVGLGISICSLILCLSIEVLVWSQVTKTEITYLRHVCIVNIAATLLMADVWFIVASFLSGPITHHKGCVAATFFVHFFYLSVFFWMLAKALLILYGIMIVFHTLPKSVLVASLFSVGYGCPLAIAAITVAATEPGKGYLRPEICWLNWDMTKALLAFVIPALAIVVVNLITVTLVIVKTQRAAIGNSMFQEVRAIVRISKNIAILTPLLGLTWGFGVATVIDDRSLAFHIIFSLLNAFQGFFILVFGTILDPKIREALKG

SEQ ID NO: 10652 - protein, 663 aa, Homo sapiens
MGNILTCRVHPSVSLEFDQQQGSVCPSESEIYEAGAEDRMAGAPMAAAVQPAEVTVEVGEDLHMHHVRDREMPEALEFNPSANPEASTIFQRNSQTDVVEIRRSNCTNHVSTVHFSQQYSLCSTIFLDDSTAIQHYLTMTIISVTLEIPHHITQRDADRSLSIPDEQLHSFAVSTVHITKNRNGGGSLNNYSSSIPSTPSTSQEDPQFSVPPTANTPTPVCKRSMRWSNLFTSEKGSDPDKERKAPENHADTIGSGRAIPIKQGMLLKRSGKWLKTWKKKYVTLCSNGVLTYYSSLGDYMKYIHKKEIDLQTSTIKVPGKWPSLATLACTPISSSKSDGLSKDMDTGLGDSICFSPSISSTTIPKLNPPPSPHANKKKHLKKKSTNNFMIVSATGQTWHFEATTYEERDAWVQAIQSQILASLQSCESSKSKSQLTSQSEAMALQSIQNMRGNAHCVDCETQNPKWASLNLGVLMCIECSGIHRSLGTRLSRVRSLELDDWPVELRKVMSSIGNDLANSIWEGSSQGRTKPTEKSTREEKERWIRSKYEEKLFLAPLPCTELSLGQQLLRATADEDLQTAILLLAHGSREEVNETCGEGDGCTALHLACRKGNVVLAQLLIWYGVDVMARDAHGNTALTYARQASSQECINVLLQYGCPDECV

SEQ ID NO: 10653 - protein, 507 aa, Homo sapiens
MEKWYLMTVVVLIGLTVRWTVSLNSYSGAGKPPMFGDYEAQRHWQEITFNLPVKQWYFNSSDNNLQYWGLDYPPLTAYHSLLCAYVAKFINPDWIALHTSRGYESQAHKLFMRTTVLIADLLIYIPAVVLYCCCLKEISTKKKIANALCILLYPGLILIDYGHFQYNSVSLGFALWGVLGISCDCDLLGSLAFCLAINYKQMELYHALPFFCFLLGKCFKKGLKGKGFVLLVKLACIVVASFVLCWLPFFTEREQTLQVLRRLFPVDRGLFEDKVANIWCSFNVFLKIKDILPRHIQLIMSFCSTFLSLLPACIKLILQPSSKGFKFTLVSCALSFFLFSFQVHEKSILLVSLPVCLVLSEIPFMSTWFLLVSTFSMLPLLLKDELLMPSVVTTMAFFIACVTSFSIFEKTSEEELQLKSFSISVRKYLPCFTFLSRIIQYLFLISVITMVLLTLMTVTLDPPQKLPDLFSVLVCFVSCLNFLFFLVYFNIIIMWDSKSGRNQKKIS

SEQ ID NO: 10654 - protein, 277 aa, Homo sapiens
MSSGIHVALVTGGNKGIGLAIVRDLCRLFSGDVVLTARDVTRGQAAVQQLQAEGLSPRFHQLDIDDLQSIRALRDFLRKEYGGLDVLVNNAGIAFKVADPTPFHIQAEVTMKTNFFGTRDVCTELLPLIKPQGRVVNVSSIMSVRALKSCSPELQQKFRSETITEEELVGLMNKFVEDTKKGVHQKEGWPSSAYGVTKIGVTVLSRIHARKLSEQRKGDKILLNACCPGWVRTDMAGPKATKSPEEGAETPVYLALLPPDAEGPHGQFVSEKRVEQW

SEQ ID NO: 10655 - protein, 173 aa, Homo sapiens
MSSGIHVALVTGGNKGIGLAIVRDLCRLFSGDVVLTARDVTRGQAAVQQLQAEGLSPRFHQLDIDDLQSIRALRDFLRKEYGGLDVLVNNAGIAFKVADPTPFHIQAEVTMKTNFFGTRDVCTELLPLIKPQASCVLSAWSCLSQNPSGGKSKPLAWFTEMSIICRCLTLGPF

SEQ ID NO: 10656 - protein, 953 aa, Homo sapiens
MKRGIRRDPFRKRKLGGRAKKVREPTAVNSFYREASLPSVWASLRRREMVRSGARPGQVLSSGRHTGPAKLTNGKKATYLRKIPRFNADSGYSIHSDSESQAETVHGLDGCASLLRDILRNEDSGSETAYLENRSNSRPLESKRYGSKKKRHEKHTIPLVVQKETSSSDNKKQIPNEASARSERDTSDLEQNWSLQDHYRMYSPIIYQALCEHVQTQMSLMNDLTSKNIPNGIPAVPCHAPSHSESQATPHSSYGLCTSTPVWSLQRPPCPPKVHSEVQTDGNSQFASQGKTVSATCTDVLRNSFNTSPGVPCSLPKTDISAIPTLQQLGLVNGILPQQGIHKETDLLKCIQTYLSLFRSHGKETHLDSQTHRSPTQSQPAFLATNEEKCAREQIREATSERKDLNIHVRDTKTVKDVQKAKNVNKTAEKVRIIKYLLGELKALVAEQEDSEIQRLITEMEACISVLPTVSGNTDIQVEIALAMQPLRSENAQLRRQLRILNQQLREQQKTQKPSGAVDCNLELFSLQSLNMSLQNQLEESLKSQELLQSKNEELLKVIENQKDENKKFSSIFKDKDQTILENKQQYDIEITRIKIELEEALVNVKSSQFKLETAEKENQILGITLRQRDAEVTRLRELTRTLQTSMAKLLSDLSVDSARCKPGNNLTKSLLNIHDKQLQHDPAPAHTSIMSYLNKLETNYSFTHSEPLSTIKNEETIEPDKTYENVLSSRGPQNSNTRGMEEASAPGIISALSKQDSDEGSETMALIEDEHNLDNTIYIPFARSTPEKKSPLSKRLSPQPQIRAATTQLVSNSGLAVSGKENKLCTPVICSSSTKEAEDAPEKLSRASDMKDTQLLKKIKEAIGKIPAATKEPEEQTACHGPSGCLSNSLQVKGNTVCDGSVFTSDLMSDWSISSFSTFTSRDEQDFRNGLAALDANIARLQKSLRTGLLEK

SEQ ID NO: 10657 - protein, 753 aa, Homo sapiens
MYSPIIYQALCEHVQTQMSLMNDLTSKNIPNGIPAVPCHAPSHSESQATPHSSYGLCTSTPVWSLQRPPCPPKVHSEVQTDGNSQFASQGKTVSATCTDVLRNSFNTSPGVPCSLPKTDISAIPTLQQLGLVNGILPQQGIHKETDLLKCIQTYLSLFRSHGKETHLDSQTHRSPTQSQPAFLATNEEKCAREQIREATSERKDLNIHVRDTKTVKDVQKAKNVNKTAEKVRIIKYLLGELKALVAEQEDSEIQRLITEMEACISVLPTVSGNTDIQVEIALAMQPLRSENAQLRRQLRILNQQLREQQKTQKPSGAVDCNLELFSLQSLNMSLQNQLEESLKSQELLQSKNEELLKVIENQKDENKKFSSIFKDKDQTILENKQQYDIEITRIKIELEEALVNVKSSQFKLETAEKENQILGITLRQRDAEVTRLRELTRTLQTSMAKLLSDLSVDSARCKPGNNLTKSLLNIHDKQLQHDPAPAHTSIMSYLNKLETNYSFTHSEPLSTIKNEETIEPDKTYENVLSSRGPQNSNTRGMEEASAPGIISALSKQDSDEGSETMALIEDEHNLDNTIYIPFARSTPEKKSPLSKRLSPQPQIRAATTQLVSNSGLAVSGKENKLCTPVICSSSTKEAEDAPEKLSRASDMKDTQLLKKIKEAIGKIPAATKEPEEQTACHGPSGCLSNSLQVKGNTVCDGSVFTSDLMSDWSISSFSTFTSRDEQDFRNGLAALDANIARLQKSLRTGLLEK

SEQ ID NO: 10658 - protein, 793 aa, Homo sapiens
MPMESASSDNKKQIPNEASARSERDTSDLEQNWSLQDHYRMYSPIIYQALCEHVQTQMSLMNDLTSKNIPNGIPAVPCHAPSHSESQATPHSSYGLCTSTPVWSLQRPPCPPKVHSEVQTDGNSQFASQGKTVSATCTDVLRNSFNTSPGVPCSLPKTDISAIPTLQQLGLVNGILPQQGIHKETDLLKCIQTYLSLFRSHGKETHLDSQTHRSPTQSQPAFLATNEEKCAREQIREATSERKDLNIHVRDTKTVKDVQKAKNVNKTAEKVRIIKYLLGELKALVAEQEDSEIQRLITEMEACISVLPTVSGNTDIQVEIALAMQPLRSENAQLRRQLRILNQQLREQQKTQKPSGAVDCNLELFSLQSLNMSLQNQLEESLKSQELLQSKNEELLKVIENQKDENKKFSSIFKDKDQTILENKQQYDIEITRIKIELEEALVNVKSSQFKLETAEKENQILGITLRQRDAEVTRLRELTRTLQTSMAKLLSDLSVDSARCKPGNNLTKSLLNIHDKQLQHDPAPAHTSIMSYLNKLETNYSFTHSEPLSTIKNEETIEPDKTYENVLSSRGPQNSNTRGMEEASAPGIISALSKQDSDEGSETMALIEDEHNLDNTIYIPFARSTPEKKSPLSKRLSPQPQIRAATTQLVSNSGLAVSGKENKLCTPVICSSSTKEAEDAPEKLSRASDMKDTQLLKKIKEAIGKIPAATKEPEEQTACHGPSGCLSNSLQVKGNTVCDGSVFTSDLMSDWSISSFSTFTSRDEQDFRNGLAALDANIARLQKSLRTGLLEK

SEQ ID NO: 10659 - protein, 455 aa, Homo sapiens
MYSPIIYQALCEHVQTQMSLMNDLTSKNIPNGIPAVPCHAPSHSESQATPHSSYGLCTSTPVWSLQRPPCPPKVHSEVQTDGNSQFASQGKTVSATCTDVLRNSFNTSPGVPCSLPKTDISAIPTLQQLGLVNGILPQQGIHKETDLLKCIQTYLSLFRSHGKETHLDSQTHRSPTQSQPAFLATNEEKCAREQIREATSERKDLNIHVRDTKTVKDVQKAKNVNKTAEKVRIIKYLLGELKALVAEQEDSEIQRLITEMEACISVLPTVSGNTDIQVEIALAMQPLRSENAQLRRQLRILNQQLREQQKTQKPSGAVDCNLELFSLQSLNMSLQNQLEESLKSQELLQSKNEELLKVIENQKDENKKFSSIFKDKDQTILENKQQYDIEITRIKIELEEALVNVKSSQFKLETAEKENQILGITLRQRDAEVTRLRELTRKQKMHLKNFPEHLI

SEQ ID NO: 10660 - protein, 794 aa, Homo sapiens
MKRGIRRDPFRKRKLGGRAKKVREPTAVNSFYREASLPSVWASLRRREMVRSGARPGQVLSSGRHTGPAKLTNGKKATYLRKIPRFNADSGYSIHSDSESQAETVHGLDGCASLLRDILRNEDSGSETAYLENRSNSRPLESKRYGSKKKRHEKHTIPLVVQKETSSSDNKKQIPNEASARSERDTSDLEQNWSLQDHYRMYSPIIYQALCEHVQTQMSLMNDLTSKNIPNGIPAVPCHAPSHSESQATPHSSYGLCTSTPVWSLQRPPCPPKVHSEVQTDGNSQFASQEDSEIQRLITEMEACISVLPTVSGNTDIQVEIALAMQPLRSENAQLRRQLRILNQQLREQQKTQKPSGAVDCNLELFSLQSLNMSLQNQLEESLKSQELLQSKNEELLKVIENQKDENKKFSSIFKDKDQTILENKQQYDIEITRIKIELEEALVNVKSSQFKLETAEKENQILGITLRQRDAEVTRLRELTRTLQTSMAKLLSDLSVDSARCKPGNNLTKSLLNIHDKQLQHDPAPAHTSIMSYLNKLETNYSFTHSEPLSTIKNEETIEPDKTYENVLSSRGPQNSNTRGMEEASAPGIISALSKQDSDEGSETMALIEDEHNLDNTIYIPFARSTPEKKSPLSKRLSPQPQIRAATTQLVSNSGLAVSGKENKLCTPVICSSSTKEAEDAPEKLSRASDMKDTQLLKKIKEAIGKIPAATKEPEEQTACHGPSGCLSNSLQVKGNTVCDGSVFTSDLMSDWSISSFSTFTSRDEQDFRNGLAALDANIARLQKSLRTGLLEK

SEQ ID NO: 10661 - protein, 912 aa, Homo sapiens
MKRGIRRDPFRKRKLGGRAKKVREPTAVNSFYREASLPSVWASLRRREMVRSGARPGQVLSSGRHTGPAKLTNGKKATYLRKIPRFNADSGYSIHSDSESQAETVHGLDGCASLLRDILRNEDSASSDNKKQIPNEASARSERDTSDLEQNWSLQDHYRMYSPIIYQALCEHVQTQMSLMNDLTSKNIPNGIPAVPCHAPSHSESQATPHSSYGLCTSTPVWSLQRPPCPPKVHSEVQTDGNSQFASQGKTVSATCTDVLRNSFNTSPGVPCSLPKTDISAIPTLQQLGLVNGILPQQGIHKETDLLKCIQTYLSLFRSHGKETHLDSQTHRSPTQSQPAFLATNEEKCAREQIREATSERKDLNIHVRDTKTVKDVQKAKNVNKTAEKVRIIKYLLGELKALVAEQEDSEIQRLITEMEACISVLPTVSGNTDIQVEIALAMQPLRSENAQLRRQLRILNQQLREQQKTQKPSGAVDCNLELFSLQSLNMSLQNQLEESLKSQELLQSKNEELLKVIENQKDENKKFSSIFKDKDQTILENKQQYDIEITRIKIELEEALVNVKSSQFKLETAEKENQILGITLRQRDAEVTRLRELTRTLQTSMAKLLSDLSVDSARCKPGNNLTKSLLNIHDKQLQHDPAPAHTSIMSYLNKLETNYSFTHSEPLSTIKNEETIEPDKTYENVLSSRGPQNSNTRGMEEASAPGIISALSKQDSDEGSETMALIEDEHNLDNTIYIPFARSTPEKKSPLSKRLSPQPQIRAATTQLVSNSGLAVSGKENKLCTPVICSSSTKEAEDAPEKLSRASDMKDTQLLKKIKEAIGKIPAATKEPEEQTACHGPSGCLSNSLQVKGNTVCDGSVFTSDLMSDWSISSFSTFTSRDEQDFRNGLAALDANIARLQKSLRTGLLEK

SEQ ID NO: 10662 - protein, 419 aa, Homo sapiens
MRGLLVLSVLLGAVFGKEDFVGHQVLRISVADEAQVQKVKELEDLEHLQLDFWRGPAHPGSPIDVRVPFPSIQAVKIFLESHGISYETMIEDVQSLLDEEQEQMFAFRSRARSTDTFNYATYHTLEEIYDFLDLLVAENPHLVSKIQIGNTYEGRPIYVLKFSTGGSKRPAIWIDTGIHSREWVTQASGVWFAKKITQDYGQDAAFTAILDTLDIFLEIVTNPDGFAFTHSTNRMWRKTRSHTAGSLCIGVDPNRNWDAGFGLSGASSNPCSETYHGKFANSEVEVKSIVDFVKDHGNIKAFISIHSYSQLLMYPYGYKTEPVPDQDELDQLSKAAVTALASLYGTKFNYGSIIKAIYQASGSTIDWTYSQGIKYSFTFELRDTGRYGFLLPASQIIPTAKETWLALLTIMEHTLNHPY

SEQ ID NO: 10663 - protein, 727 aa, Homo sapiens
MSQQDAVAALSERLLVAAYKGQTENVVQLINKGARVAVTKHGRTPLHLAANKGHLPVVQILLKAGCDLDVQDDGDQTALHRATVVGNTEIIAALIHEGCALDRQDKDGNTALHEASWHGFSQSAKLLIKAGANVLAKNKAGNTALHLACQNSHSQSTRVLLLAGSRADLKNNAGDTCLHVAARYNHLSIIRLLLTAFCSVHEKNQAGDTALHVAAALNHKKVAKILLEAGADTTIVNNAGQTPLETARYHNNPEVALLLTKAPQVLRFSRGRSLRKKRERLKEERRAQSVPRDEVAQSKGSVSAGDTPSSEQAVARKEEAREEFLSASPEPRAKDDRRRKSRPKVSAFSDPTPPADQQPGHQKNLHAHNHPKKRNRHRCSSPPPPHEFRAYQLYTLYRGKDGKVMQAPINGCRCEPLINKLENQLEATVEEIKAELGSVQDKMNTKLGQMENKTQHQMRVLDKLMVERLSAERTECLNRLQQHSDTEKHEGEKRQISLVDELKTWCMLKIQNLEQKLSGDSRACRAKSTPSTCESSTGVDQLVVTAGPAAASDSSPPVVRPKEKALNSTATQRLQQELSSSDCTGSRLRNVKVQTALLPMNEAARSDQQAGPCVNRGTQTKKSGKSGPTRHRAQQPAASSTCGQPPPATGSEQTGPHIRDTSQALELTQYFFEAVSTQMEKWYERKIEEARSQANQKAQQDKATLKEHIKSLEEELAKLRTRVQKEN

SEQ ID NO: 10664 - protein, 692 aa, Homo sapiens
MSQQDAVAALSERLLVAAYKGQTENVVQLINKGARVAVTKHGRTPLHLAANKGHLPVVQILLKAGCDLDVQDDGDQTALHRATVVGNTEIIAALIHEGCALDRQDKDGNTALHEASWHGFSQSAKLLIKAGANVLAKNKAGNTALHLACQNSHSQSTRVLLLAGSRADLKNNAGDTCLHVAARYNHLSIIRLLLTAFCSVHEKNQAGDTALHVAAALNHKKVAKILLEAGADTTIVNNAGQTPLETARYHNNPEVALLLTKAPQGSVSAGDTPSSEQAVARKEEAREEFLSASPEPRAKDDRRRKSRPKVSAFSDPTPPADQQPGHQKNLHAHNHPKKRNRHRCSSPPPPHEFRAYQLYTLYRGKDGKVMQAPINGCRCEPLINKLENQLEATVEEIKAELGSVQDKMNTKLGQMENKTQHQMRVLDKLMVERLSAERTECLNRLQQHSDTEKHEGEKRQISLVDELKTWCMLKIQNLEQKLSGDSRACRAKSTPSTCESSTGVDQLVVTAGPAAASDSSPPVVRPKEKALNSTATQRLQQELSSSDCTGSRLRNVKVQTALLPMNEAARSDQQAGPCVNRGTQTKKSGKSGPTRHRAQQPAASSTCGQPPPATGSEQTGPHIRDTSQALELTQYFFEAVSTQMEKWYERKIEEARSQANQKAQQDKATLKEHIKSLEEELAKLRTRVQKEN

SEQ ID NO: 10665 - protein, 722 aa, Homo sapiens
MSQQDAVAALSERLLVAAYKGQTENVVQLINKGARVAVTKHGRTPLHLAANKGHLPVVQILLKAGCDLDVQDDGDQTALHRATVVGNTEIIAALIHEGCALDRQDKDGNTALHEASWHGFSQSAKLLIKAGANVLAKNKAGNTALHLACQNSHSQSTRVLLLAGSRADLKNNAGDTCLHVAARYNHLSIIRLLLTAFCSVHEKNQAGDTALHVAAALNHKKVAKILLEAGADTTIVNNAGQTPLETARYHNNPEVALLLTKAPQVLRFSRGRSLRKKRERLKEERRAQSVPRDEVAQSKGSVSAGDTPSSEQAVARKEEAREEFLSASPEPRAKDDRRRKSRPKVSAFSDPTPPADQQPGHQKNLHAHNHPKKRNRHRCSSPPPPHEFRAYQLYTLYRGKDGKVMQAPINGCRCEPLINKLENQLEATVEEIKAELGSVQDKMNTKLGQMENKTQHQMRVLDKLMVERLSAERTECLNRLQQHSDTEKHEGEKRQISLVDELKTWCMLKIQNLEQKLSGDSRACRAKSTPSTCVDQLVVTAGPAAASDSSPPVVRPKEKALNSTATQRLQQELSSSDCTGSRLRNVKVQTALLPMNEAARSDQQAGPCVNRGTQTKKSGKSGPTRHRAQQPAASSTCGQPPPATGSEQTGPHIRDTSQALELTQYFFEAVSTQMEKWYERKIEEARSQANQKAQQDKATLKEHIKSLEEELAKLRTRVQKEN

SEQ ID NO: 10666 - protein, 663 aa, Homo sapiens
MSQQDAVAALSERLLVAAYKGQTENVVQLINKGARVAVTKHGRTPLHLAANKGHLPVVQILLKAGCDLDVQDDGDQTALHRATVVGNTEIIAALIHEGCALDRQDKAGNTALHLACQNSHSQSTRVLLLAGSRADLKNNAGDTCLHVAARYNHLSIIRLLLTAFCSVHEKNQAGDTALHVAAALNHKKVAKILLEAGADTTIVNNVLRFSRGRSLRKKRERLKEERRAQSVPRDEVAQSKGSVSAGDTPSSEQAVARKEEAREEFLSASPEPRAKDDRRRKSRPKVSAFSDPTPPADQQPGHQKNLHAHNHPKKRNRHRCSSPPPPHEFRAYQLYTLYRGKDGKVMQAPINGCRCEPLINKLENQLEATVEEIKAELGSVQDKMNTKLGQMENKTQHQMRVLDKLMVERLSAERTECLNRLQQHSDTEKHEGEKRQISLVDELKTWCMLKIQNLEQKLSGDSRACRAKSTPSTCVDQLVVTAGPAAASDSSPPVVRPKEKALNSTATQRLQQELSSSDCTGSRLRNVKVQTALLPMNEAARSDQQAGPCVNRGTQTKKSGKSGPTRHRAQQPAASSTCGQPPPATGSEQTGPHIRDTSQALELTQYFFEAVSTQMEKWYERKIEEARSQANQKAQQDKATLKEHIKSLEEELAKLRTRVQKEN

SEQ ID NO: 10667 - protein, 441 aa, Homo sapiens
MVHIKKGELTQEEKELLEVIGKGTVQEAGTLLSSKNVRVNCLDENGMTPLMHAAYKGKLDMCKLLLRHGADVNCHQHEHGYTALMFAALSGNKDITWVMLEAGAETDVVNSVGRTAAQMAAFVGQHDCVTIINNFFPRERLDYYTKPQGLDKEPKLPPKLAGPLHKIITTTNLHPVKIVMLVNENPLLTEEAALNKCYRVMDLICEKCMKQRDMNEVLAMKMHYISCIFQKCINFLKDGENKLDTLIKSLLKGRASDGFPVYQEKIIRESIRKFPYCEATLLQQLVRSIAPVEIGSDPTAFSVLTQAITGQVGFVDVEFCTTCGEKGASKRCSVCKMVIYCDQTCQKTHWFTHKKICKNLKDIYEKQQLEAAKEKRQEENHGKLDVNSNCVNEEQPEAEVGISQKDSNPEDSGEGKKESLESEAELEGLQDAPAGPQVSEE

SEQ ID NO: 10668 - protein, 1124 aa, Homo sapiens
MDPFTEKLLERTRARRENLQRKMAERPTAAPRSMTHAKRARQPLSEASNQQPLSGGEEKSCTKPSPSKKRCSDNTEVEVSNLENKQPVESTSAKSCSPSPVSPQVQPQAADTISDSVAVPASLLGMRRGLNSRLEATAASSVKTRMQKLAEQRRRWDNDDMTDDIPESSLFSPMPSEEKAASPPRPLLSNASATPVGRRGRLANLAATICSWEDDVNHSFAKQNSVQEQPGTACLSKFSSASGASARINSSSVKQEATFCSQRDGDASLNKALSSSADDASLVNASISSSVKATSPVKSTTSITDAKSCEGQNPELLPKTPISPLKTGVSKPIVKSTLSQTVPSKGELSREICLQSQSKDKSTTPGGTGIKPFLERFGERCQEHSKESPARSTPHRTPIITPNTKAIQERLFKQDTSSSTTHLAQQLKQERQKELACLRGRFDKGNIWSAEKGGNSKSKQLETKQETHCQSTPLKKHQGVSKTQSLPVTEKVTENQIPAKNSSTEPKGFTECEMTKSSPLKITLFLEEDKSLKVTSDPKVEQKIEVIREIEMSVDDDDINSSKVINDLFSDVLEEGELDMEKSQEEMDQALAESSEEQEDALNISSMSLLAPLAQTVGVVSPESLVSTPRLELKDTSRSDESPKPGKFQRTRVPRAESGDSLGSEDRDLLYSIDAYRSQRFKETERPSIKQVIVRKEDVTSKLDEKNNAFPCQVNIKQKMQELNNEINMQQTVIYQASQALNCCVDEEHGKGSLEEAEAERLLLIATGKRTLLIDELNKLKNEGPQRKNKASPQSEFMPSKGSVTLSEIRLPLKADFVCSTVQKPDAANYYYLIILKAGAENMVATPLASTSNSLNGDALTFTTTFTLQDVSNDFEINIEVYSLVQKKDPSGLDKKKKTSKSKAITPKRLLTSITTKSNIHSSVMASPGGLSAVRTSNFALVGSYTLSLSSVGNTKFVLDKVPFLSSLEGHIYLKIKCQVNSSVEERGFLTIFEDVSGFGAWHRRWCVLSGNCISYWTYPDDEKRKNPIGRINLANCTSRQIEPANREFCARRNTFELITVRPQREDDRETLVSQCRDTLCVTKNWLSADTKEERDLWMQKLNQVLVDIRLWQPDACYKPIGKP

SEQ ID NO: 10669 - protein, 1087 aa, Homo sapiens
MDPFTEKLLERTRARRENLQRKMAERPTAAPRSMTHAKRARQPLSEASNQQPLSGGEEKSCTKPSPSKKRCSDNTEVEVSNLENKQPVESTSAKSCSPSPVSPQVQPQAADTISDSVAVPASLLGMRRGLNSRLEATAASSVKTRMQKLAEQRRRWDNDDMTDDIPESSLFSPMPSEEKAASPPRPLLSNASATPVGRRGRLANLAATICSWEDDVNHSFAKQNSVQEQPGTACLSKFSSASGASARINSSSVKQEATFCSQRDGDASLNKALSSSADDASLVNASISSSVKATSPVKSTTSITDAKSCEGQNPELLPKTPISPLKTGVSKPIVKSTLSQTVPSKGELSREICLQSQSKDKSTTPGGTGIKPFLERFGERCQEHSKESPARSTPHRTPIITPNTKAIQERLFKQDTSSSTTHLAQQLKQERQKELACLRGRFDKGNIWSAEKGGNSKSKQLETKQETHCQSTPLKKHQGVSKTQSLPVTEKVTENQIPAKNSSTEPKEVIREIEMSVDDDDINSSKVINDLFSDVLEEGELDMEKSQEEMDQALAESSEEQEDALNISSMSLLAPLAQTVGVVSPESLVSTPRLELKDTSRSDESPKPGKFQRTRVPRAESGDSLGSEDRDLLYSIDAYRSQRFKETERPSIKQVIVRKEDVTSKLDEKNNAFPCQVNIKQKMQELNNEINMQQTVIYQASQALNCCVDEEHGKGSLEEAEAERLLLIATGKRTLLIDELNKLKNEGPQRKNKASPQSEFMPSKGSVTLSEIRLPLKADFVCSTVQKPDAANYYYLIILKAGAENMVATPLASTSNSLNGDALTFTTTFTLQDVSNDFEINIEVYSLVQKKDPSGLDKKKKTSKSKAITPKRLLTSITTKSNIHSSVMASPGGLSAVRTSNFALVGSYTLSLSSVGNTKFVLDKVPFLSSLEGHIYLKIKCQVNSSVEERGFLTIFEDVSGFGAWHRRWCVLSGNCISYWTYPDDEKRKNPIGRINLANCTSRQIEPANREFCARRNTFELITVRPQREDDRETLVSQCRDTLCVTKNWLSADTKEERDLWMQKLNQVLVDIRLWQPDACYKPIGKP

SEQ ID NO: 10670 - protein, 182 aa, Homo sapiens
MGLLSILRKLKSAPDQEVRILLLGLDNAGKTTLLKQLASEDISHITPTQGFNIKSVQSQGFKLNVWDIGGQRKIRPYWKNYFENTDILIYVIDSADRKRFEETGQELAELLEEEKLSCVPVLIFANKQDLLTAAPASEIAEGLNLHTIRDRVWQIQSCSALTGEGVQDGMNWVCKNVNAKKK

SEQ ID NO: 10671 - protein, 167 aa, Homo sapiens
MAQEEEDVRDYNLTEEQKAIKAKYPPVNRKYEYLDHTADVQLHAWGDTLEEAFEQCAMAMFGYMTDTGTVEPLQTVEVETQGDDLQSLLFHFLDEWLYKFSADEFFIPREVKVLSIDQRNFKLRSIGWGEEFSLSKHPQGTEVKAITYSAMQVYNEENPEVFVIIDI

SEQ ID NO: 10672 - protein, 136 aa, Homo sapiens
MAQEEEDVRDYNLTEEQKAIKAKYPPVNRKYEYLDHTADVQLHAWGDTLEEAFEQCAMAMFGYMTDTGTVEPLQTVEVETQGDDLQSLLFHFLDEWLYKFSADEFFIPRVGRRIFIVQAPSGNRSQSNNIFSNAGL

SEQ ID NO: 10673 - protein, 823 aa, Homo sapiens
MFYVIGGITVSVVAFFFTIKFLFELAARVVSFLQNEDRERRGDRTIYDYVRGNYLDPRSCKVSWDWKDPYEVGHSMAFRVHLFYKNGQPFPAHRPVGLRVHISHVELAVEIPVTQEVLQEPNSNVVKVAFTVRKAGRYEITVKLGGLNVAYSPYYKIFQPGMVVPSKTKIVCHFSTLVLTCGQPHTLQIVPRDEYDNPTNNSMSLRDEHNYTLSIHELGPQEEESTGVSFEKSVTSNRQTFQVFLRLTLHSRGCFHACISYQNQPINNGEFDIIVLSEDEKNIVERNVSTSGVSIYFEAYLYNATNCSSTPWHLPPMHMTSSQRRPSTAVDEEDEDSPSECHTPEKVKKPKKVYCYVSPKQFSVKEFYLKIIPWRLYTFRVCPGTKFSYLGPDPVHKLLTLVVDDGIQPPVELSCKERNILAATFIRSLHKNIGGSETFQDKVNFFQRELRQVHMKRPHSKVTLKVSRHALLESSLKATRNFSISDWSKNFEVVFQDEEALDWGGPRREWFELICKALFDTTNQLFTRFSDNNQALVHPNPNRPAHLRLKMYEFAGRLVGKCLYESSLGGAYKQLVRARFTRSFLAQIIGLRMHYKYFETDDPEFYKSKVCFILNNDMSEMELVFAEEKYNKSGQLDKVVELMTGGAQTPVTNANKIFYLNLLAQYRLASQVKEEVEHFLKGLNELVPENLLAIFDENELELLMCGTGDISVSDFKAHAVVVGGSWHFREKVMRWFWTVVSSLTQEELARLLQFTTGSSQLPPGGFAALCPSFQIIAAPTHSTLPTAHTCFNQLCLPTYDSYEEVHRMLQLAISEGCEGFGML

SEQ ID NO: 10674 - protein, 789 aa, Homo sapiens
MFYVIGGITVSVVAFFFTIKFLFELAARVVSFLQNEDRERRGDRTIYDYVRGNYLDPRSCKVSWDWKDPYEVGHSMAFRVHLFYKNGQPFPAHRPVGLRVHISHVELAVEIPVTQEVLQEPNSNVVKVAFTVRKAGRYEITVKLGGLNVAYSPYYKIFQPGMVVPSKTKIVCHFSTLVLTCGQPHTLQIVPRDEYDNPTNNSMSLRDEHNYTLSIHELGPQEEESTGVSFEKSVTSNRQTFQVFLRLTLHSRGCFHACISYQNQPINNGEFDIIVLSEDEKNIVERNVSTSGVSIYFEAYLYNATNCSSTPWHLPPMHMTSSQRRPSTAVDEEDEDSPSECHTPEKVKKPKKVYCYVSPKQFSVKEFYLKIIPWRLYTFRVCPGTKFSYLGPDPVHKLLTLVVDDGIQPPVELSCKERNILAATFIRSLHKNIGGSETFQDKVNFFQRELRQVHMKRPHSKVTLKVSRHALLESSLKATRNFSISDWSKNFEVVFQDEEALDWGGPRREWFELICKALFDTTNQLFTRFSDNNQALVHPNPNRPAHLRLKMYEFAGRLVGKCLYESSLGGAYKQLVRARFTRSFLAQIIGLRMHYKYFETDDPEFYKSKVCFILNNDMSEMELVFAEEKYNKSGQLDKVVELMTGGAQTPVTNANKIFYLNLLAQYRLASQVKEEVEHFLKGLNELVPENLLAIFDENELELLMCGTGDISVSDFKAHAVVVGGSWHFREKVMRWFWTVVSSLTQEELARLLQFTTGSSQLPPGGFAALCPSFQIIAAPTHSTLPTAHT

SEQ ID NO: 10675 - protein, 323 aa, Homo sapiens
MSDRPTARRWGKCGPLCTRENIMVAFKGVWTQAFWKAVTAEFLAMLIFVLLSLGSTINWGGTEKPLPVDMVLISLCFGLSIATMVQCFGHISGGHINPAVTVAMVCTRKISIAKSVFYIAAQCLGAIIGAGILYLVTPPSVVGGLGVTMVHGNLTAGHGLLVELIITFQLVFTIFASCDSKRTDVTGSIALAIGFSVAIGHLFAINYTGASMNPARSFGPAVIMGNWENHWIYWVGPIIGAVLAGGLYEYVFCPDVEFKRRFKEAFSKAAQQTKGSYMEVEDNRSQVETDDLILKPGVVHVIDVDRGEEKKGKDQSGEVLSSV

SEQ ID NO: 10676 - protein, 301 aa, Homo sapiens
MVAFKGVWTQAFWKAVTAEFLAMLIFVLLSLGSTINWGGTEKPLPVDMVLISLCFGLSIATMVQCFGHISGGHINPAVTVAMVCTRKISIAKSVFYIAAQCLGAIIGAGILYLVTPPSVVGGLGVTMVHGNLTAGHGLLVELIITFQLVFTIFASCDSKRTDVTGSIALAIGFSVAIGHLFAINYTGASMNPARSFGPAVIMGNWENHWIYWVGPIIGAVLAGGLYEYVFCPDVEFKRRFKEAFSKAAQQTKGSYMEVEDNRSQVETDDLILKPGVVHVIDVDRGEEKKGKDQSGEVLSSV

SEQ ID NO: 10677 - protein, 637 aa, Homo sapiens
MAAMAVGGAGGSRVSSGRDLNCVPEIADTLGAVAKQGFDFLCMPVFHPRFKREFIQEPAKNRPGPQTRSDLLLSGRDWNTLIVGKLSPWIRPDSKVEKIRRNSEAAMLQELNFGAYLGLPAFLLPLNQEDNTNLARVLTNHIHTGHHSSMFWMRVPLVAPEDLRDDIIENAPTTHTEEYSGEEKTWMWWHNFRTLCDYSKRIAVALEIGADLPSNHVIDRWLGEPIKAAILPTSIFLTNKKGFPVLSKMHQRLIFRLLKLEVQFIITGTNHHSEKEFCSYLQYLEYLSQNRPPPNAYELFAKGYEDYLQSPLQPLMDNLESQTYEVFEKDPIKYSQYQQAIYKCLLDRVPEEEKDTNVQVLMVLGAGRGPLVNASLRAAKQADRRIKLYAVEKNPNAVVTLENWQFEEWGSQVTVVSSDMREWVAPEKADIIVSELLGSFADNELSPECLDGAQHFLKDDGVSIPGEYTSFLAPISSSKLYNEVRACREKDRDPEAQFEMPYVVRLHNFHQLSAPQPCFTFSHPNRDPMIDNNRYCTLEFPVEVNTVLHGFAGYFETVLYQDITLSIRPETHSPGMFSWFPILFPIKQPITVREGQTICVRFWRCSNSKKVWYEWAVTAPVCSAIHNPTGRSYTIGL

SEQ ID NO: 10678 - protein, 620 aa, Homo sapiens
MRGPNSGTEKGRLVIPEKQGFDFLCMPVFHPRFKREFIQEPAKNRPGPQTRSDLLLSGRDWNTLIVGKLSPWIRPDSKVEKIRRNSEAAMLQELNFGAYLGLPAFLLPLNQEDNTNLARVLTNHIHTGHHSSMFWMRVPLVAPEDLRDDIIENAPTTHTEEYSGEEKTWMWWHNFRTLCDYSKRIAVALEIGADLPSNHVIDRWLGEPIKAAILPTSIFLTNKKGFPVLSKMHQRLIFRLLKLEVQFIITGTNHHSEKEFCSYLQYLEYLSQNRPPPNAYELFAKGYEDYLQSPLQPLMDNLESQTYEVFEKDPIKYSQYQQAIYKCLLDRVPEEEKDTNVQVLMVLGAGRGPLVNASLRAAKQADRRIKLYAVEKNPNAVVTLENWQFEEWGSQVTVVSSDMREWVAPEKADIIVSELLGSFADNELSPECLDGAQHFLKDDGVSIPGEYTSFLAPISSSKLYNEVRACREKDRDPEAQFEMPYVVRLHNFHQLSAPQPCFTFSHPNRDPMIDNNRYCTLEFPVEVNTVLHGFAGYFETVLYQDITLSIRPETHSPGMFSWFPILFPIKQPITVREGQTICVRFWRCSNSKKVWYEWAVTAPVCSAIHNPTGRSYTIGL

SEQ ID NO: 10679 - protein, 466 aa, Homo sapiens
MRGPNSGTEKGRLVIPEKQGFDFLCMPVFHPRFKREFIQEPAKNRPGPQTRSDLLLSGRDWNTLIVGKLSPWIRPDSKVEKIRRNSEALEVQFIITGTNHHSEKEFCSYLQYLEYLSQNRPPPNAYELFAKGYEDYLQSPLQPLMDNLESQTYEVFEKDPIKYSQYQQAIYKCLLDRVPEEEKDTNVQVLMVLGAGRGPLVNASLRAAKQADRRIKLYAVEKNPNAVVTLENWQFEEWGSQVTVVSSDMREWVAPEKADIIVSELLGSFADNELSPECLDGAQHFLKDDGVSIPGEYTSFLAPISSSKLYNEVRACREKDRDPEAQFEMPYVVRLHNFHQLSAPQPCFTFSHPNRDPMIDNNRYCTLEFPVEVNTVLHGFAGYFETVLYQDITLSIRPETHSPGMFSWFPILFPIKQPITVREGQTICVRFWRCSNSKKVWYEWAVTAPVCSAIHNPTGRSYTIGL

SEQ ID NO: 10680 - protein, 593 aa, Homo sapiens
MAAMAVGGAGGSRVSSGRDLNCVPEIADTLGAVAKQGFDFLCMPVFHPRFKREFIQEPAKNRPGPQTRSDLLLSGRAFLLPLNQEDNTNLARVLTNHIHTGHHSSMFWMRVPLVAPEDLRDDIIENAPTTHTEEYSGEEKTWMWWHNFRTLCDYSKRIAVALEIGADLPSNHVIDRWLGEPIKAAILPTSIFLTNKKGFPVLSKMHQRLIFRLLKLEVQFIITGTNHHSEKEFCSYLQYLEYLSQNRPPPNAYELFAKGYEDYLQSPLQPLMDNLESQTYEVFEKDPIKYSQYQQAIYKCLLDRVPEEEKDTNVQVLMVLGAGRGPLVNASLRAAKQADRRIKLYAVEKNPNAVVTLENWQFEEWGSQVTVVSSDMREWVAPEKADIIVSELLGSFADNELSPECLDGAQHFLKDDGVSIPGEYTSFLAPISSSKLYNEVRACREKDRDPEAQFEMPYVVRLHNFHQLSAPQPCFTFSHPNRDPMIDNNRYCTLEFPVEVNTVLHGFAGYFETVLYQDITLSIRPETHSPGMFSWFPILFPIKQPITVREGQTICVRFWRCSNSKKVWYEWAVTAPVCSAIHNPTGRSYTIGL

SEQ ID NO: 10681 - protein, 576 aa, Homo sapiens
MRGPNSGTEKGRLVIPEKQGFDFLCMPVFHPRFKREFIQEPAKNRPGPQTRSDLLLSGRAFLLPLNQEDNTNLARVLTNHIHTGHHSSMFWMRVPLVAPEDLRDDIIENAPTTHTEEYSGEEKTWMWWHNFRTLCDYSKRIAVALEIGADLPSNHVIDRWLGEPIKAAILPTSIFLTNKKGFPVLSKMHQRLIFRLLKLEVQFIITGTNHHSEKEFCSYLQYLEYLSQNRPPPNAYELFAKGYEDYLQSPLQPLMDNLESQTYEVFEKDPIKYSQYQQAIYKCLLDRVPEEEKDTNVQVLMVLGAGRGPLVNASLRAAKQADRRIKLYAVEKNPNAVVTLENWQFEEWGSQVTVVSSDMREWVAPEKADIIVSELLGSFADNELSPECLDGAQHFLKDDGVSIPGEYTSFLAPISSSKLYNEVRACREKDRDPEAQFEMPYVVRLHNFHQLSAPQPCFTFSHPNRDPMIDNNRYCTLEFPVEVNTVLHGFAGYFETVLYQDITLSIRPETHSPGMFSWFPILFPIKQPITVREGQTICVRFWRCSNSKKVWYEWAVTAPVCSAIHNPTGRSYTIGL

SEQ ID NO: 10682 - protein, 342 aa, Homo sapiens
MVQASGHRRSTRGSKMVSWSVIAKIQEILQRKMVREFLAEFMSTYVMMVFGLGSVAHMVLNKKYGSYLGVNLGFGFGVTMGVHVAGRISGAHMNAAVTFANCALGRVPWRKFPVYVLGQFLGSFLAAATIYSLFYTAILHFSGGQLMVTGPVATAGIFATYLPDHMTLWRGFLNEAWLTGMLQLCLFAITDQENNPALPGTEALVIGILVVIIGVSLGMNTGYAINPSRDLPPRIFTFIAGWGKQVFSNGENWWWVPVVAPLLGAYLGGIIYLVFIGSTIPREPLKLEDSVAYEDHGITVLPKMGSHEPTISPLTPVSVSPANRSSVHPAPPLHESMALEHF

SEQ ID NO: 10683 - protein, 165 aa, Homo sapiens
MNAAVTFANCALGRVPWRKFPVYVLGQFLGSFLAAATIYSLFYTAILHFSGGQLMVTGPVATAGIFATYLPDHMTLWRGFLNEAWLTGMLQLCLFAITDQENNPALPGTEALVIGILVVIIGVSLGMNTGYAINPSRDLPPRIFTFIAGWGKQVFRYCPCPGPFL

SEQ ID NO: 10684 - protein, 252 aa, Homo sapiens
MFFWCACCLMVAWRVSASDAEHCPELPPVDNSIFVAKEVEGQILGTYVCIKGYHLVGKKTLFCNASKEWDNTTTECRLGHCPDPVLVNGEFSSSGPVNVSDKITFMCNDHYILKGSNRSQCLEDHTWAPPFPICKSRDCDPPGNPVHGYFEGNNFTLGSTISYYCEDRYYLVGVQEQQCVDGEWSSALPVCKLIQEAPKPECEKALLAFQESKNLCEAMENFMQQLKESGMTMEELKYSLELKKAELKAKLL

SEQ ID NO: 10685 - protein, 251 aa, Homo sapiens
MFFWCACCLMVAWRVSASDEHCPELPPVDNSIFVAKEVEGQILGTYVCIKGYHLVGKKTLFCNASKEWDNTTTECRLGHCPDPVLVNGEFSSSGPVNVSDKITFMCNDHYILKGSNRSQCLEDHTWAPPFPICKSRDCDPPGNPVHGYFEGNNFTLGSTISYYCEDRYYLVGVQEQQCVDGEWSSALPVCKLIQEAPKPECEKALLAFQESKNLCEAMENFMQQLKESGMTMEELKYSLELKKAELKAKLL

SEQ ID NO: 10686 - protein, 1001 aa, Homo sapiens
MKRIFSCSSTQVAVERWNRHDQKLLEAVHRGDVGRVAALASRKSARPTKLDSNGQSPFHLAASKGLTECLTILLANGADINSKNEDGSTALHLATISCQPQCVKVLLQHGANEDAVDAENRSPLHWAASSGCASSVLLLCDHEAFLDVLDNDGRTPLMIASLGGHAAICSQLLQRGARVNVTDKNDKSALILACEKGSAEVAELLLSHGADAGAVDSTGHDALHYALHTQDKALWRHLQQALSRRRRGGQRLVQHPDLASQASPSEPQAGSPPKSSWRAEPEEEQEEKEDEDPCSEEWRWKYEEERRKVVRLEQELVQKTEECKTQAAAYLDLENQIREQAQELGVLLSWEPRASGKQGSSLRPGGDGMEQGCPKDLLAESTQELKKQQQAAATVNPVLAPKKAEDSAPGKIQYEVHGRSQPEEQGPPQSPASETIRKATGQQLTTNGAQTFGPDHADQLPAGQKESSQVLGVEPGGTVAEPVGPAAMNQLLLQLREELAAVWREKDAARGALSRPVMEGALGTPRAEAAAAAWEKMEARLERVLARLEWAKAGLQVKPEVPSQESREGALKAAPGSIKQDEEKEKRVPGARGEPLGALGGEKALGGLAKGQLEKEMSVLRLSNSNLLEELGELGRERQRLQRELQSLSQRLQREFVPKPEAQVQLQQLRQSVGLLTNELAMEKEATEKLRKLLASQSSGLRGLWDCLPADLVGERSAQSKAAESLEELRACISTLVDRHREAQQVLARLQEENQQLRGSLSPCREPGTSLKAPASPQVAALEQDLGKLEEELRAVQATMSGKSQEIGKLKQLLYQATEEVAELRAREAASLRQHEKTRGSLVAQAQAWGQELKALLEKYNTACREVGRLREAVAEERRRSGDLAAQAAEQERQASEMRGRSEQFEKTAELLKEKMEHLIGACRDKEAKIKELLKKLEQLSEEVLAIRGENARLALQLQDSQKNHEEIISTYRNHLLNAARGYMEHEVYNILLQILSMEEE

SEQ ID NO: 10687 - protein, 137 aa, Homo sapiens
MKRIFSCSSTQVAVERWNRHDQKLLEAVHRGDVGRVAALASRKSARPTKLDSNGQSPFHLAASKGLTECLTILLANGADINSKNEDGSTALHLATISCQPQCVKVLLQPPLAVPQVCSCCVTTKPSWTCWIMMDVHP

SEQ ID NO: 10688 - protein, 317 aa, Homo sapiens [sequence omitted]

SEQ ID NO: 10689 - protein, 955 aa, Homo sapiens
MEDSSTDTEKEEEEEKDEKDQEPIYAIVPTINIQDERFVDLSETPAFIFLHELHAMGKLPGTRMAALKAKYTLLHDAVMSTQESEVQLLQNAKRFTEQIQQQQFHLQQADNFPEAFSTEVSKMREQLLKYQNEYNAVKEREFHNQYRLNSLKEEKIIIVKEFEKITKPGEMEKKMKILRESTEELRKEIMQKKLEIKNLREDLASKQKQLLKEQKELEELLGHQVVLKDEVAHHQTIPVQIGKEIEKITRKKVEMEKKKIVLEQEVKTLNDSLKKVENKVSAIVDEKENVIKEVEGKRALLEIKEREHNQLVKLLELARENEATSLTERGILDLNLRNSLIDKQNYHDELSRKQREKERDFRNLRKMELLLKVSWDALRQTQALHQRLLLEMEAIPKDDSTLSERRRELHKEVEVAKRNLAQQKIISEMESKLVEQQLAEENKLLKEQENMKELVVNLLRMTQIKIDEKEQKSKDFLKAQQKYTNIVKEMKAKDLEIRIHKKKKCEIYRRLREFAKLYDTIRNERNKFVNLLHKAHQKVNEIKERHKMSLNELEILRNSAVSQERKLQNSMLKHANNVTIRESMQNDVRKIVSKLQEMKEKKEAQLNNIDRLANTITMIEEEMVQLRKRYEKAVQHRNESGVQLIEREEEICIFYEKINIQEKMKLNGEIEIHLLEEKIQFLKMKIAEKQRQICVTQKLLPAKRSLDADLAVLQIQFSQCTDRIKDLEKQFVKPDGENRARFLPGKDLTEKEMIQKLDKLELQLAKKEEKLLEKDFIYEQVSRLTDRLCSKTQGCKQDTLLLAKKMNGYQRRIKNATEKMMALVAELSMKQALTIELQKEVREKEDFIFTCNSRIEKGLPLNKEIEKEWLKVLRDEEMHALAIAEKSQEFLEADNRQLPNGVYTTAEQRPNAYIPEADATLPLPKPYGALAPFKPSEPGANMRHIRKPVIKPVEI

SEQ ID NO: 10690 - protein, 669 aa, Homo sapiens
MEKKKIVLEQEVKTLNDSLKKVENKVSAIVDEKENVIKEVEGKRALLEIKEREHNQLVKLLELARENEATSLTERGILDLNLRNSLIDKQNYHDELSRKQREKERDFRNLRKMELLLKVSWDALRQTQALHQRLLLEKIISEMESKLVEQQLAEENKLLKEQENMKELVVNLLRMTQIKIDEKEQKSKDFLKAQQKYTNIVKEMKAKDLEIRIHKKKKCEIYRRLREFAKLYDTIRNERNKFVNLLHKAHQKVNEIKERHKMSLNELEILRNSAVSQERKLQNSMLKHANNVTIRESMQNDVRKIVSKLQEMKEKKEAQLNNIDRLANTITMIEEEMVQLRKRYEKAVQHRNESGVQLIEREEEICIFYEKINIQEKMKLNGEIEIHLLEEKIQFLKMKIAEKQRQICVTQKLLPAKRSLDADLAVLQIQFSQCTDRIKDLEKQFVKPDGENRARFLPGKDLTEKEMIQKLDKLELQLAKKEEKLLEKDFIYEQVSRLTDRLCSKTQGCKQDTLLLAKKMNGYQRRIKNATEKMMALVAELSMKQALTIELQKEVREKEDFIFTCNSRIEKGLPLNKEIEKEWLKVLRDEEMHALAIAEKSQEFLEADNRQLPNGVYTTAEQRPNAYIPEADATLPLPKPYGALAPFKPSEPGANMRHIRKPVIKPVEI

SEQ ID NO: 10691 - protein, 594 aa, Homo sapiens
MAAESGELIGACEFMKDRLYFATLRNRPKSTVNTHYFSIDEELVYENFYADFGPLNLAMVYRYCCKLNKKLKSYSLSRKKIVHYTCFDQRKRANAAFLIGAYAVIYLKKTPEEAYRALLSGSNPPYLPFRDASFGNCTYNLTILDCLQGIRKGLQHGFFDFETFDVDEYEHYERVENGDFNWIVPGKFLAFSGPHPKSKIENGYPLHAPEAYFPYFKKHNVTAVVRLNKKIYEAKRFTDAGFEHYDLFFIDGSTPSDNIVRRFLNICENTEGAIAVHCKAGLGRTGTLIACYVMKHYRFTHAEIIAWIRICRPGSIIGPQQHFLEEKQASLWVQGDIFRSKLKNRPSSEGSINKILSGLDDMSIGGNLSKTQNMERFGEDNLEDDDVEMKNGITQGDKLRALKSQRQPRTSPSCAFRSDDTKGHPRAVSQPFRLSSSLQGSAVTLKTSKMALSPSATAKRINRTSLSSGATVRSFSINSRLASSLGNLNAATDDPENKKTSSSSKAGFTASPFTNLLNGSSQPTTRNYPELNNNQYNRSSNSNGGNLNSPPGPHSAKTEEHTTILRPSYTGLSSSSARFLSRSIPSLQSEYVHY

SEQ ID NO: 10692 - protein, 623 aa, Homo sapiens
MAAESGELIGACEFMKDRLYFATLRNRPKSTVNTHYFSIDEELVYENFYADFGPLNLAMVYRYCCKLNKKLKSYSLSRKKIVHYTCFDQRKRANAAFLIGAYAVIYLKKTPEEAYRALLSGSNPPYLPFRDASFGNCTYNLTILDCLQGIRKGLQHGFFDFETFDVDEYEHYERVENGDFNWIVPGKFLAFSGPHPKSKIENGYPLHAPEAYFPYFKKHNVTAVVRLNKKIYEAKRFTDAGFEHYDLFFIDGSTPSDNIVRRFLNICENTEGAIAVHCKAGLGRTGTLIACYVMKHYRFTHAEIIAWIRICRPGSIIGPQQHFLEEKQASLWVQGDIFRSKLKNRPSSEGSINKILSGLDDMSIGGNLSKTQNMERFGEDNLEDDDVEMKNGITQGDKLRALKSQRQPRTSPSCAFRSDDTKGHPRAVSQPFRLSSSLQGSAVTLKTSKMALSPSATAKRINRTSLSSGATVRSFSINSRLASSLGNLNAATDDPENKKTSSSSKAGFTASPFTNLLNGSSQPTTRNYPELNNNQYNRSSNSNGGNLNSPPGPHSAKTEEHTTILRPSYTGLSSSSARFLSRSIPVSAQTPPPGPQNPECNFCALPSQPRLPPKKFNSAKEAF

SEQ ID NO: 10693 - protein, 383 aa, Homo sapiens
MAAESGELIGACEFMKDRLYFATLRNRPKSTVNTHYFSIDEELVYENFYADFGPLNLAMVYRYCCKLNKKLKSYSLSRKKIVHYTCFDQRKRANAAFLIGAYAVIYLKKTPEEAYRALLSGSNPPYLPFRDASFGNCTYNLTILDCLQGIRKGLQHGFFDFETFDVDEYEHYERVENGDFNWIVPGKFLAFSGPHPKSKIENGYPLHAPEAYFPYFKKHNVTAVVRLNKKIYEAKRFTDAGFEHYDLFFIDGSTPSDNIVRRFLNICENTEGAIAVHCKAGLGRTGTLIACYVMKHYRFTHAEIIAWIRICRPGSIIGPQQHFLEEKQASLWVQGDIFRSKLKNRPSSEGSINKILSGLDDMSIGGNLSKTQNMERFGEVSFP

SEQ ID NO: 10694 - protein, 191 aa, Homo sapiens
MAAESGELIGACEFMKDRLYFATLRNRPKSTVNTHYFSIDEELVYENFYADFGPLNLAMVYRYCCKLNKKLKSYSLSRKKIVHYTCFDQRKRANAAFLIGAYAVIYLKKTPEEAYRALLSGSNPPYLPFRDASFGNCTYNLTILDCLQGIRKGLQHGFFDFETFDVDEYEHYEVILFTPLKPTFLISKSIM

SEQ ID NO: 10695 - protein, 610 aa, Homo sapiens
MAAESGELIGACEFMKDRLYFATLRNRPKSTVNTHYFSIDEELVYENFYADFGPLNLAMVYRYCCKLNKKLKSYSLSRKKIVHYTCFDQRKRANAAFLIGAYAVIYLKKTPEEAYRALLSGSNPPYLPFRDASFGNCTYNLTILDCLQGIRKGLQHGFFDFETFDVDEYEHYERVENGDFNWIVPGKFLAFSGPHPKSKIENGYPLHAPEAYFPYFKKHNVTAVVRLNKKIYEAKRFTDAGFEHYDLFFIDGSTPSDNIVRRFLNICENTEGAIAVHCKAGLGRTGTLIACYVMKHYRFTHAEIIAWIRICRPGSIIGPQQHFLEEKQASLWVQGDIFRSKLKNRPSSEGSINKILSGLDDMSIGGNLSKTQNMERFGEDNLEDDDVEMKNGITQGDKLRALKSQRQPRTSPSCAFRSDDTKGHPRAVSQPFRLSSSLQGSAVTLKTSKMALSPSATAKRINRTSLSSGATVRSFSINSRLASSLGNLNAATDDPENKKTSSSSKAGFTASPFTNLLNGSSQPTTRNYPELNNNQYNRSSNSNGGNLNSPPGPHSAKTEEHTTILRPSYTGLSSSSARFLSRSIPCSCLLLVFRKPFLGSPLLSLPISHL

SEQ ID NO: 10696 - protein, 180 aa, Homo sapiens
MGLTISSLFSRLFGKKQMRILMVGLDAAGKTTILYKLKLGEIVTTIPTIGFNVETVEYKNICFTVWDVGGQDRIRPLWKHYFQNTQGLIFVVDSNDRERIQEVADELQKMLLVDELRDAVLLLFANKQDLPNAMAISEMTDKLGLQSLRNRTWYVQATCATQGTGLYEGLDWLSNELSKR

SEQ ID NO: 10697 - protein, 950 aa, Homo sapiens
MTWRMGPRFTMLLAMWLVCGSEPHPHATIRGSHGGRKVPLVSPDSSRPARFLRHTGRSRGIERSTLEEPNLQPLQRRRSVPVLRLARPTEPPARSDINGAAVRPEQRPAARGSPREMIRDEGSSARSRMLRFPSGSSSPNILASFAGKNRVWVISAPHASEGYYRLMMSLLKDDVYCELAERHIQQIVLFHQAGEEGGKVRRITSEGQILEQPLDPSLIPKLMSFLKLEKGKFGMVLLKKTLQVEERYPYPVRLEAMYEVIDQGPIRRIEKIRQKGFVQKCKASGVEGQVVAEGNDGGGGAGRPSLGSEKKKEDPRRAQVPPTRESRVKVLRKLAATAPALPQPPSTPRATTLPPAPATTVTRSTSRAVTVAARPMTTTAFPTTQRPWTPSPSHRPPTTTEVITARRPSVSENLYPPSRKDQHRERPQTTRRPSKATSLESFTNAPPTTISEPSTRAAGPGRFRDNRMDRREHGHRDPNVVPGPPKPAKEKPPKKKAQDKILSNEYEEKYDLSRPTASQLEDELQVGNVPLKKAKESKKHEKLEKPEKEKKKKMKNENADKLLKSEKQMKKSEKKSKQEKEKSKKKKGGKTEQDGYQKPTNKHFTQSPKKSVADLLGSFEGKRRLLLITAPKAENNMYVQQRDEYLESFCKMATRKISVITIFGPVNNSTMKIDHFQLDNEKPMRVVDDEDLVDQRLISELRKEYGMTYNDFFMVLTDVDLRVKQYYEVPITMKSVFDLIDTFQSRIKDMEKQKKEGIVCKEDKKQSLENFLSRFRWRRRLLVISAPNDEDWAYSQQLSALSGQACNFGLRHITILKLLGVGEEVGGVLELFPINGSSVVEREDVPAHLVKDIRNYFQVSPEYFSMLLVGKDGNVKSWYPSPMWSMVIVYDLIDSMQLRRQEMAIQQSLGMRCPEDEYAGYGYHSYHQGYQDGYQDDYRHHESYHHGYPY

SEQ ID NO: 10698 - protein, 961 aa, Homo sapiens
MTSVHRKVDYTMTWRMGPRFTMLLAMWLVCGSEPHPHATIRGSHGGRKVPLVSPDSSRPARFLRHTGRSRGIERSTLEEPNLQPLQRRRSVPVLRLARPTEPPARSDINGAAVRPEQRPAARGSPREMIRDEGSSARSRMLRFPSGSSSPNILASFAGKNRVWVISAPHASEGYYRLMMSLLKDDVYCELAERHIQQIVLFHQAGEEGGKVRRITSEGQILEQPLDPSLIPKLMSFLKLEKGKFGMVLLKKTLQVEERYPYPVRLEAMYEVIDQGPIRRIEKIRQKGFVQKCKASGVEGQVVAEGNDGGGGAGRPSLGSEKKKEDPRRAQVPPTRESRVKVLRKLAATAPALPQPPSTPRATTLPPAPATTVTRSTSRAVTVAARPMTTTAFPTTQRPWTPSPSHRPPTTTEVITARRPSVSENLYPPSRKDQHRERPQTTRRPSKATSLESFTNAPPTTISEPSTRAAGPGRFRDNRMDRREHGHRDPNVVPGPPKPAKEKPPKKKAQDKILSNEYEEKYDLSRPTASQLEDELQVGNVPLKKAKESKKHEKLEKPEKEKKKKMKNENADKLLKSEKQMKKSEKKSKQEKEKSKKKKGGKTEQDGYQKPTNKHFTQSPKKSVADLLGSFEGKRRLLLITAPKAENNMYVQQRDEYLESFCKMATRKISVITIFGPVNNSTMKIDHFQLDNEKPMRVVDDEDLVDQRLISELRKEYGMTYNDFFMVLTDVDLRVKQYYEVPITMKSVFDLIDTFQSRIKDMEKQKKEGIVCKEDKKQSLENFLSRFRWRRRLLVISAPNDEDWAYSQQLSALSGQACNFGLRHITILKLLGVGEEVGGVLELFPINGSSVVEREDVPAHLVKDIRNYFQVSPEYFSMLLVGKDGNVKSWYPSPMWSMVIVYDLIDSMQLRRQEMAIQQSLGMRCPEDEYAGYGYHSYHQGYQDGYQDDYRHHESYHHGYPY

SEQ ID NO: 10699 - protein, 85 aa, Homo sapiens
MLLVGKDGNVKSWYPSPMWSMVIVYDLIDSMQLRRQEMAIQQSLGMRCPEDEYAGYGYHSYHQGYQDGYQDDYRHHESYHHGYPY

SEQ ID NO: 10700 - protein, 498 aa, Homo sapiens
MKRKSERRSSWAAAPPCSRRCSSTSPGVKKIRSSTQQDPRRRDPQDDVYLDITDRLCFAILYSRPKSASNVHYFSIDNELEYENFYADFGPLNLAMVYRYCCKINKKLKSITMLRKKIVHFTGSDQRKQANAAFLVGCYMVIYLGRTPEEAYRILIFGETSYIPFRDAAYGSCNFYITLLDCFHAVKKAMQYGFLNFNSFNLDEYEHYEKAENGDLNWIIPDRFIAFCGPHSRARLESGYHQHSPETYIQYFKNHNVTTIIRLNKRMYDAKRFTDAGFDHHDLFFADGSTPTDAIVKEFLDICENAEGAIAVHCKAGLGRTGTLIACYIMKHYRMTAAETIAWVRICRPGSVIGPQQQFLVMKQTNLWLEGDYFRQKLKGQENGQHRAAFSKLLSGVDDISINGVENQDQQEPEPYSDDDEINGVTQGDRLRALKSRRQSKTNAIPLTVILQSSVQSCKTSEPNISGSAGITKRTTRSASRKSSVKSLSISRTKTVLR

SEQ ID NO: 10701 - protein, 459 aa, Homo sapiens
MKRKSERRSSWAAAPPCSRRCSSTSPGVKKIRSSTQQDPRRRDPQDDVYLDITDRLCFAILYSRPKSASNVHYFSIDNELEYENFYADFGPLNLAMVYRYCCKINKKLKSITMLRKKIVHFTGSDQRKQANAAFLVGCYMVIYLGRTPEEAYRILIFGETSYIPFRDAAYGSCNFYITLLDCFHAVKKAMQYGFLNFNSFNLDEYEHYEKAENGDLNWIIPDRFIAFCGPHSRARLESGYHQHSPETYIQYFKNHNVTTIIRLNKRMYDAKRFTDAGFDHHDLFFADGSTPTDAIVKEFLDICENAEGAIAVHCKAGLGRTGTLIACYIMKHYRMTAAETIAWVRICRPGSVIGPQQQFLVMKQTNLWLEGDYFRQKLKGQENGQHRAAFSKLLSGVDDISINGVENQDQQEPEPYSDDDEINGVTQGDRLRALKSRRQSKTNAIPLTLSISRTKTVLR

SEQ ID NO: 10702 - protein, 471 aa, Homo sapiens
MKRKSERRSSWAAAPPCSRRCSSTSPGVKKIRSSTQQDPRRRDPQDDVYLDITDRLCFAILYSRPKSASNVHYFSIDNELEYENFYADFGPLNLAMVYRYCCKINKKLKSITMLRKKIVHFTGSDQRKQANAAFLVGCYMVIYLGRTPEEAYRILIFGETSYIPFRDAAYGSCNFYITLLDCFHAVKKAMQYGFLNFNSFNLDEYEHYEKAENGDLNWIIPDRFIAFCGPHSRARLESGYHQHSPETYIQYFKNHNVTTIIRLNKRMYDAKRFTDAGFDHHDLFFADGSTPTDAIVKEFLDICENAEGAIAVHCKAGLGRTGTLIACYIMKHYRMTAAETIAWVRICRPGSVIGPQQQFLVMKQTNLWLEGDYFRQKLKGQENGQHRAAFSKLLSGVDDISINGVENQDQQEPEPYSDDDEINGVTQGDRLRALKSRRQSKTNAIPLTDGWLSQAVTFLDRLLIWLGIHKD

SEQ ID NO: 10703 - protein, 485 aa, Homo sapiens
MKRKSERRSSWAAAPPCSRRCSSTSPGVKKIRSSTQQDPRRRDPQDDVYLDITDRLCFAILYSRPKSASNVHYFSIDNELEYENFYADFGPLNLAMVYRYCCKINKKLKSITMLRKKIVHFTGSDQRKQANAAFLVGCYMVIYLGRTPEEAYRILIFGETSYIPFRDAAYGSCNFYITLLDCFHAVKKAMQYGFLNFNSFNLDEYEHYEKAENGDLNWIIPDRFIAFCGPHSRARLESGYHQHSPETYIQYFKNHNVTTIIRLNKRMYDAKRFTDAGFDHHDLFFADGSTPTDAIVKEFLDICENAEGAIAVHCKAGLGRTGTLIACYIMKHYRMTAAETIAWVRICRPGSVIGPQQQFLVMKQTNLWLEGDYFRQKLKGQENGQHRAAFSKLLSGVDDISINGVENQDQQEPEPYSDDDEINGVTQGDRLRALKSRRQSKTNAIPLTCPLAVLTSALCSVVIWWIVCDYILPILLFCLDGFRTQ

SEQ ID NO: 10704 - protein, 461 aa, Homo sapiens
MSREGAGAALVAEVIKDRLCFAILYSRPKSASNVHYFSIDNELEYENFYADFGPLNLAMVYRYCCKINKKLKSITMLRKKIVHFTGSDQRKQANAAFLVGCYMVIYLGRTPEEAYRILIFGETSYIPFRDAAYGSCNFYITLLDCFHAVKKAMQYGFLNFNSFNLDEYEHYEKAENGDLNWIIPDRFIAFCGPHSRARLESGYHQHSPETYIQYFKNHNVTTIIRLNKRMYDAKRFTDAGFDHHDLFFADGSTPTDAIVKEFLDICENAEGAIAVHCKAGLGRTGTLIACYIMKHYRMTAAETIAWVRICRPGSVIGPQQQFLVMKQTNLWLEGDYFRQKLKGQENGQHRAAFSKLLSGVDDISINGVENQDQQEPEPYSDDDEINGVTQGDRLRALKSRRQSKTNAIPLTVILQSSVQSCKTSEPNISGSAGITKRTTRSASRKSSVKSLSISRTKTVLR

SEQ ID NO: 10705 - protein, 447 aa, Homo sapiens
MRSSTLQDPRRRDPQDDVYVDITDRLRFAILYSRPKSASNVHYFSIDNELEYENFSEDFGPLNLAMVYRYCCKINKKLKSITMLRKKIVHFTGSDQRKQANAAFLVGCYMVIYLGRTPEAAYRILIFGDTPYIPFRDAAYGSCNFYITLLDCFHAVKKAMQYGFLNFNSFNLDEYEHYEKAENGDLNWIIPDRFIAFCGPHSRARLESGYHQHSPETYIQYFKNHNVTTIIRLNKRMYDAKRFTDAGFDHHDLFFADGSTPTDAIVKRFLDICENAEGAIAVHCKAGLGRTGTLIACYIMKHYRMTAAETIAWVRICRPGLVIGPQQQFLVMKQTSLWLEGDYFRQRLKGQENGQHRAAFSKLLSGVDDISINGVENQDQQEPKPYSDDDEINGVTQGDRSRALKRRRQSKTNDILLPSPLAVLTFTLCSVVIWWIVCDYILPILLF

SEQ ID NO: 10706 - protein, 287 aa, Homo sapiens
MALGLLIAVPLLLQAAPRGAAHYEMMGTCRMICDPYTAAPGGEPPGAKAQPPGPSTAALEVMQDLSANPPPPFIQGPKGDPGRPGKPGPRGPPGEPGPPGPRGPPGEKGDSGRPGLPGLQLTAGTASGVGVVGGGAGVGGDSEGEVTSALSATFSGPKIAFYVGLKSPHEGYEVLKFDDVVTNLGNHYDPTTGKFSCQVRGIYFFTYHILMRGGDGTSMWADLCKNGQVRASAIAQDADQNYDYASNSVVLHLDSGDEVYVKLDGGKAHGGNNNKYSTFSGFLLYPD

SEQ ID NO: 10707 - protein, 210 aa, Homo sapiens
MPPKNKEKGKKSGAQKKKKNWGADVVAESRHRLVVLEKELLRDHLALRRDEARRAKASEDQLRQRLQGVEAELEGARSEGKAIYAEMSRQCHALQEDMQTRSKQLEEEVKGLRGQLEACQREAAAAREEAEQALGERDQALAQLRAHMADMEAKYEEILHDSLDRLLAKLRAIKQQWDGAALRLHARHKEQQRQFGLTPPGSLRPPAPSL

SEQ ID NO: 10708 - protein, 124 aa, Homo sapiens
MSRQCHALQEDMQTRSKQLEEEVKGLRGQLEACQREAAAAREEAEQALGERDQALAQLRAHMADMEAKYEEILHDSLDRLLAKLRAIKQQWDGAALRLHARHKEQQRQFGLTPPGSLRPPAPSL

SEQ ID NO: 10709 - protein, 413 aa, Homo sapiens
MENSGKANKKDTHDGPPKEIKLPTSEALLDYQCQIKEDAVEQFMFQIKTLRKKNQKYHERNSRLKEEQIWHIRHLLKELSEEKAEGLPVVTREDVEEAMKEKWKFERDQEKNLRDMRMQISNAEKLFLEKLSEKEYWEEYKNVGSERHAKLITSLQNDINTVKENAEKMSEHYKITLEDTRKKIIKETLLQLDQKKEWATQNAVKLIDKGSYLEIWENDWLKKEVAIHRKEVEELKNAIHELEAENLVLIDQLSNCRLVDLKIPRRLYLTQAAGLEVPPEEMSLELPETHIEEKSELQPTEVESRDLMSSSDESTILHLSHENSIEDLQYVKIDKEENSGTEFGDTDMKYLLYEDEKDFKDYVNLGPLGVKLMSVESKKMPIHFQEKEIPVKLYKDVRSPESHITYKMMKSFL

SEQ ID NO: 10710 - protein, 444 aa, Homo sapiens
MENSGKANKKDTHDGPPKEIKLPTSEALLDYQCQIKEDAVEQFMFQIKTLRKKNQKYHERNSRLKEEQIWHIRHLLKELSEEKAEGLPVVTREDVEEAMKEKWKFERDQEKNLRDMRMQISNAEKLFLEKLSEKEYWEEYKNVGSERHAKLITSLQNDINTVKENAEKMSEHYKITLEDTRKKIIKETLLQLDQKKEWATQNAVKLIDKGSYLEIWENDWLKKEVAIHRKEVEELKNAIHELEAENLVLIDQLSNCRLVDLKIPRYPVLHSCPTSNPRHLLLLPLESCLISARRCWRLYLTQAAGLEVPPEEMSLELPETHIEEKSELQPTEVESRDLMSSSDESTILHLSHENSIEDLQYVKIDKEENSGTEFGDTDMKYLLYEDEKDFKDYVNLGPLGVKLMSVESKKMPIHFQEKEIPVKLYKDVRSPESHITYKMMKSFL

SEQ ID NO: 10711 - protein, 313 aa, Homo sapiens
MFQIKTLRKKNQKYHERNSRLKEEQIWHIRHLLKELSEEKAEGLPVVTREDVEEAMKEKWKFERDQEKNLREHYKITLEDTRKKIIKETLLQLDQKKEWATQNAVKLIDKGSYLEIWENDWLKKEVAIHRKEVEELKNAIHELEAENLVLIDQLSNCRLVDLKIPRRLYLTQAAGLEVPPEEMSLELPETHIEKSELQPTEVESRDLMSSSDESTILHLSHENSIEDLQYVKIDKEENSGTEFGDTDMKYLLYEDEKDFKDYVNLGPLGVKLMSVESKKMPIHFQEKEIPVKLYKDVRSPESHITYKMMKSFL

SEQ ID NO: 10712 - protein, 667 aa, Homo sapiens
MSELADSGPSGASAPSQLRAVTLEDLGLLLAGGLASPEPLSLEELSERYESSHPTSTASVPEQDTAKHWNQLEQWVVELQAEVACLREHKQRCERATRSLLRELLQVRARVQLQGSELRQLQQEARPAAQAPEKEAPEFSGLQNQMQALDKRLVEVREALTRLRRRQVQQEAERRGAEQEAGLRLAKLTDLLQQEEQGREVACGALQKNQEDSSRRVDLEVARMQAQVTKLGEEVSLRFLKREAKLCGFLQKSFLALEKRMKASESSRLKLEGSLRGELESRWEKLRGLMEERLRALQGQHEESHLLEQCQGLDAAVAQLTKFVQQNQASLNRVLLAEEKAWDAKGRLEESRAGELAAYVQENLEAAQLAGELARQEMHGELVLLREKSRALEASVAQLAGQLKELSGHLPALSSRLDLQEQMLGLRLSEAKTEWEGAERKSLEDLARWRKEVTEHLRGVREKVDGLPQQIESVSDKCLLHKSDSDLRISAEGKAREFKVGALRQELATLLSSVQLLKEDNPGRKIAEMQGKLATFQNQIMKLENCVQANKTIQNLRFNTEARLRTQEMATLWESVLRLWSEEGPRTPLGSWKALPSLVRPRVFIKDMAPGKVVPMNCWGVYQAVRWLRWKASLIKLRALRRPGGVLEKPHSQEQVQQLTPSLFIQK

SEQ ID NO: 10713 - protein, 255 aa, Homo sapiens
MVLLLVILIPVLVSSAGTSAHYEMLGTCRMVCDPYGGTKAPSTAATPDRGLMQSLPTFIQGPKGEAGRPGKAGPRGPPGEPGPPGPMGPPGEKGEPGRQGLPGPPGAPGLNAAGAISAATYSTVPKIAFYAGLKRQHEGYEVLKFDDVVTNLGNHYDPTTGKFTCSIPGIYFFTYHVLMRGGDGTSMWADLCKNNQVRASAIAQDADQNYDYASNSVVLHLEPGDEVYIKLDGGKAHGGNNNKYSTFSGFIIYAD

SEQ ID NO: 10714 - protein, 231 aa, Homo sapiens
MVLLLVILIPVLVSSAGTSAHYEMLGTCRMVCDPYGGTKAPSTAATPDRGLMQSLPTFIQGPMGPPGEKGEPGRQGLPGPPGAPGLNAAGAISAATYSTVPKIAFYAGLKRQHEGYEVLKFDDVVTNLGNHYDPTTGKFTCSIPGIYFFTYHVLMRGGDGTSMWADLCKNNQVRASAIAQDADQNYDYASNSVVLHLEPGDEVYIKLDGGKAHGGNNNKYSTFSGFIIYAD

SEQ ID NO: 10715 - protein, 213 aa, Homo sapiens
MVLLLVILIPVLVSSAGTSAHYEMLGTCRMVCDPYGGTKAPSTAATPDRGLMQSLPTFIQGPPGAPGLNAAGAISAATYSTVPKIAFYAGLKRQHEGYEVLKFDDVVTNLGNHYDPTTGKFTCSIPGIYFFTYHVLMRGGDGTSMWADLCKNNQVRASAIAQDADQNYDYASNSVVLHLEPGDEVYIKLDGGKAHGGNNNKYSTFSGFIIYAD

SEQ ID NO: 10716 - protein, 175 aa, Homo sapiens
MGKVLSKIFGNKEMRILMLGLDAAGKTTILYKLKLGQSVTTIPTVGFNVETVTYKNVKFNVWDVGGQDKIRPLWRHYYTGTQGLIFVVDCADRDRIDEARQELHRIINDREMRDAIILIFANKQDLPDAMKPHEIQEKLGLTRIRDRNWYVQPSCATSGDGLYEGLTWLTSNYKS

SEQ ID NO: 10717 - protein, 360 aa, Homo sapiens
MDTPLRRSRRLGGLRPESPESLTSVSRTRRALVEFESNPEETREPGSPPSVQRAGLGSPERPPKTSPGSPRLQQGAGLESPQGQPEPGAASPQRQQDLHLESPQRQPEYSPESPRCQPKPSEEAPKCSQDQGVLASELAQNKEELTPGAPQHQLPPVPGSPEPYPGQQAPGPEPSQPLLELTPRAPGSPRGQHEPSKPPPAGETVTGGFGAKKRKGSSSQAPASKKLNKEELPVIPKGKPKSGRVWKDRSKKRFSQMLQDKPLRTSWQRKMKERQERKLAKDFARHLEEEKERRRQEKKQRRAENLKRRLENERKAEVVQVIRNPAKLKRAKKKQLRSIEKRDTLALLQKQPPQQPAAKI

SEQ ID NO: 10718 - protein, 104 aa, Homo sapiens
MLQDKPLRTSWQRKMKERQERKLAKDFARHLEEEKERRRQEKKQRRAENLKRRLENERKAEVVQVIRNPAKLKRAKKKQLRSIEKRDTLALLQKQPPQQPAAKI

SEQ ID NO: 10719 - protein, 369 aa, Homo sapiens
MEESMEEEEGGSYEAMMDDQNHNNWEAAVDGFRQPLPPPPPPSSIPAPAREPPGGQLLAVPAVSVDRKGPKEGLPMGPQPPPEANGVIMMLKSCDAAAAVAKAAPAPTASSTININTSTSKFLMNVITIEDYKSTYWPKLDGAIDQLLTQSPGDYIPISYEQIYSCVYKCVCQQHSEQMYSDLIKKITNHLERVSKELQASPPDLYIERFNIALGQYMGALQSIVPLFIYMNKFYIETKLNRDLKDDLIKLFTEHVAEKHIYSLMPLLLEAQSTPFQVTPSTMANIVKGLYTLRPEWVQMAPTLFSKFIPNILPPAVESELSEYAAQDQKFQRELIQNGFTRGDQSRKRAGDELAYNSSSACASSRGYR

SEQ ID NO: 10720 - protein, 303 aa, Homo sapiens
MEESMEEEEGGSYEAMMDDQNHNNWEAAVDGFRQPLPPPPPPSSIPAPAREPPGGQLLAVPAVSVDRKGPKEGLPMGPQPPPEANGVIMMLKSCDAAAAVAKAAPAPTASSTININTSTSKFLMNVITIEDYKSTYWPKLDGAIDQLLTQSPGDYIPISYEQIYSCVYKCVCQQHSEQMYSDLIKKITNHLERVSKELQASPPDLYIERFNIALGQYMGALQSIVPLFIYMNKFYIETKLNRDLKDDLIKLFTEHVAEKHIYSLMPLLLEAQSTPFQVTPSTMANIVKGLYTLRPVSQNFTAV

SEQ ID NO: 10721 - protein, 246 aa, Homo sapiens
MNVITIEDYKSTYWPKLDGAIDQLLTQSPGDYIPISYEQIYSCVYKCVCQQHSEQMYSDLIKKITNHLERVSKELQASPPDLYIERFNIALGQYMGALQSIVPLFIYMNKFYIETKLNRDLKDDLIKLFTEHVAEKHIYSLMPLLLEAQSTPFQVTPSTMANIVKGLYTLRPEWVQMAPTLFSKFIPNILPPAVESELSEYAAQDQKFQRELIQNGFTRGDQSRKRAGDELAYNSSSACASSRGYR

SEQ ID NO: 10722 - protein, 652 aa, Homo sapiens
MATSMGLLLLLLLLLTQPGAGTGADTEAVVCVGTACYTAHSGKLSAAEAQNHCNQNGGNLATVKSKEEAQHVQRVLAQLLRREAALTARMSKFWIGLQREKGKCLDPSLPLKGFSWVGGGEDTPYSNWHKELRNSCISKRCVSLLLDLSQPLLPSRLPKWSEGPCGSPGSPGSNIEGFVCKFSFKGMCRPLALGGPGQVTYTTPFQTTSSSLEAVPFASAANVACGEGDKDETQSHYFLCKEKAPDVFDWGSSGPLCVSPKYGCNFNNGGCHQDCFEGGDGSFLCGCRPGFRLLDDLVTCASRNPCSSSPCRGGATCVLGPHGKNYTCRCPQGYQLDSSQLDCVDVDECQDSPCAQECVNTPGGFRCECWVGYEPGGPGEGACQDVDECALGRSPCAQGCTNTDGSFHCSCEEGYVLAGEDGTQCQDVDECVGPGGPLCDSLCFNTQGSFHCGCLPGWVLAPNGVSCTMGPVSLGPPSGPPDEEDKGEKEGSTVPRAATASPTRGPEGTPKATPTTSRPSLSSDAPITSAPLKMLAPSGSPGVWREPSIHHATAASGPQEPAGGDSSVATQNNDGTDGQKLLLFYILGTVVAILLLLALALGLLVYRKRRAKREEKKEKKPQNAADSYSWVPERAESRAMENQYSPTPGTDC

SEQ ID NO: 10723 - protein, 325 aa, Homo sapiens
MDARRKHWKENMFTPFFSAQDVLEETSEPESSSEQTTADSSKGMEEIYNLSSRKFQEESKFKRKKYIFQLNEIEQEQNLRENKRNISKNETDTNSASYESSNVDVTTEESFNSTEDNSTCSTDNLPALLRQDIRKKFMERMSPKLCLNLLNEELEELNMKYRKIEEEFENAEKELLHYKKEIFTKPLNFQETETDASKSDYELQALRNDLSEKATNVKNLSEQLQQAKEVIHKLNLENRNLKEAVRKLKHQTEVGNVLLKEEMKSYYELEMAKIRGELSVIKNELRTEKTLQARNNRALELLRKYYASSMVTSSSILDHFTGDFF

SEQ ID NO: 10724 - protein, 849 aa, Homo sapiens
MMEPPKPEPELQRFYHRLLRPLSLFPTRTTSPEPQKRPPQEGRILQSFPLAKLTVASLCSQVAKLLAGSGIAAGVPPEARLRLIKVILDELKCSWREPPAELSLSHKNNQKLRKRLEAYVLLSSEQLFLRYLHLLVTMSTPRGVFTESATLTRLAASLARDCTLFLTSPNVYRGLLADFQALLRAEQASGDVDKLHPVCPAGTFKLCPIPWPHSTGFAQVQCSNLNLNYLIQLSRPPEFLNEPGRMDPVKELKSIPRLKRKKPFHWLPSIGKKREIDISSSQMVSLPSYPVAPTSRASPSPFCPELRRGQSMPSLREGWRLADELGLPPLPSRPLTPLVLATESKPELTGLIVAEDLKQLIKKMKLEGTRYPPLDSGLPPLLGVVTRHPAAGHRLEELEKMLRNLQEEEASGQWDPQPPKSFPLHPQPVTITLKLRNEVVVQAAAVRVSDRNFLDSFHIEGAGALYNHLAGELDPKAIEKMDIDNFVGSTTREVYKELMSHVSSDHLHFDQGPLVEPAADKDWSTFLSSAFLRQEKQPQIINPELVGLYSQRANTLQSNTKKMPSLPSLQATKSWEKWSNKASLMNSWKTTLSVDDYFKYLTNHETDFLHVIFQMHEEEVPVEIVAPARESLEIQHPPPLLEDEEPDFVPGEWDWNTVLEHRLGAGKTPHLGEPHKILSLQKHLEQLWSVLEVPDKDQVDMTIKYSSKARLRQLPSLVNAWERALKPIQLREALLARLEWFEGQASNPNRFFKKTNLSSSHFLEENQVRSHLHRKLNLMESSLVSLLEEIELIFGEPVIFKGRPYLDKMKSDKVEMLYWLQQQRRVRHLVSALKDPHQSTLFRSSAASL

SEQ ID NO: 10725 - protein, 1000 aa, Homo sapiens
MPGKLKVKIVAGRHLPVMDRASDLTDAFVEVKFGNTTFKTDVYLKSLNPQWNSEWFKFEVDDEDLQDEPLQITVLDHDTYSANDAIGKVYIDIDPLLYSEAATVISGWFPIYDTIHGIRGEINVVVKVDLFNDLNRFRQSSCGVKFFCTTSIPKCYRAVIIHGFVEELVVNEDPEYQWIDRIRTPRASNEARQRLISLMSGELQRKIGLKVLEMRGNAVVGYLQCFDLEGESGLVVRAIGTACTLDKLSSPAAFLPACNSPSKEMKEIPFNEDPNPNTHSSGPSTPLKNQTYSFSPSKSYSRQSSSSDTDLSLTPKTGMGSGSAGKEGGPFKALLRQQTQSALEQREFPFFTLTAFPPGFLVHVGGVVSARSVKLLDRIHNPDEPETRDAWWAEIRQEIKSHAKALGCHAVVGYSESTSICEEVCILSASGTAAVLNPRFLQDGTVEGCLEQRLEENLPTRCGFCHIPYDELNMPFPAHLTYCYNCRKQKVPDVLFTTIDLPTDATVIGKGCLIQARLCRLKKKAQAEANATAISNLLPFMEYEVHTQLMNKLKLKGMNALFGLRIQITVGENMLMGLASATGVYLAALPTPGGIQIAGKTPNDGSYEQHISHMQKKINDTIAKNKELYEINPPEISEEIIGSPIPEPRQRSRLLRSQSESSDEVTELDLSHGKKDAFVLEIDDTDAMEDVHSLLTDVPPPSGFYSCNTEIMPGINNWTSEIQMFTSVRVIRLSSLNLTNQALNKNFNDLCENLLKSLYFKLRSMIPCCLCHVNFTVSLPEDELIQVTVTAVAITFDKNQALQTTKTPVEKSLQRASTDNEELLQFPLELCSDSLPSHPFPPAKAMTVEKASPVGDGNFRNRSAPPCANSTVGVVKMTPLSFIPGAKITKYLGIINMFFIRETTSLREEGGVSGFLHAFIAEVFAMVRAHVAALGGNAVVSYIMKQCVFMENPNKNQAQCLINVSGDAVVFVRESDLEVVSSQQPTTNCQSSCTEGEVTT

SEQ ID NO: 10726 - protein, 1042 aa, Homo sapiens
MPGKLKVKIVAGRHLPVMDRASDLTDAFVEVKFGNTTFKTDVYLKSLNPQWNSEWFKFEVDDEDLQDEPLQITVLDHDTYSANDAIGKVYIDIDPLLYSEAATVISGWFPIYDTIHGIRGEINVVVKVDLFNDLNRFRQSSCGVKFFCTTSIPKCYRAVIIHGFVEELVVNEDPEYQWIDRIRTPRASNEARQRLISLMSGELQRKIGLKVLEMRGNAVVGYLQCFDLEGESGLVVRAIGTACTLDKLSSPAAFLPACNSPSKEMKESPLVHPPSHGCRSTHNSPIHTATGSRLTQNFSVSVPTLIYTGMGSGSAGKEGGPFKALLRQQTQSALEQREFPFFTLTAFPPGFLVHVGGVVSARSVKLLDRIHNPDEPETRDAWWAEIRQEIKSHAKALGCHAVVGYSESTSICEEVCILSASGTAAVLNPRFLQDGTVEGCLEQRLEENLPTRCGFCHIPYDELNMPFPAHLTYCYNCRKQKVPDVLFTTIDLPTDATVIGKGCLIQARLCRLKKKAQAEANATAISNLLPFMEYEVHTQLMNKLKLKGMNALFGLRIQITVGENMLMGLASATGVYLAALPTPGGIQIAGKTPNDGSYEQHISHMQKKINDTIAKNKELYEINPPEISEEIIGSPIPEPRQRSRLLRSQSESSDEVTELDLSHGKKDAFVLEIDDTDAMEDVHSLLTDVPPPSGFYSCNTEIMPGINNWTSEIQMFTSVRVIRLSSLNLTNQALNKNFNDLCENLLKSLYFKLRSMIPCCLCHVNFTVSLPEDELIQVTVTAVAITFDKNQALQTTKTPVEKSLQRASTDNEELLQFPLELCSDSLPSHPFPPAKEHLESASSNSGIPAAQRATSVDYSSFADRCSSWIELIKLKAQTIRRGSIKTTMTVEKASPVGDGNFRNRSAPPCANSTVGVVKMTPLSFIPGAKITKYLGIINMFFIRETTSLREEGGVSGFLHAFIAEVFAMVRAHVAALGGNAVVSYIMKQCVFMENPNKNQAQCLINVSGDAVVFVRESDLEVVSSQQPTTNCQSSCTEGEVTT

SEQ ID NO: 10727 - protein, 1051 aa, Homo sapiens
MPGKLKVKIVAGRHLPVMDRASDLTDAFVEVKFGNTTFKTDVYLKSLNPQWNSEWFKFEVDDEDLQDEPLQITVLDHDTYSANDAIGKVYIDIDPLLYSEAATVISGWFPIYDTIHGIRGEINVVVKVDLFNDLNRFRQSSCGVKFFCTTSIPKCYRAVIIHGFVEELVVNEDPEYQWIDRIRTPRASNEARQRLISLMSGELQRKIGLKVLEMRGNAVVGYLQCFDLEGESGLVVRAIGTACTLDKLSSPAAFLPACNSPSKEMKEIPFNEDPNPNTHSSGPSTPLKNQTYSFSPSKSYSRQSSSSDTDLSLTPKTGMGSGSAGKEGGPFKALLRQQTQSALEQREFPFFTLTAFPPGFLVHVGGVVSARSVKLLDRIHNPDEPETRDAWWAEIRQEIKSHAKALGCHAVVGYSESTSICEEVCILSASGTAAVLNPRFLQDGTVEGCLEQRLEENLPTRCGFCHIPYDELNMPFPAHLTYCYNCRKQKVPDVLFTTIDLPTDATVIGKGCLIQARLCRLKKKAQAEANATAISNLLPFMEYEVHTQLMNKLKLKGMNALFGLRIQITVGENMLMGLASATGVYLAALPTPGGIQIAGKTPNDGSYEQHISHMQKKINDTIAKNKELYEINPPEISEEIIGSPIPEPRQRSRLLRSQSESSDEVTELDLSHGKKDAFVLEIDDTDAMEDVHSLLTDVPPPSGFYSCNTEIMPGINNWTSEIQMFTSVRVIRLSSLNLTNQALNKNFNDLCENLLKSLYFKLRSMIPCCLCHVNFTVSLPEDELIQVTVTAVAITFDKNQALQTTKTPVEKSLQRASTDNEELLQFPLELCSDSLPSHPFPPAKEHLESASSNSGIPAAQRATSVDYSSFADRCSSWIELIKLKAQTIRRGSIKTTMTVEKASPVGDGNFRNRSAPPCANSTVGVVKMTPLSFIPGAKITKYLGIINMFFIRETTSLREEGGVSGFLHAFIAEVFAMVRAHVAALGGNAVVSYIMKQCVFMENPNKNQAQCLINVSGDAVVFVRESDLEVVSSQQPTTNCQSSCTEGEVTT

SEQ ID NO: 10728 - protein, 1053 aa, Homo sapiens
MPGKLKVKIVAGRHLPVMDRASDLTDAFVEVKFGNTTFKTDVYLKSLNPQWNSEWFKFEVDDEDLQDEPLQITVLDHDTYSANDAIGKVYIDIDPLLYSEAATVISGWFPIYDTIHGIRGEINVVVKVDLFNDLNRFRQSSCGVKFFCTTSIPKCYRAVIIHGFVEELVVNEDPEYQWIDRIRTPRASNEARQRLISLMSGELQRKIGLKVLEMRGNAVVGYLQCFDLEGESGLVVRAIGTACTLDKLSSPAAFLPACNSPSKEMKESPLVHPPSHGCRSTHNSPIHTATGSRLTQNFSVSVPTLIYTGMGSGSAGKEGGPFKALLRQQTQSALEQRGGSPHRFCRRREFPFFTLTAFPPGFLVHVGGVVSARSVKLLDRIHNPDEPETRDAWWAEIRQEIKSHAKALGCHAVVGYSESTSICEEVCILSASGTAAVLNPRFLQDGTVEGCLEQRLEENLPTRCGFCHIPYDELNMPFPAHLTYCYNCRKQKVPDVLFTTIDLPTDATVIGKGCLIQARLCRLKKKAQAEANATAISNLLPFMEYEVHTQLMNKLKLKGMNALFGLRIQITVGENMLMGLASATGVYLAALPTPGGIQIAGKTPNDGSYEQHISHMQKKINDTIAKNKELYEINPPEISEEIIGSPIPEPRQRSRLLRSQSESSDEVTELDLSHGKKDAFVLEIDDTDAMEDVHSLLTDVPPPSGFYSCNTEIMPGINNWTSEIQMFTSVRVIRLSSLNLTNQALNKNFNDLCENLLKSLYFKLRSMIPCCLCHVNFTVSLPEDELIQVTVTAVAITFDKNQALQTTKTPVEKSLQRASTDNEELLQFPLELCSDSLPSHPFPPAKEHLESASSNSGIPAAQRATSVDYSSFADRCSSWIELIKLKAQTIRRGSIKTTMTVEKASPVGDGNFRNRSAPPCANSTVGVVKMTPLSFIPGAKITKYLGIINMFFIRETTSLREEGGVSGFLHAFIAEVFAMVRAHVAALGGNAVVSYIMKQCVFMENPNKNQAQCLINVSGDAVVFVRESDLEVVSSQQPTTNCQSSCTEGEVTT

SEQ ID NO: 10729 - protein, 1054 aa, Homo sapiens
MPGKLKVKIVAGRHLPVMDRASDLTDAFVEVKFGNTTFKTDVYLKSLNPQWNSEWFKFEVDDEDLQDEPLQITVLDHDTYSANDAIGKVYIDIDPLLYSEAATVISGWFPIYDTIHGIRGEINVVVKVDLFNDLNRFRQSSCGVKFFCTTSIPKCYRAVIIHGFVEELVVNEDPEYQWIDRIRTPRASNEARQRLISLMSGELQRKIGLKVLEMRGNAVVGYLQCFDLEGESGLVVRAIGTACTLDKLSSPAAFLPACNSPSKEMKESPLVHPPSHGCRSTHNSPIHTATGSRLTQNFSVSVPTLIYTGMGSGSAGKEGGPFKALLRQQTQSALEQREFPFFTLTAFPPGFLVHVGGVVSARSVKLLDRIHNPAFVGIMGNTRSYKLLDWNSFNSDEPETRDAWWAEIRQEIKSHAKALGCHAVVGYSESTSICEEVCILSASGTAAVLNPRFLQDGTVEGCLEQRLEENLPTRCGFCHIPYDELNMPFPAHLTYCYNCRKQKVPDVLFTTIDLPTDATVIGKGCLIQARLCRLKKKAQAEANATAISNLLPFMEYEVHTQLMNKLKLKGMNALFGLRIQITVGENMLMGLASATGVYLAALPTPGGIQIAGKTPNDGSYEQHISHMQKKINDTIAKNKELYEINPPEISEEIIGSPIPEPRQRSRLLRSQSESSDEVTELDLSHGKKDAFVLEIDDTDAMEDVHSLLTDVPPPSGFYSCNTEIMPGINNWTSEIQMFTSVRVIRLSSLNLTNQALNKNFNDLCENLLKSLYFKLRSMIPCCLCHVNFTVSLPEDELIQVTVTAVAITFDKNQALQTTKTPVEKSLQRASTDNEELLQFPLELCSDSLPSHPFPPAKEHLESASSNSGIPAAQRDRCSSWIELIKLKAQTIRRGSIKTTMTVEKASPVGDGNFRNRSAPPCANSTVGVVKMTPLSFIPGAKITKYLGIINMFFIRETTSLREEGGVSGFLHAFIAEVFAMVRAHVAALGGNAVVSYIMKQCVFMENPNKNQAQCLINVSGDAVVFVRESDLEVVSSQQPTTNCQSSCTEGEVTT

SEQ ID NO: 10730 - protein, 524 aa, Homo sapiens
MPTVEELYRNYGILADATEQVGQHKDAYQVILDGVKGGTKEKRLAAQFIPKFFKHFPELADSAINAQLDLCEDEDVSIRRQAIKELPQFATGENLPRVADILTQLLQTDDSAEFNLVNNALLSIFKMDAKGTLGGLFSQILQGEDIVRERAIKFLSTKLKTLPDEVLTKEVEELILTESKKVLEDVTGEEFVLFMKILSGLKSLQTVSGRQQLVELVAEQADLEQTFNPSDPDCVDRLLQCTRQAVPLFSKNVHSTRFVTYFCEQVLPNLGTLTTPVEGLDIQLEVLKLLAEMSSFCGDMEKLETNLRKLFDKLLEYMPLPPEEAENGENAGNEEPKLQFSYVECLLYSFHQLGRKLPDFLTAKLNAEKLKDFKIRLQYFARGLQVYIRQLRLALQGKTGEALKTEENKIKVVALKITNNINVLIKDLFHIPPSYKSTVTLSWKPVQKVEIGQKRASEDTTSGSPPKKSSAGPKRDARQIYNPPSGKYSSNLGNFNYEQRGAFRGSRGGRGWGTRGNRSRGRLY

SEQ ID NO: 10731 - protein, 438 aa, Homo sapiens
DEDVSIRRQAIKELPQFATGENLPRVADILTQLLQTDDSAEFNLVNNALLSIFKMDAKGTLGGLFSQILQGEDIVRERAIKFLSTKLKTLPDEVLTKEVEELILTESKKVLEDVTGEEFVLFMKILSGLKSLQTVSGRQQLVELVAEQADLEQTFNPSDPDCVDRLLQCTRQAVPLFSKNVHSTRFVTYFCEQVLPNLGTLTTPVEGLDIQLEVLKLLAEMSSFCGDMEKLETNLRKLFDKLLEYMPLPPEEAENGENAGNEEPKLQFSYVECLLYSFHQLGRKLPDFLTAKLNAEKLKDFKIRLQYFARGLQVYIRQLRLALQGKTGEALKTEENKIKVVALKITNNINVLIKDLFHIPPSYKSTVTLSWKPVQKVEIGQKRASEDTTSGSPPKKSSAGPKRDARQIYNPPSGKYSSNLGNFNYGERFRLGTRNMRD

SEQ ID NO: 10732 - protein, 504 aa, Homo sapiens
MPTVEELYRNYGILADATEQVGQHKDAYQVILDGVKGGTKEKRLAAQFIPKFFKHFPELADSAINAQLDLCEDEDVSIRRQAIKELPQFATGENLPRVADILTQLLQTDDSAEFNLVNNALLSIFKMDAKGTLGGLFSQILQGEDIVRERAIKFLSTKLKTLPDEVLTKEVEELILTESKKVLEDVTGEEFVLFMKILSGLKSLQTVSGRQQLVELVAEQADLEQTFNPSDPDCVDRLLQCTRQAVPLFSKNVHSTRFVTYFCEQVLPNLGTLTTPVEGLDIQLEVLKLLAEMSSFCGDMEKLETNLRKLFDKLLEYMPLPPEEAENGENAGNEEPKLQFSYVECLLYSFHQLGRKLPDFLTAKLNAEKLKDFKIRLQYFARGLQVYIRQLRLALQGKTGEALKTEENKIKVVALKITNNINVLIKDLFHIPPSYKSTVTLSWKPVQKVEIGQKRASEDTTSGSPPKKSSAGPKRDARQIYNPPSGKYSSNLGNFNYERSLQGK

SEQ ID NO: 10733 - protein, 445 aa, Homo sapiens
MPTVEELYRNYGILADATEQVGQHKDAYQVILDGVKGGTKEKRLAAQFIPKFFKHFPELADSAINAQLDLCEDEDVSIRRQAIKELPQFATGENLPRVADILTQLLQTDDSAEFNLVNNALLSIFKMDAKGTLGGLFSQILQGEDIVRERAIKFLSTKLKTLPDEVLTKEVEELILTESKKVLEDVTGEEFVLFMKILSGLKSLQTVSGRQQLVELVAEQADLEQTFNPSDPDCVDRLLQCTRQAVPLFSKNVHSTRFVTYFCEQVLPNLGTLTTPVEGLDIQLEVLKLLAEMSSFCGDMEKLETNLRKLFDKLLEYMPLPPEEAENGENAGNEEPKLQFSYVECLLYSFHQLGRKLPDFLTAKLNAEKLKDFKIRLQYFARGLQVYIRQLRLALQGKTGEALKTEENKIKVVALKITNNINVLIKAKESQGWGTRGNRSRGRLY

SEQ ID NO: 10734 - protein, 450 aa, Homo sapiens
MPTVEELYRNYGILADATEQVGQIRRQAIKELPQFATGENLPRVADILTQLLQTDDSAEFNLVNNALLSIFKMDAKGTLGGLFSQILQGEDIVRERAIKFLSTKLKTLPDEVLTKEVEELILTESKKVLEDVTGEEFVLFMKILSGLKSLQTVSGRQQLVELVAEQADLEQTFNPSDPDCVDRLLQCTRQAVPLFSKNVHSTRFVTYFCEQVLPNLGTLTTPVEGLDIQLEVLKLLAEMSSFCGDMEKLETNLRKLFDKLLEYMPLPPEEAENGENAGNEEPKLQFSYVECLLYSFHQLGRKLPDFLTAKLNAEKLKDFKIRLQYFARGLQVYIRQLRLALQGKTGEALKTEENKIKVVALKITNNINVLIKDLFHIPPSYKSTVTLSWKPVQKVEIGQKRASEDTTSGSPPKKSSAGPKRDARQIYNPPSGKYSSNLGNFNYERSLQGK

SEQ ID NO: 10735 - protein, 513 aa, Homo sapiens
MKQRWRENGIGKHKDAYQVILDGVKGGTKEKRLAAQFIPKFFKHFPELADSAINAQLDLCEDEDVSIRRQAIKELPQFATGENLPRVADILTQLLQTDDSAEFNLVNNALLSIFKMDAKGTLGGLFSQILQGEDIVRERAIKFLSTKLKTLPDEVLTKEVEELILTESKKVLEDVTGEEFVLFMKILSGLKSLQTVSGRQQLVELVAEQADLEQTFNPSDPDCVDRLLQCTRQAVPLFSKNVHSTRFVTYFCEQVLPNLGTLTTPVEGLDIQLEVLKLLAEMSSFCGDMEKLETNLRKLFDKLLEYMPLPPEEAENGENAGNEEPKLQFSYVECLLYSFHQLGRKLPDFLTAKLNAEKLKDFKIRLQYFARGLQVYIRQLRLALQGKTGEALKTEENKIKVVALKITNNINVLIKDLFHIPPSYKSTVTLSWKPVQKVEIGQKRASEDTTSGSPPKKSSAGPKRDARQIYNPPSGKYSSNLGNFNYEQRGAFRGSRGGRGWGTRGNRSRGRLY

SEQ ID NO: 10736 - protein, 395 aa, Homo sapiens
MAAEATAVAGSGAVGGCLAKDGLQQSKCPDTTPKRRRASSLSRDAERRAYQWCREYLGGAWRRVQPEELRVYPVSGGLSNLLFRCSLPDHLPSVGEEPREVLLRLYGAILQGVDSLVLESVMFAILAERSLGPQLYGVFPEGRLEQYIPSRPLKTQELREPVLSAAIATKMAQFHGMEMPFTKEPHWLFGTMERYLKQIQDLPPTGLPEMNLLEMYSLKDEMGNLRKLLESTPSPVVFCHNDIQEGNILLLSEPENADSLMLVDFEYSSYNYRGFDIGNHFCEWVYDYTHEEWPFYKARPTDYPTQEQQLHFIRHYLAEAKKGETLSQEEQRKLEEDLLVEVSRYALASHFFWGLWSILQASMSTIEFGYLDYAQSRFQFYFQQKGQLTSVHSSS

SEQ ID NO: 10737 - protein, 127 aa, Homo sapiens
MAAEATAVAGSGAVGGCLAKDGLQQSKCPDTTPKRRRASSLSRDAERRAYQWCREYLGGAWRRVQPEELRVYPVRWEVRGQPLRCADRGQGSAAGPSGCSMFSPPSCARAWGGAGPAWPGGGRGRGR

SEQ ID NO: 10738 - protein, 986 aa, Homo sapiens
MSRIESLTRARIDRSRELASKTREKEKMKEAKDARYTNGHLFTTISVSGMTMCYACNKSITAKEALICPTCNVTIHNRCKDTLANCTKVKQKQQKAALLKNNTALQSVSLRSKTTIRERPSSAIYPSDSFRQSLLGSRRGRSSLSLAKSVSTTNIAGHFNDESPLGLRRILSQSTDSLNMRNRTLSVESLIDEAEVIYSELMSDFEMDEKDFAADSWSLAVDSSFLQQHKKEVMKQQDVIYELIQTELHHVRTLKIMTRLFRTGMLEELHLEPGVVQGLFPCVDELSDIHTRFLSQLLERRRQALCPGSTRNFVIHRLGDLLISQFSGPSAEQMCKTYSEFCSRHSKALKLYKELYARDKRFQQFIRKVTRPAVLKRHGVQECILLVTQRITKYPLLISRILQHSHGIEEERQDLTTALGLVKELLSNVDEGIYQLEKGARLQEIYNRMDPRAQTPVPGKGPFGREELLRRKLIHDGCLLWKTATGRFKDVLVLLMTDVLVFLQEKDQKYIFPTLDKPSVVSLQNLIVRDIANQEKGMFLISAAPPEMYEVHTASRDDRSTWIRVIQQSVRTCPSREDFPLIETEDEAYLRRIKMELQQKDRALVELLREKVGLFAEMTHFQAEEDGGSGMALPTLPRGLFRSESLESPRGERLLQDAIREVEGLKDLLVGPGVELLLTPREPALPLEPDSGGNTSPGVTANGEARTFNGSIELCRADSDSSQRDRNGNQLRSPQEEALQRLVNLYGLLHGLQAAVAQQDTLMEARFPEGPERREKLCRANSRDGEAGRAGAAPVAPEKQATELALLQRQHALLQEELRRCRRLGEERATEAGSLEARLRESEQARALLEREAEEARRQLAALGQTEPLPAEAPWARRPVDPRRRSLPAGDALYLSFNPPQPSRGTDRLDLPVTTRSVHRNFEDRERQELGSPEERLQDSSDPDTGSEEEGSSRLSPPHSPRDFTRMQDIPEETESRDGEAVASES

SEQ ID NO: 10739 - protein, 985 aa, Homo sapiens
MSRIESLTRARIDRSRELASKTREKEKMKEAKDARYTNGHLFTTISVSGMTMCYACNKSITAKEALICPTCNVTIHNRCKDTLANCTKVKQKQQKAALLKNNTALQSVSLRSKTTIRERPSSAIYPSDSFRQSLLGSRRGRSSLSLAKSVSTTNIAGHFNDESPLGLRRILSQSTDSLNMRNRTLSVESLIDEEVIYSELMSDFEMDEKDFAADSWSLAVDSSFLQQHKKEVMKQQDVIYELIQTELHHVRTLKIMTRLFRTGMLEELHLEPGVVQGLFPCVDELSDIHTRFLSQLLERRRQALCPGSTRNFVIHRLGDLLISQFSGPSAEQMCKTYSEFCSRHSKALKLYKELYARDKRFQQFIRKVTRPAVLKRHGVQECILLVTQRITKYPLLISRILQHSHGIEEERQDLTTALGLVKELLSNVDEGIYQLEKGARLQEIYNRMDPRAQTPVPGKGPFGREELLRRKLIHDGCLLWKTATGRFKDVLVLLMTDVLVFLQEKDQKYIFPTLDKPSVVSLQNLIVRDIANQEKGMFLISAAPPEMYEVHTASRDDRSTWIRVIQQSVRTCPSREDFPLIETEDEAYLRRIKMELQQKDRALVELLREKVGLFAEMTHFQAEEDGGSGMALPTLPRGLFRSESLESPRGERLLQDAIREVEGLKDLLVGPGVELLLTPREPALPLEPDSGGNTSPGVTANGEARTFNGSIELCRADSDSSQRDRNGNQLRSPQEEALQRLVNLYGLLHGLQAAVAQQDTLMEARFPEGPERREKLCRANSRDGEAGRAGAAPVAPEKQATELALLQRQHALLQEELRRCRRLGEERATEAGSLEARLRESEQARALLEREAEEARRQLAALGQTEPLPAEAPWARRPVDPRRRSLPAGDALYLSFNPPQPSRGTDRLDLPVTTRSVHRNFEDRERQELGSPEERLQDSSDPDTGSEEEGSSRLSPPHSPRDFTRMQDIPEETESRDGEAVASES

SEQ ID NO: 10740 - protein, 958 aa, Homo sapiens
MKEAKDARYTNGHLFTTISVSGMTMCYACNKSITAKEALICPTCNVTIHNRCKDTLANCTKVKQKQQKAALLKNNTALQSVSLRSKTTIRERPSSAIYPSDSFRQSLLGSRRGRSSLSLAKSVSTTNIAGHFNDESPLGLRRILSQSTDSLNMRNRTLSVESLIDEEVIYSELMSDFEMDEKDFAADSWSLAVDSSFLQQHKKEVMKQQDVIYELIQTELHHVRTLKIMTRLFRTGMLEELHLEPGVVQGLFPCVDELSDIHTRFLSQLLERRRQALCPGSTRNFVIHRLGDLLISQFSGPSAEQMCKTYSEFCSRHSKALKLYKELYARDKRFQQFIRKVTRPAVLKRHGVQECILLVTQRITKYPLLISRILQHSHGIEEERQDLTTALGLVKELLSNVDEGIYQLEKGARLQEIYNRMDPRAQTPVPGKGPFGREELLRRKLIHDGCLLWKTATGRFKDVLVLLMTDVLVFLQEKDQKYIFPTLDKPSVVSLQNLIVRDIANQEKGMFLISAAPPEMYEVHTASRDDRSTWIRVIQQSVRTCPSREDFPLIETEDEAYLRRIKMELQQKDRALVELLREKVGLFAEMTHFQAEEDGGSGMALPTLPRGLFRSESLESPRGERLLQDAIREVEGLKDLLVGPGVELLLTPREPALPLEPDSGGNTSPGVTANGEARTFNGSIELCRADSDSSQRDRNGNQLRSPQEEALQRLVNLYGLLHGLQAAVAQQDTLMEARFPEGPERREKLCRANSRDGEAGRAGAAPVAPEKQATELALLQRQHALLQEELRRCRRLGEERATEAGSLEARLRESEQARALLEREAEEARRQLAALGQTEPLPAEAPWARRPVDPRRRSLPAGDALYLSFNPPQPSRGTDRLDLPVTTRSVHRNFEDRERQELGSPEERLQDSSDPDTGSEEEGSSRLSPPHSPRDFTRMQDIPEETESRDGEAVASES

SEQ ID NO: 10741 - protein, 937 aa, Homo sapiens
MTDSKYFTTNKKGEIFELKAELNNEKKEKRKEAVKKVIAAMTVGKDVSSLFPDVVNCMQTDNLELKKLVYLYLMNYAKSQPDMAIMAVNSFVKDCEDPNPLIRALAVRTMGCIRVDKITEYLCEPLRKCLKDEDPYVRKTAAVCVAKLHDINAQMVEDQGFLDSLRDLIADSNPMVVANAVAALSEISESHPNSNLLDLNPQNINKLLTALNECTEWGQIFILDCLSNYNPKDDREAQSICERVTPRLSHANSAVVLSAVKVLMKFLELLPKDSDYYNMLLKKLAPPLVTLLSGEPEVQYVALRNINLIVQKRPEILKQEIKVFFVKYNDPIYVKLEKLDIMIRLASQANIAQVLAELKEYATEVDVDFVRKAVRAIGRCAIKVEQSAERCVSTLLDLIQTKVNYVVQEAIVVIRDIFRKYPNKYESIIATLCENLDSLDEPDARAAMIWIVGEYAERIDNADELLESFLEGFHDESTQVQLTLLTAIVKLFLKKPSETQELVQQVLSLATQDSDNPDLRDRGYIYWRLLSTDPVTAKEVVLSEKPLISEETDLIEPTLLDELICHIGSLASVYHKPPNAFVEGSHGIHRKHLPIHHGSTDAGDSPVGTTTATNLEQPQVIPSQGDLLGDLLNLDLGPPVNVPQVSSMQMGAVDLLGGGLDSLVGQSFIPSSVPATFAPSPTPAVVSSGLNDLFELSTGIGMAPGGYVAPKAVWLPAVKAKGLEISGTFTHRQGHIYMEMNFTNKALQHMTDFAIQFNKNSFGVIPSTPLAIHTPLMPNQSIDVSLPLNTLGPVMKMEPLNNLQVAVKNNIDVFYFSCLIPLNVLFVEDGKMERQVFLATWKDIPNENELQFQIKECHLNADTVSSKLQNNNVYTIAKRNVEGQDMLYQSLKLTNGIWILAELRIQPGNPNYTLSLKCRAPEVSQYIYQVYDSILKN

SEQ ID NO: 10742 - protein, 951 aa, Homo sapiens
MTDSKYFTTNKKGEIFELKAELNNEKKEKRKEAVKKVIAAMTVGKDVSSLFPDVVNCMQTDNLELKKLVYLYLMNYAKSQPDMAIMAVNSFVKDCEDPNPLIRALAVRTMGCIRVDKITEYLCEPLRKCLKDEDPYVRKTAAVCVAKLHDINAQMVEDQGFLDSLRDLIADSNPMVVANAVAALSEISESHPNSNLLDLNPQNINKLLTALNECTEWGQIFILDCLSNYNPKDDREAQSICERVTPRLSHANSAVVLSAVKVLMKFLELLPKDSDYYNMLLKKLAPPLVTLLSGEPEVQYVALRNINLIVQKRPEILKQEIKVFFVKYNDPIYVKLEKLDIMIRLASQANIAQVLAELKEYATEVDVDFVRKAVRAIGRCAIKVEQSAERCVSTLLDLIQTKVNYVVQEAIVVIRDIFRKYPNKYESIIATLCENLDSLDEPDARAAMIWIVGEYAERIDNADELLESFLEGFHDESTQVQLTLLTAIVKLFLKKPSETQELVQQVLSLATQDSDNPDLRDRGYIYWRLLSTDPVTAKEVVLSEKPLISEETDLIEPTLLDELICHIGSLASVYHKPPNAFVEGSHGIHRKHLPIHHGSTDAGDSPVGTTTATNLEQPQVIPSQGDLLGDLLNLDLGPPVNVPQVSSMQMGAVDLLGGGLDSLLGSDLGGGIGGSPAVGQSFIPSSVPATFAPSPTPAVVSSGLNDLFELSTGIGMAPGGYVAPKAVWLPAVKAKGLEISGTFTHRQGHIYMEMNFTNKALQHMTDFAIQFNKNSFGVIPSTPLAIHTPLMPNQSIDVSLPLNTLGPVMKMEPLNNLQVAVKNNIDVFYFSCLIPLNVLFVEDGKMERQVFLATWKDIPNENELQFQIKECHLNADTVSSKLQNNNVYTIAKRNVEGQDMLYQSLKLTNGIWILAELRIQPGNPNYTLSLKCRAPEVSQYIYQVYDSILKN

SEQ ID NO: 10743 - protein, 880 aa, Homo sapiens
MQTDNLELKKLVYLYLMNYAKSQPDMAIMAVNSFVKDCEDPNPLIRALAVRTMGCIRVDKITEYLCEPLRKCLKDEDPYVRKTAAVCVAKLHDINAQMVEDQGFLDSLRDLIADSNPMVVANAVAALSEISESHPNSNLLDLNPQNINKLLTALNECTEWGQIFILDCLSNYNPKDDREAQSICERVTPRLSHANSAVVLSAVKVLMKFLELLPKDSDYYNMLLKKLAPPLVTLLSGEPEVQYVALRNINLIVQKRPEILKQEIKVFFVKYNDPIYVKLEKLDIMIRLASQANIAQVLAELKEYATEVDVDFVRKAVRAIGRCAIKVEQSAERCVSTLLDLIQTKVNYVVQEAIVVIRDIFRKYPNKYESIIATLCENLDSLDEPDARAAMIWIVGEYAERIDNADELLESFLEGFHDESTQVQLTLLTAIVKLFLKKPSETQELVQQVLSLATQDSDNPDLRDRGYIYWRLLSTDPVTAKEVVLSEKPLISEETDLIEPTLLDELICHIGSLASVYHKPPNAFVEGSHGIHRKHLPIHHGSTDAGDSPVGTTTATNLEQPQVIPSQGDLLGDLLNLDLGPPVNVPQVSSMQMGAVDLLGGGLDSLVGQSFIPSSVPATFAPSPTPAVVSSGLNDLFELSTGIGMAPGGYVAPKAVWLPAVKAKGLEISGTFTHRQGHIYMEMNFTNKALQHMTDFAIQFNKNSFGVIPSTPLAIHTPLMPNQSIDVSLPLNTLGPVMKMEPLNNLQVAVKNNIDVFYFSCLIPLNVLFVEDGKMERQVFLATWKDIPNENELQFQIKECHLNADTVSSKLQNNNVYTIAKRNVEGQDMLYQSLKLTNGIWILAELRIQPGNPNYTLSLKCRAPEVSQYIYQVYDSILKN

SEQ ID NO: 10744 - protein, 556 aa, Homo sapiens [sequence omitted]

SEQ ID NO: 10745 - protein, 557 aa, Homo sapiens
MPPPRLLFFLLFLTPMEVRPEEPLVVKVEEGDNAVLQCLKGTSDGPTQQLTWSRESPLKPFLKLSLGLPGLGIHMRPLAIWLFIFNVSQQMGGFYLCQPGPPSEKAWQPGWTVNVEGSGELFRWNVSDLGGLGCGLKNRSSEGPSSPSGKLMSPKLYVWAKDRPEIWEGEPPCLPPRDSLNQSLSQDLTMAPGSTLWLSCGVPPDSVSRGPLSWTHVHPKGPKSLLSLELKDDRPARDMWVMETGLLLPRATAQDAGKYYCHRGNLTMSFHLEITARPVLWHWLLRTGGWKVSAVTLAYLIFCLCSLVGILHLQRALVLRRKRKRMTDPTRRFFKVTPPPGSGPQNQYGNVLSLPTPTSGLGRAQRWAAGLGGTAPSYGNPSSDVQADGALGSRSPPGVGPEEEEGEGYEEPDSEEDSEFYENDSNLGQDQLSQDGSGYENPEDEPLGPEDEDSFSNAESYENEDEELTQPVARTMDFLSPHGSAWDPSREATSLAGSQSYEDMRGILYAAPQLRSIRGQPGPNHEEDADSYENMDNPDGPDPAWGGGGRMGTWSTR

SEQ ID NO: 10746 - protein, 416 aa, Homo sapiens
MSGHRSTRKRCGDSHPESPVGFGHMSTTGCVLNKLFQLPTPPLSRHQLKRLEEHRYQSAGRSLLEPLMQGYWEWLVRRVPSWIAPNLITIIGLSINICTTILLVFYCPTATEQAPLWAYIACACGLFIYQSLDAIDGKQARRTNSSSPLGELFDHGCDSLSTVFVVLGTCIAVQLGTNPDWMFFCCFAGTFMFYCAHWQTYVSGTLRFGIIDVTEVQIFIIIMHLLAVIGGPPFWQSMIPVLNIQMKIFPALCTVAGTIFSCTNYFRVIFTGGVGKNGSTIAGTSVLSPFLHIGSVITLAAMIYKKSAVQLFEKHPCLYILTFGFVSAKITNKLVVAHMTKSEMHLHDTAFIGPALLFLDQYFNSFIDEYIVLWIALVFSFFDLIRYCVSVCNQIASHLHIHVFRIKVSTAHSNHH

SEQ ID NO: 10747 - protein, 358 aa, Homo sapiens
MMEKYEKIGKIGEGSYGVVFKCRNRDTGQIVAIKKFLESEDDPVIKKIALREIRMLKQLKHPNLVNLLEVFRRKRRLHLVFEYCDHTVLHELDRYQRGVPEHLVKSITWQTLQAVNFCHKHNCIHRDVKPENILITKHSVIKLCDFGFARLLAGPSDYYTDYVATRWYRSPELLVGDTQYGPPVDVWAIGCVFAELLSGVPLWPGKSDVDQLYLIRKTLGDLIPRHQQVFSTNQYFSGVKIPDPEDMEPLELKFPNISYPALGLLKGCLHMDPTQRLTCEQLLHHPYFENIREIEDLAKEHNKPTRKTLRKSRKHHCFTETSKLQYLPQLTGSSILPALDNKKYYCDTKKLNYRFPNI

SEQ ID NO: 10748 - protein, 994 aa, Homo sapiens
MMELSTDTGWNQKSNFPPCDSRVSKEEAQLPFPTPSSYGADSSNQTYAHKSQSEREQHKEVRAVLNHCSGLDGGEESGLCGTSTRIDAGTGNGTDDKVTDQHRHRRCLQGTKGNNRGSEVWGLLLQGNVDRSGGAPSAGVLLRRRGYSCALHGLRKFANLAGLLSRQQDSARGVSHHSRLKIHFKKIYSSMMEKYEKIGKIGEGSYGVVFKCRNRDTGQIVAIKKFLESEDDPVIKKIALREIRMLKAPSPYAAEPSLCGMKMVRRGKKEFLPAVAEKVDAPSGVGGQGQDSVTVGSLGRRSTYGRKQEKQVRQREGIIYCYVAVLLRIYYFDQGCVAREEEQFQELVFGPFCHIGSYFTGHRTNVRPYILLLSRPSPFKTAAGTYEAGLVILECSYFLAEQEPYCPTQALQQPHPIIGPWALEGGGVESKEDRHPPPKEAPASCEGFLRSAVPKQAYTPFKTSPDKRLSDCVATPPWAPPTPLIISSGVLVAICSMIDPVPEFHSEGLLAKATSGSAGILVWIFLCNDAFIYGKYILRSGVLWVRGLPGFKSEAAALCHKCYSSADPKREQQQDLLQRVKEQSFHSVNGAQARHKGSPSPHQTQEPSWPHPVDPTPGHRWSCLPVPCRAPALLSPWVVDGTGCCGAGGGSDRGGSAAQEPTQLKHPNLVNLLEVFRRKRRLHLVFEYCDHTVLHELDRYQRGICNIFVCTGRRLGEHTEALSKKKKKGGGGPFLKLRAASCRITLFKNVGCGLETTGDLSLNSGGGAASRGVAAALRALVCGTELTSSDSPQRCIHRDVKPENILITKHSVIKLCDFGFARLLAGPSDYYTDYVATRWYRSPELLVGDTQYGPPVDVWAIGCVFAELLSGVPLWPGKSDVDQLYLIRKTLGDLIPRHQQVFSTNQYFSGVKIPDPEDMSLCLSVTLTEGGLLASGAVKRSQMGSSVSQATSWPHPDIVAETAELDDIAMARQTPVMLRFNRQKEQEKYLSYGA

SEQ ID NO: 10749 - protein, 276 aa, Homo sapiens
MMEKYEKIGKIGEGSYGVVFKCRNRDTGQIVAIKKFLESEDDPVIKKIALREIRMLKQLKHPNLVNLLEVFRRKRRLHLVFEYCDHTVLHELDRYQRGVPEHLVKSITWQTLQAVNFCHKHNCIHRDVKPENILITKHSVIKLCDFGFARLLAGPSDYYTDYVATRWYRSPELLVGDTQYGPPVDVWAIGCVFAELLSGVPLWPGKSDVDQLYLIRKTLGDLIPRHQQVFSTNQYFSGVKIPDPEDMEPLELKFPNISYPALGLLKGRVPIASRTE

SEQ ID NO: 10750 - protein, 1153 aa, Homo sapiens
MALKMVKGSIDRMFDKNLQDLVRGIRNHKEDEAKYISQCIDEIKQELKQDNIAVKANAVCKLTYLQMLGYDISWAAFNIIEVMSASKFTFKRIGYLAASQSFHEGTDVIMLTTNQIRKDLSSPSQYDTGVALTGLSCFVTPDLARDLANDIMTLMSHTKPYIRKKAVLIMYKVFLKYPESLRPAFPRLKEKLEDPDPGVQSAAVNVICELARRNPKNYLSLAPLFFKLMTSSTNNWVLIKIIKLFGALTPLEPRLGKKLIEPLTNLIHSTSAMSLLYECVNTVIAVLISLSSGMPNHSASIQLCVQKLRILIEDSDQNLKYLGLLAMSKILKTHPKSVQSHKDLILQCLDDKDESIRLRALDLLYGMVSKKNLMEIVKKLMTHVDKAEGTTYRDELLTKIIDICSQSNYQYITNFEWYISILVELTRLEGTRHGHLIAAQMLDVAIRVKAIRKFAVSQMSALLDSAHLLASSTQRNGICEVLYAAAWICGEFSEHLQEPHHTLEAMLRPRVTTLPGHIQAVYVQNVVKLYASILQQKEQAGEAEGAQAVTQLMVDRLPQFVQSADLEVQERASCILQLVKHIQKLQAKDVPVAEEVSALFAGELNPVAPKAQKKVPVPEGLDLDAWINEPLSDSESEDERPRAVFHEEEQRRPKHRPSEADEEELARRREARKQEQANNPFYIKSSPSPQKRYQDTPGVEHIPVVQIDLSVPLKVPGLPMSDQYVKLEEERRHRQKLEKDKRRKKRKEKEKKGKRRHSSLPTESDEDIAPAQQVDIVTEEMPENALPSDEDDKDPNDPYRALDIDLDKPLADSEKLPIQKHRNTETSKSPEKDVPMVEKKSKKPKKKEKKHKEKERDKEKKKEKEKKKSPKPKKKKHRKEKEERTKGKKKSKKQPPGSEEAAGEPVQNGAPEEEQLPPESSYSLLAENSYVKMTCDIRGSLQEDSQVTVAIVLENRSSSILKGMELSVLDSLNARMARPQGSSVHDGVPVPFQLPPGVSNEAQYVFTIQSIVMAQKLKGTLSFIAKNDEGATHEKLDFRLHFSCSSYLITTPCYSDAFAKLLESGDLSMSSIKVDGIRMSFQNLLAKICFHHHFSVVERVDSCASMYSRSIQGHHVCLLVKKGENSVSVDGKCSDSTLLSNLLEEMKATLAKC

SEQ ID NO: 10751 - protein, 1112 aa, Homo sapiens
MALKMVKGSIDRMFDKNLQDLVRGIRNHKEDEAKYISQCIDEIKQELKQDNIAVKANAVCKLTYLQMLGYDISWAAFNIIEVMSASKFTFKRIGYLAASQSFHEGTDVIMLTTNQIRKDLSSPSQYDTGVALTGLSCFVTPDLARDLANDIMTLMSHTKPYIRKKAVLIEPLTNLIHSTSAMSLLYECVNTVIAVLISLSSGMPNHSASIQLCVQKLRILIEDSDQNLKYLGLLAMSKILKTHPKSVQSHKDLILQCLDDKDESIRLRALDLLYGMVSKKNLMEIVKKLMTHVDKAEGTTYRDELLTKIIDICSQSNYQYITNFEWYISILVELTRLEGTRHGHLIAAQMLDVAIRVKAIRKFAVSQMSALLDSAHLLASSTQRNGICEVLYAAAWICGEFSEHLQEPHHTLEAMLRPRVTTLPGHIQAVYVQNVVKLYASILQQKEQAGEAEGAQAVTQLMVDRLPQFVQSADLEVQERASCILQLVKHIQKLQAKDVPVAEEVSALFAGELNPVAPKAQKKVPVPEGLDLDAWINEPLSDSESEDERPRAVFHEEEQRRPKHRPSEADEEELARRREARKQEQANNPFYIKSSPSPQKRYQDTPGVEHIPVVQIDLSVPLKVPGLPMSDQYVKLEEERRHRQKLEKDKRRKKRKEKEKKGKRRHSSLPTESDEDIAPAQQVDIVTEEMPENALPSDEDDKDPNDPYRALDIDLDKPLADSEKLPIQKHRNTETSKSPEKDVPMVEKKSKKPKKKEKKHKEKERDKEKKKEKEKKAEDLDFWLSTTPPPAPAPAPAPVPSTDECEDAKTEAQGEEDDAEGQDQDKKSPKPKKKKHRKEKEERTKGKKKSKKQPPGSEEAAGEPVQNGAPEEEQLPPESSYSLLAENSYVKMTCDIRGSLQEDSQVTVAIVLENRSSSILKGMELSVLDSLNARMARPQGSSVHDGVPVPFQLPPGVSNEAQYVFTIQSIVMAQKLKGTLSFIAKNDEGATHEKLDFRLHFSCSSYLITTPCYSDAFAKLLESGDLSMSSIKVDGIRMSFQNLLAKICFHHHFSVVERVDSCASMYSRSIQGHHVCLLVKKGENSVSVDGKCSDSTLLSNLLEEMKATLAKC

SEQ ID NO: 10752 - protein, 984 aa, Homo sapiens
MALKMVKGSIDRMFDKNLQDLVRGIRNHKEDEAKYISQCIDEIKQELKQDNIAVKANAVCKLTYLQMLGYDISWAAFNIIEVMSASKFTFKRIGYLAASQSFHEGTDVIMLTTNQIVLISLSSGMPNHSASIQLCVQKLRILIEDSDQNLKYLGLLAMSKILKTHPKSVQSHKDLILQCLDDKDESIRLRALDLLYGMVSKKNLMEIVKKLMTHVDKAEGTTYRDELLTKIIDICSQSNYQYITNFEWYISILVELTRLEGTRHGHLIAAQMLDVAIRVKAIRKFAVSQMSALLDSAHLLASSTQRNGICEVLYAAAWICGEFSEHLQEPHHTLEAMLRPRVTTLPGHIQAVYVQNVVKLYASILQQKEQAGEAEGAQAVTQLMVDRLPQFVQSADLEVQERASCILQLVKHIQKLQAKDVPVAEEVSALFAGELNPVAPKAQKKVPVPEGLDLDAWINEPLSDSESEDERPRAVFHEEEQRRPKHRPSEADEEELARRREARKQEQANNPFYIKSSPSPQKRYQDTPGVEHIPVVQIDLSVPLKVPGLPMSDQYVKLEEERRHRQKLEKDKRRKKRKEKEKKGKRRHSSLPTESDEDIAPAQQVDIVTEEMPENALPSDEDDKDPNDPYRALDIDLDKPLADSEKLPIQKHRNTETSKSPEKDVPMVEKKSKKPKKKEKKHKEKERDKEKKKEKEKKKSPKPKKKKHRKEKEERTKGKKKSKKQPPGSEEAAGEPVQNGAPEEEQLPPESSYSLLAENSYVKMTCDIRGSLQEDSQVTVAIVLENRSSSILKGMELSVLDSLNARMARPQGSSVHDGVPVPFQLPPGVSNEAQYVFTIQSIVMAQKLKGTLSFIAKNDEGATHEKLDFRLHFSCSSYLITTPCYSDAFAKLLESGDLSMSSIKVDGIRMSFQNLLAKICFHHHFSVVERVDSCASMYSRSIQGHHVCLLVKKGENSVSVDGKCSDSTLLSNLLEEMKATLAKC

SEQ ID NO: 10753 - protein, 1021 aa, Homo sapiens
MALKMVKGSIDRMFDKNLQDLVRGIRNHKEDEAKYISQCIDEIKQELKQDNIAVKANAVCKLTYLQMLGYDISWAAFNIIEVMSASKFTFKRIGYLAASQSFHEGTDVIMLTTNQIRKDLSSPSQYDTGVALTGLSCFVTPDLARDLANDIMTLMSHTKPYIRKKAVLIMYKVFLKYPESLRPAFPRLKEKLEDPDPGVQSAAVNVICELARRNPKNYLSLAPLFFKLMTSSTNNWVLIKIIKLFGALTPLEPRLGKKLIEPLTNLIHSTSAMSLLYECVNTVIAVLISLSSGMPNHSASIQLCVQKLRILIEDSDQNLKYLGLLAMSKILKTHPKSVQSHKDLILQCLDDKDESIRLRALDLLYGMVSKKNLMEIVKKLMTHVDKAEGTTYRDELLTKIIDICSQSNYQYITNFEWYISILVELTRLEGTRHGHLIAAQMLDVAIRVKAIRKFAVSQMSALLDSAHLLASSTQRNGICEVLYAAAWICGEFSEHLQEPHHTLEAMLRPRVTTLPGHIQAVYVQNVVKLYASILQQKEQAGEAEGAQAVTQLMVDRLPQFVQSADLEVQERASCILQLVKHIQKLQAKDVPVAEEVSALFAGELNPVAPKAQKKVPVPEGLDLDAWINEPLSDSESEDERPRAVFHEEEQRRPKHRPSEADEEELARRREARKQEQANNPFYIKSSPSPQKRYQDTPGVEHIPVVQIDLSVPLKVPGLPMSDQYVKLEEERRHRQKLEKDKRRKKRKEKEERTKGKKKSKKQPPGSEEAAGEPVQNGAPEEEQLPPESSYSLLAENSYVKMTCDIRGSLQEDSQVTVAIVLENRSSSILKGMELSVLDSLNARMARPQGSSVHDGVPVPFQLPPGVSNEAQYVFTIQSIVMAQKLKGTLSFIAKNDEGATHEKLDFRLHFSCSSYLITTPCYSDAFAKLLESGDLSMSSIKVDGIRMSFQNLLAKICFHHHFSVVERVDSCASMYSRSIQGHHVCLLVKKGENSVSVDGKCSDSTLLSNLLEEMKATLAKC

SEQ ID NO: 10754 - protein, 1215 aa, Homo sapiens
MALKMVKGSIDRMFDKNLQDLVRGIRNHKEDEAKYISQCIDEIKQELKQDNIAVKANAVCKLTYLQMLGYDISWAAFNIIEVMSASKFTFKRIGYLAASQSFHEGTDVIMLTTNQIRKDLSSPSQYDTGVALTGLSCFVTPDLARDLANDIMTLMSHTKPYIRKKAVLIMYKVFLKYPESLRPAFPRLKEKLEDPDPGVQSAAVNVICELARRNPKNYLSLAPLFFKLMTSSTNNWVLIKIIKLFGALTPLEPRLGKKLIEPLTNLIHSTSAMSLLYECVNTVIAVLISLSSGMPNHSASIQLCVQKLRILIEDSDQNLKYLGLLAMSKILKTHPKSVQSHKDLILQCLDDKDESIRLRALDLLYGMVSKKNLMEIVKKLMTHVDKAEGTTYRDELLTKIIDICSQSNYQYITNFEWYISILVELTRLEGTRHGHLIAAQMLDVAIRVKAIRKFAVSQMSALLDSAHLLASSTQRNGICEVLYAAAWICGEFSEHLQEPHHTLEAMLRPRVTTLPGHIQAVYVQNVVKLYASILQQKEQAGEAEGAQAVTQLMVDRLPQFVQSADLEVQERASCILQLVKHIQKLQAKDVPVAEEVSALFAGELNPVAPKAQKKVPVPEGLDLDAWINEPLSDSESEDERPRAVFHEEEQRRPKHRPSEADEEELARRREARKQEQANNPFYIKSSPSPQKRYQDTPGVEHIPVVQIDLSVPLKVPGLPMSDQYVKLEEERRHRQKLEKDKRRKKRKEKEKKGKRRHSSLPTESDEDIAPAQQVDIVTEEMPENALPSDEDDKDPNDPYRALDIDLDKPLADSEKLPIQKHRNTETSKSPEKDVPMVEKKSKKPKKKEKKHKEKERDKEKKKEKEKKAEDLDFWLSTTPPPAPAPAPAPVPSTGELSVNTVTTPKDECEDAKTEAQGEEDDAEGQDQDKKSPKPKKKKHRKEKEERTKGKKKSKKQPPGSEEAAGEPVQNGAPEEEQLPPESSYSLLAENSYVKMTCDIRGSLQEDSQVTVAIVLENRSSSILKGMELSVLDSLNARMARPQGSSVHDGVPVPFQLPPGVSNEAQYVFTIQSIVMAQKLKGTLSFIAKNDEGATHEKLDFRLHFSCSSYLITTPCYSDAFAKLLESGDLSMSSIKVDGIRMSFQNLLAKICFHHHFSVVERVDSCASMYSRSIQGHHVCLLVKKGENSVSVDGKCSDSTLLSNLLEEMKATLAKC

SEQ ID NO: 10755 - protein, 385 aa, Homo sapiens
MLVRRGARAGPRMPRGWTALCLLSLLPSGFMSLDNNGTATPELPTQGTFSNVSTNVSYQETTTPSTLGSTSLHPVSQHGNEATTNITETTVKFTSTSVITSVYGNTNSSVQSQTSVISTVFTTPANVSTPETTLKPSLSPGNVSDLSTTSTSLATSPTKPYTSSSPILSDIKAEIKCSGIREVKLTQGICLEQNKTSSCAEFKKDRGEGLARVLCGEEQADADAGAQVCSLLLAQSEVRPQCLLLVLANRTEISSKLQLMKKHQSDLKKLGILDFTEQDVASHQSYSQKTLIALVTSGALLAVLGITGYFLMNRRSWSPTGERLGEDPYYTENGGGQGYSSGPGTSPEAQGKASVNRGAQENGTGQATSRNGHSARQHVVADTEL

SEQ ID NO: 10756 - protein, 328 aa, Homo sapiens
MLVRRGARAGPRMPRGWTALCLLSLLPSGFMSLDNNGTATPELPTQGTFSNVSTNVSYQETTTPSTLGSTSLHPVSQHGNEATTNITETTVKFTSTSVITSVYGNTNSSVQSQTSVISTVFTTPANVSTPETTLKPSLSPGNVSDLSTTSTSLATSPTKPYTSSSPILSDIKAEIKCSGIREVKLTQGICLEQNKTSSCAEFKKDRGEGLARVLCGEEQADADAGAQVCSLLLAQSEVRPQCLLLVLANRTEISSKLQLMKKHQSDLKKLGILDFTEQDVASHQSYSQKTLIALVTSGALLAVLGITGYFLMNRRSWSPTGERLELEP

SEQ ID NO: 10757 - protein, 472 aa, Homo sapiens
MGCDRNCGLIAGAVIGAVLAVFGGILMPVGDLLIQKTIKKQVVLEEGTIAFKNWVKTGTEVYRQFWIFDVQNPQEVMMNSSNIQVKQRGPYTYRVRFLAKENVTQDAEDNTVSFLQPNGAIFEPSLSVGTEADNFTVLNLAVAAASHIYQNQFVQMILNSLINKSKSSMFQVRTLRELLWGYRDPFLSLVPYPVTTTVGLFYPYNNTADGVYKVFNGKDNISKVAIIDTYKGKRNLSYWESHCDMINGTDAASFPPFVEKSQVLQFFSSDICRSIYAVFESDVNLKGIPVYRFVLPSKAFASPVENPDNYCFCTEKIISKNCTSYGVLDISKCKEGRPVYISLPHFLYASPDVSEPIDGLNPNEEEHRTYLDIEPITGFTLQFAKRLQVNLLVKPSEKIQVLKNLKRNYIVPILWLNETGTIGDEKANMFRSQVTGKINLLGLIEMILLSVGVVMFVAFMISYCACRSKTIK

SEQ ID NO: 10758 - protein, 288 aa, Homo sapiens
MGCDRNCGLIAGAVIGAVLAVFGGILMPVGDLLIQKTIKKQVVLEEGTIAFKNWVKTGTEVYRQFWIFDVQNPQEVMMNSSNIQVKQRGPYTYRVRFLAKENVTQDAEDNTVSFLQPNGAIFEPSLSVGTEADNFTVLNLAVAAASHIYQNQFVQMILNSLINKSKSSMFQVRTLRELLWGYRDPFLSLVPYPVTTTVGLFYPYNNTADGVYKVFNGKDNISKVAIIDTYKGKRNLSYWESHCDMINGTDAASFPPFVEKSQVLQFFSSDICRETCVHFTSSFSVCKS

SEQ ID NO: 10759 - protein, 433 aa, Homo sapiens
MGCDRNCGLIAGAVIGAVLAVFGGILMPVGDLLIQKTIKKQVVLEEGTIAFKNWVKTGTEVYRQFWIFDVQNPQEVMMNSSNIQVKQRGPYTYRVRFLAKENVTQDAEDNTVSFLQPNGAIFEPSLSVGTEADNFTVLNLAVAAASHIYQNQFVQMILNSLINKSKSSMFQVRTLRELLWGYRDPFLSLVPYPVTTTVGLFYPYNNTADGVYKVFNGKDNISKVAIIDTYKGKRSIYAVFESDVNLKGIPVYRFVLPSKAFASPVENPDNYCFCTEKIISKNCTSYGVLDISKCKEGRPVYISLPHFLYASPDVSEPIDGLNPNEEEHRTYLDIEPITGFTLQFAKRLQVNLLVKPSEKIQVLKNLKRNYIVPILWLNETGTIGDEKANMFRSQVTGKINLLGLIEMILLSVGVVMFVAFMISYCACRSKTIK

SEQ ID NO: 10760 - protein, 412 aa, Homo sapiens
MGCDRNCGLIAGAVIGAVLAVFGGILMPVGDLLIQKTIKKQVVLEEGTIAFKNWVKTGTEVYRQFWIFDVQNPQEVMMNSSNIQVKQRGPYTYRVRFLAKENVTQDAEDNTVSFLQPNGAIFEPSLSVGTEADNFTVLNLAVAYNNTADGVYKVFNGKDNISKVAIIDTYKGKRNLSYWESHCDMINGTDAASFPPFVEKSQVLQFFSSDICRSIYAVFESDVNLKGIPVYRFVLPSKAFASPVENPDNYCFCTEKIISKNCTSYGVLDISKCKEGRPVYISLPHFLYASPDVSEPIDGLNPNEEEHRTYLDIEPITGFTLQFAKRLQVNLLVKPSEKIQVLKNLKRNYIVPILWLNETGTIGDEKANMFRSQVTGKINLLGLIEMILLSVGVVMFVAFMISYCACRSKTIK

SEQ ID NO: 10761 - protein, 590 aa, Homo sapiens
MSSACDAGDHYPLHLLVWKNDYRQLEKELQGQNVEAVDPRGRTLLHLAVSLGHLESARVLLRHKADVTKENRQGWTVLHEAVSTGDPEMVYTVLQHRDYHNTSMALEGVPELLQKILEAPDFYVQMKWEFTSWVPLVSRICPNDVCRIWKSGAKLRVDITLLGFENMSWIRGRRSFIFKGEDNWAELMEVNHDDKVVTTERFDLSQEMERLTLDLMKPKSREVERRLTSPVINTSLDTKNIAFERTKSGFWGWRTDKAEVVNGYEAKVYTVNNVNVITKIRTEHLTEEEKKRYKADRNPLESLLGTVEHQFGAQGDLTTECATANNPTAITPDEYFNEEFDLKDRDIGRPKELTIRTQKFKAMLWMCEEFPLSLVEQVIPIIDLMARTSAHFARLRDFIKLEFPPGFPVKIEIPLFHVLNARITFGNVNGCSTAEESVSQNVEGTQADSASHITNFEVDQSVFEIPESYYVQDNGRNVHLQDEDYEIMQFAIQQSLLESSRSQELSGPASNGGISQTNTYDAQYERAIQESLLTSTEGLCPSALSETSRFDNDLQLAMELSAKELEEWELRLQEEEAELQQVLQLSLTDK

SEQ ID NO: 10762 - protein, 541 aa, Homo sapiens
MKSYTPYFILLWSAVGIAKAAKIIIVPPIMFESHMYIFKTLASALHERGHHTVFLLSEGRDIAPSNHYSLQRYPGIFNSTTSDAFLQSKMRNIFSGRLTAIELFDILDHYTKNCDLMVGNHALIQGLKKEKFDLLLVDPNDMCGFVIAHLLGVKYAVFSTGLWYPAEVGAPAPLAYVPEFNSLLTDRMNLLQRMKNTGVYLISRLGVSFLVLPKYERIMQKYNLLPEKSMYDLVHGSSLWMLCTDVALEFPRPTLPNVVYVGGILTKPASPLPEDLQRWVNGANEHGFVLVSFGAGVKYLSEDIANKLAGALGRLPQKVIWRFSGPKPKNLGNNTKLIEWLPQNDLLGHSKIKAFLSHGGLNSIFETIYHGVPVVGIPLFGDHYDTMTRVQAKGMGILLEWKTVTEKELYEALVKVINNPSYRQRAQKLSEIHKDQPGHPVNRTIYWIDYIIRHNGAHHLRAAVHQISFCQYFLLDIAFVLLLGAALLYFLLSWVTKFIYRKIKSLWSRNKHSTVNGHYHNGILNGKYKRNGHIKHEKKVK

SEQ ID NO: 10763 - protein, 193 aa, Homo sapiens
MFKNTFQSGFLSILYSIGSKPLQIWDKKVRNGHIKRITDNDIQSLVLEIEGTNVSTTYITCPADPKKTLGIKLPFLVMIIKNLKKYFTFEVQVLDDKNVRRRFRASNYQSTTRVKPFICTMPMRLDDGWNQIQFNLLDFTRRAYGTNYIETLRVQIHANCRIRRVYFSDRLYSEDELPAEFKLYLPVQNKAKQ

SEQ ID NO: 10764 - protein, 498 aa, Homo sapiens
MLQCRPAQEFSFGPRALKDALVSTDAALQQLYVSAFSPAERLFLAEAYNPQRTLFCTLLIRTGFDWLLSRPEAPEDFQTFHASLQHRKPRLARKHIYLQPIDLSEEPVGSSLLHQLCSCTEAFFLGLRVKCLPSVAAASIRCSSRPSRDSDRLQLHTDGILSFLKNNKPGDALCVLGLTLSDLYPHEAWSFTFSKFLPGHEVGVCSFARFSGEFPKSGPSAPDLALVEAAADGPEAPLQDRGWALCFSALGMVQCCKVTCHELCHLLGLGNCRWLRCLMQGALSLDEALRRPLDLCPICLRKLQHVLGFRLIERYQRLYTWTQAVVGTWPSQEAGEPSVWEDTPPASADSGMCCESDSEPGTSVSEPLTPDAGSHTFASGPEEGLSYLAASEAPLPPGGPAEAIKEHERWLAMCIQALQREVAEEDLVQVDRAVDALDRWEMFTGQLPATRQDPPSSRDSVGLRKVLGDKFSSLRRKLSARKLARAESAPRPWDGEES

SEQ ID NO: 10765 - protein, 297 aa, Homo sapiens
MLQCRPAQEFSFGPRALKDALVSTDAALQQLYVSAFSPAERLFLAEAYNPQRTLFCTLLIRTGFDWLLSRPEAPEDFQTFHASLQHRKPRLARKHIYLQPIDLSEEPVGSSLLHQLCSCTEAFFLGLRVKCLPSVAAASIRCSSRPSRDSDRLQLHTDGILSFLKNNKPGDALCVLGLTLSDLYPHEAWSFTFSKFLPGHGHVPRALPPSGPGELPLAPLPHAGCAQPGRGPAAAPGPLSHLPEEAAACPGFQAHREVPETLHLDSGGGGDVAQPGGGGAVSVGGHPACQRRLGHVL

SEQ ID NO: 10766 - protein, 496 aa, Homo sapiens
MLHTEGHALLRAVGQGKLRLARLLLEGGAYVNEGDAQGETALMAACRARYDDPQNKARMVRYLLEQGADPNIADRLGRTALMHACAGGGGAAVASLLLAHGADPSVRDHAGASALVHALDRGDRETLATLLDACKAKGTEVIIITTDTSPSGTKKTRQYLNSPPSPGVEDPAPASPSPGFCTSPSEIQLQTAGGGGRGMLSPRAQEEEEKRDVFEFPLPKPPDDPSPSEPLPKPPRHPPKPLKRLNSEPWGLVAPPQPVPPTEGRPGIERLTAEFNGLTLTGRPRLSRRHSTEGPEDPPPWAEKVTSGGPLSRRNTAPEAQESGPPSGLRQKLSRMEPVELDTPGHLCPDSPESSRLSLERRRYSASPLTLPPAGSAPSPRQSQESLPGAVSPLSGRRRSPGLLERRGSGTLLLDHISQTRPGFLPPLNVSPHPPIPDIRPQPGGRAPSLPAPPYAGAPGSPRTKRKLVRRHSMQTEQIRLLGGFQSLGGPGEPGR

SEQ ID NO: 10767 - protein, 514 aa, Homo sapiens
MDEGMEISSEGNSLIKAVHQSRLRLTRLLLEGGAYINESNDRGETPLMIACKTKHVDHQSVSKAKMVKYLLENNADPNIQDKSGKTALMHACLEKAGPEVVSLLLKSGADLSLQDHSSYSALVYAINSEDTETLKVLLSACKAKGKEVIIITTAKLPCGKHTTKQYLNMPPVDIDGCHSPATCTTPSEIDIKTASSPLSHSSETELTLFGFKDLELAGSNDDTWDPGSPVRKPALAPKGPKLPHAPPWVKSPPLLMHQNRVASLQEELQDITPEEELSYKTNGLALSKRFITRHQSIDVKDTAHLLRAFDQASSRKMSYDEINCQSYLSEGNQQCIEVPVDQDPDSNQTIFASTLRSIVQKRNLGANHYSSDSQLSAGLTPPTSEDGKALIGKKKILSPSPSQLSESKELLENIPPGPLSRRNHAVLERRGSGAFPLDHSVTQTRQGFLPPLNVNSHPPISDINVNNKICSLLSCGQKVLMPTVPIFPKEFKSKKMLLRRQSLQTEQIKQLVNF

SEQ ID NO: 10768 - protein, 1248 aa, Homo sapiens
MDAKARNCLLQHREALEKDIKTSYIMDHMISDGFLTISEEEKVRNEPTQQQRAAMLIKMILKKDNDSYVSFYNALLHEGYKDLAALLHDGIPVVSSSSGKDSVSGITSYVRTVLCEGGVPQRPVVFVTRKKLVNAIQQKLSKLKGEPGWVTIHGMAGCGKSVLAAEAVRDHSLLEGCFPGGVHWVSVGKQDKSGLLMKLQNLCTRLDQDESFSQRLPLNIEEAKDRLRILMLRKHPRSLLILDDVWDSWVLKAFDSQCQILLTTRDKSVTDSVMGPKYVVPVESSLGKEKGLEILSLFVNMKKADLPEQAHSIIKECKGSPLVVSLIGALLRDFPNRWEYYLKQLQNKQFKRIRKSSSYDYEALDEAMSISVEMLREDIKDYYTDLSILQKDVKVPTKVLCILWDMETEEVEDILQEFVNKSLLFCDRNGKSFRYYLHDLQVDFLTEKNCSQLQDLHKKIITQFQRYHQPHTLSPDQEDCMYWYNFLAYHMASAKMHKELCALMFSLDWIKAKTELVGPAHLIHEFVEYRHILDEKDCAVSENFQEFLSLNGHLLGRQPFPNIVQLGLCEPETSEVYQQAKLQAKQEVDNGMLYLEWINKKNITNLSRLVVRPHTDAVYHACFSEDGQRIASCGADKTLQVFKAETGEKLLEIKAHEDEVLCCAFSTDDRFIATCSVDKKVKIWNSMTGELVHTYDEHSEQVNCCHFTNSSHHLLLATGSSDCFLKLWDLNQKECRNTMFGHTNSVNHCRFSPDDKLLASCSADGTLKLWDATSANERKSINVKQFFLNLEDPQEDMEVIVKCCSWSADGARIMVAAKNKIFLFDIHTSGLLGEIHTGHHSTIQYCDFSPQNHLAVVALSQYCVELWNTDSRSKVADCRGHLSWVHGVMFSPDGSSFLTSSDDQTIRLWETKKVCKNSAVMLKQEVDVVFQENEVMVLAVDHIRRLQLINGRTGQIDYLTEAQVSCCCLSPHLQYIAFGDENGAIEILELVNNRIFQSRFQHKKTVWHIQFTADEKTLISSSDDAEIQVWNWQLDKCIFLRGHQETVKDFRLLKNSRLLSWSFDGTVKVWNIITGNKEKDFVCHQGTVLSCDISHDATKFSSTSADKTAKIWSFDLLLPLHELRGHNGCVRCSAFSVDSTLLATGDDNGEIRIWNVSNGELLHLCAPLSEEGAATHGGWVTDLCFSPDGKMLISAGGYIKWWNVVTGESSQTFYTNGTNLKKIHVSPDFKTYVTVDNLGILYILQTLE

SEQ ID NO: 10769 - protein, 1237 aa, Homo sapiens
MDAKARNCLLQHREALEKDIKTSYIMDHMISDGFLTISEEEKVRNEPTQQQRAAMLIKMILKKDNDSYVSFYNALLHEGYKDLAALLHDGIPVVSSSSVRTVLCEGGVPQRPVVFVTRKKLVNAIQQKLSKLKGEPGWVTIHGMAGCGKSVLAAEAVRDHSLLEGCFPGGVHWVSVGKQDKSGLLMKLQNLCTRLDQDESFSQRLPLNIEEAKDRLRILMLRKHPRSLLILDDVWDSWVLKAFDSQCQILLTTRDKSVTDSVMGPKYVVPVESSLGKEKGLEILSLFVNMKKADLPEQAHSIIKECKGSPLVVSLIGALLRDFPNRWEYYLKQLQNKQFKRIRKSSSYDYEALDEAMSISVEMLREDIKDYYTDLSILQKDVKVPTKVLCILWDMETEEVEDILQEFVNKSLLFCDRNGKSFRYYLHDLQVDFLTEKNCSQLQDLHKKIITQFQRYHQPHTLSPDQEDCMYWYNFLAYHMASAKMHKELCALMFSLDWIKAKTELVGPAHLIHEFVEYRHILDEKDCAVSENFQEFLSLNGHLLGRQPFPNIVQLGLCEPETSEVYQQAKLQAKQEVDNGMLYLEWINKKNITNLSRLVVRPHTDAVYHACFSEDGQRIASCGADKTLQVFKAETGEKLLEIKAHEDEVLCCAFSTDDRFIATCSVDKKVKIWNSMTGELVHTYDEHSEQVNCCHFTNSSHHLLLATGSSDCFLKLWDLNQKECRNTMFGHTNSVNHCRFSPDDKLLASCSADGTLKLWDATSANERKSINVKQFFLNLEDPQEDMEVIVKCCSWSADGARIMVAAKNKIFLFDIHTSGLLGEIHTGHHSTIQYCDFSPQNHLAVVALSQYCVELWNTDSRSKVADCRGHLSWVHGVMFSPDGSSFLTSSDDQTIRLWETKKVCKNSAVMLKQEVDVVFQENEVMVLAVDHIRRLQLINGRTGQIDYLTEAQVSCCCLSPHLQYIAFGDENGAIEILELVNNRIFQSRFQHKKTVWHIQFTADEKTLISSSDDAEIQVWNWQLDKCIFLRGHQETVKDFRLLKNSRLLSWSFDGTVKVWNIITGNKEKDFVCHQGTVLSCDISHDATKFSSTSADKTAKIWSFDLLLPLHELRGHNGCVRCSAFSVDSTLLATGDDNGEIRIWNVSNGELLHLCAPLSEEGAATHGGWVTDLCFSPDGKMLISAGGYIKWWNVVTGESSQTFYTNGTNLKKIHVSPDFKTYVTVDNLGILYILQTLE

SEQ ID NO: 10770 - protein, 1194 aa, Homo sapiens
MDAKARNCLLQHREALEKDIKTSYIMDHMISDGFLTISEEEKVRNEPTQQQRAAMLIKMILKKDNDSYVSFYNALLHEGYKDLAALLHDGIPVVSSSSVRTVLCEGGVPQRPVVFVTRKKLVNAIQQKLSKLKGEPGWVTIHGMAGCGKSVLAAEAVRDHSLLEGCFPGGVHWVSVGKQDKSGLLMKLQNLCTRLDQDESFSQRLPLNIEEAKDRLRILMLRKHPRSLLILDDVWDSWVLKAFDSQCQILLTTRDKSVTDSVMGPKYVVPVESSLGKEKGLEILSLFVNMKKADLPEQAHSIIKECKGSPLVVSLIGALLRDFPNRWEYYLKQLQNKQFKRIRKSSSYDYEALDEAMSISVEMLREDIKDYYTDLSILQKDVKVPTKVLCILWDMETEEVEDILQEFVNKSLLFCDRNGKSFRYYLHDLQVDFLTEKNCSQLQDLHKKIITQFQRYHQPHTLSPDQEDCMYWYNFLAYHMASAKMHKELCALMFSLDWIKAKTELVGPAHLIHEFVEYRHILDEKDCAVSENFQEFLSLNGHLLGRQPFPNIVQLGLCEPETSEVYQQAKLQAKQEVDNGMLYLEWINKKNITNLSRLVVRPHTDAVYHACFSEDGQRIASCGADKTLQVFKAETGEKLLEIKAHEDEVLCCAFSTDDRFIATCSVDKKVKIWNSMTGELVHTYDEHSEQVNCCHFTNSSHHLLLATGSSDCFLKLWDLNQKECRNTMFGHTNSVNHCRFSPDDKLLASCSADGTLKLWDATSANERKSINVKQFFLNLEDPQEDMEVIVKCCSWSADGARIMVAAKNKIFLWNTDSRSKVADCRGHLSWVHGVMFSPDGSSFLTSSDDQTIRLWETKKVCKNSAVMLKQEVDVVFQENEVMVLAVDHIRRLQLINGRTGQIDYLTEAQVSCCCLSPHLQYIAFGDENGAIEILELVNNRIFQSRFQHKKTVWHIQFTADEKTLISSSDDAEIQVWNWQLDKCIFLRGHQETVKDFRLLKNSRLLSWSFDGTVKVWNIITGNKEKDFVCHQGTVLSCDISHDATKFSSTSADKTAKIWSFDLLLPLHELRGHNGCVRCSAFSVDSTLLATGDDNGEIRIWNVSNGELLHLCAPLSEEGAATHGGWVTDLCFSPDGKMLISAGGYIKWWNVVTGESSQTFYTNGTNLKKIHVSPDFKTYVTVDNLGILYILQTLE

SEQ ID NO: 10771 - protein, 1205 aa, Homo sapiens
MDAKARNCLLQHREALEKDIKTSYIMDHMISDGFLTISEEEKVRNEPTQQQRAAMLIKMILKKDNDSYVSFYNALLHEGYKDLAALLHDGIPVVSSSSGKDSVSGITSYVRTVLCEGGVPQRPVVFVTRKKLVNAIQQKLSKLKGEPGWVTIHGMAGCGKSVLAAEAVRDHSLLEGCFPGGVHWVSVGKQDKSGLLMKLQNLCTRLDQDESFSQRLPLNIEEAKDRLRILMLRKHPRSLLILDDVWDSWVLKAFDSQCQILLTTRDKSVTDSVMGPKYVVPVESSLGKEKGLEILSLFVNMKKADLPEQAHSIIKECKGSPLVVSLIGALLRDFPNRWEYYLKQLQNKQFKRIRKSSSYDYEALDEAMSISVEMLREDIKDYYTDLSILQKDVKVPTKVLCILWDMETEEVEDILQEFVNKSLLFCDRNGKSFRYYLHDLQVDFLTEKNCSQLQDLHKKIITQFQRYHQPHTLSPDQEDCMYWYNFLAYHMASAKMHKELCALMFSLDWIKAKTELVGPAHLIHEFVEYRHILDEKDCAVSENFQEFLSLNGHLLGRQPFPNIVQLGLCEPETSEVYQQAKLQAKQEVDNGMLYLEWINKKNITNLSRLVVRPHTDAVYHACFSEDGQRIASCGADKTLQVFKAETGEKLLEIKAHEDEVLCCAFSTDDRFIATCSVDKKVKIWNSMTGELVHTYDEHSEQVNCCHFTNSSHHLLLATGSSDCFLKLWDLNQKECRNTMFGHTNSVNHCRFSPDDKLLASCSADGTLKLWDATSANERKSINVKQFFLNLEDPQEDMEVIVKCCSWSADGARIMVAAKNKIFLWNTDSRSKVADCRGHLSWVHGVMFSPDGSSFLTSSDDQTIRLWETKKVCKNSAVMLKQEVDVVFQENEVMVLAVDHIRRLQLINGRTGQIDYLTEAQVSCCCLSPHLQYIAFGDENGAIEILELVNNRIFQSRFQHKKTVWHIQFTADEKTLISSSDDAEIQVWNWQLDKCIFLRGHQETVKDFRLLKNSRLLSWSFDGTVKVWNIITGNKEKDFVCHQGTVLSCDISHDATKFSSTSADKTAKIWSFDLLLPLHELRGHNGCVRCSAFSVDSTLLATGDDNGEIRIWNVSNGELLHLCAPLSEEGAATHGGWVTDLCFSPDGKMLISAGGYIKWWNVVTGESSQTFYTNGTNLKKIHVSPDFKTYVTVDNLGILYILQTLE

SEQ ID NO: 10772 - protein, 1171 aa, Homo sapiens
MDAKARNCLLQHREALEKDIKTSYIMDHMISDGFLTISEEEKVRNEPTQQQRAAMLIKMILKKDNDSYVSFYNALLHEGYKDLAALLHDGIPVVSSSSGKDSVSGITSYVRTVLCEGGVPQRPVVFVTRKKLVNAIQQKLSKLKGEPGWVTIHGMAGCGKSVLAAEAVRDHSLLEGCFPGGVHWVSVGKQDKSGLLMKLQNLCTRLDQDESFSQRLPLNIEEAKDRLRILMLRKHPRSLLILDDVWDSWVLKAFDSQCQILLTTRDKSVTDSVMGPKYVVPVESSLGKEKGLEILSLFVNMKKADLPEQAHSIIKECKGSPLVVSLIGALLRDFPNRWEYYLKQLQNKQFKRIRKSSSYDYEALDEAMSISVEMLREDIKDYYTDLSILQKDVKVPTKVLCILWDMETEEVEDILQEFVNKSLLFCDRNGKSFRYYLHDLQVDFLTEKNCSQLQDLHKKIITQFQRYHQPHTLSPDQEDCMYWYNFLAYHMASAKMHKELCALMFSLDWIKAKTELVGPAHLIHEFVEYRHILDEKDCAVSENFQEFLSLNGHLLGRQPFPNIVQLGLCEPETSETLGFESKKVYQQAKLQAKQEVDNGMLYLEWINKKNITNLSRLVVRPHTDAVYHACFSEDGQRIASCGADKTLQVFKAETGEKLLEIKAHEDEVLCCAFSTDDRFIATCSVDKKVKIWNSMTGELVHTYDEHSEQVNCCHFTNSSHHLLLATGSSDCFLKLWDLNQKECRNTMFGHTNSVNHCRFSPDDKLLASCSADGTLKLWDATSANERKSINVKQFFLNLEDPQEDMEVIVKCCSWSADGARIMVAAKNKIFLWNTDSRSKVADCRGHLSWVHGVMFSPDGSSFLTSSDDQTIRLWETKKVCKNSAVMLKQEVDVVFQENEVMVLAVDHIRRLQLINGRTGQIDYLTEAQVSCCCLSPHLQYIAFGDENGAIEILELVNNRIFQSRFQHKKTVWHIQFTADEKTLISSSDDAEIQVWNWQLDKCIFLRGHQETVKDFRLLKNSRLLSWSFDGTVKVWNIITGNKEKDFVCHQGTVLSCDISHDATKFSSTSADKTAKIWNVSNGELLHLCAPLSEEGAATHGGWVTDLCFSPDGKMLISAGGYIKWWNVVTGESSQTFYTNGTNLKKIHVSPDFKTYVTVDNLGILYILQTLE

SEQ ID NO: 10773 - protein, 338 aa, Homo sapiens
MDAKARNCLLQHREALEKDIKTSYIMDHMISDGFLTISEEEKVRNEPTQQQRAAMLIKMILKKDNDSYVSFYNALLHEGYKDLAALLHDGIPVVSSSSGKDSVSGITSYVRTVLCEGGVPQRPVVFVTRKKLVNAIQQKLSKLKGEPGWVTIHGMAGCGKSVLAAEAVRDHSLLEGCFPGGVHWVSVGKQDKSGLLMKLQNLCTRLDQDESFSQRLPLNIEEAKDRLRILMLRKHPRSLLILDDVWDSWVLKAFDSQCQILLTTRDKSVTDSVMGPKYVVPVESSLGKEKGLEILSLFVNMKKADLPEQAHSIIKECKVVERCHWGILTDLLHKWNQS

SEQ ID NO: 10774 - protein, 157 aa, Homo sapiens; identical to SEQ ID NO: 207

SEQ ID NO: 10775 - protein, 202 aa, Homo sapiens; identical to SEQ ID NO: 208

SEQ ID NO: 10776 - protein, 819 aa, Homo sapiens
MDIQLDPARDDLPLMANTSHILVKHYVLDLDVDFESQVIEGTIVLFLEDGNRFKKQNSSIEEACQSESNKACKFGMPEPCHIPVTNARTFSSEMEYNDFAICSKGEKDTSDKDGNHDNQEHASGISSSKYCCDTGNHGSEDFLLVLDCCDLSVLKVEEVDVAAVPGLEKFTRSPELTVVSEEFRNQIVRELVTLPANRWREQLDYYARCSQAPGCGELLFDTDTWSLQIRKTGAQTATDFPHAIRIWYKTKPEGRSVTWTSDQSGRPCVYTVGSPINNRALFPCQEPPVAMSTWQATVRAAASFVVLMSGENSAKPTQLWEECSSWYYYVTMPMPASTFTIAVGCWTEMKMETWSSNDLATERPFSPSEANFRHVGVCSHMEYPCRFQNASATTQEIIPHRVFAPVCLTGACQETLLRLIPPCLSAAHSVLGAHPFSRLDVLIVPANFPSLGMASPHIMFLSQSILTGGNHLCGTRLCHEIAHAWFGLAIGARDWTEEWLSEGFATHLEDVFWATAQQLAPYEAREQQELRACLRWRRLQDEMQCSPEEMQVLRPSKDKTGHTSDSGASVIKHGLNPEKIFMQVHYLKGYFLLRFLAKRLGDETYFSFLRKFVHTFHGQLILSQDFLQMLLENIPEEKRLELSVENIYQDWLESSGIPKPLQRERRAGAECGLARQVRAEVTKWIGVNRRPRKRKRREKEEVFEKLLPDQLVLLLEHLLEQKTLSPRTLQSLQRTYHLQDQDAEVRHRWCELIVKHKFTKAYKSVERFLQEDQAMGVYLYGELMVSEDARQQQLARRCFERTKEQMDRSSAQVVAEMLF

SEQ ID NO: 10777 - protein, 720 aa, Homo sapiens
MDIQLDPARDDLPLMANTSHILVKHYVLDLDVDFESQVIEGTIVLFLEDGNRFKKQNSSIEEACQSESNKACKFGMPEPCHIPVTNARTFSSEMEYNDFAICSKGEKDTSDKDGNHDNQEHASGISSSKYCCDTGNHGSEDFLLVLDCCDLSVLKVEEVDVAAVPGLEKFTRSPELTVVSEEFRNQIVRELVTLPANRWREQLDYYARCSQAPGCGELLFDTDTWSLQIRKTGAQTATDFPHAIRIWYKTKPEGRSVTWTSDQSGRPCVYTVGSPINNRALFPCQEPPVAMSTWQATVRAAASFVVLMSGENSAKPTQLWEECSSWYYYVTMPMPASTFTIAVGCWTEMKMETWSSNDLATERPFSPSEANFRHVGVCSHMEYPCRFQNASATTQEIIPHRVFAPVCLTGACQETLLRLIPPCLSAAHSVLGAHPFSRLDVLIVPANFPSLGMARPSKDKTGHTSDSGASVIKHGLNPEKIFMQVHYLKGYFLLRFLAKRLGDETYFSFLRKFVHTFHGQLILSQDFLQMLLENIPEEKRLELSVENIYQDWLESSGIPKPLQRERRAGAECGLARQVRAEVTKWIGVNRRPRKRKRREKEEVFEKLLPDQLVLLLEHLLEQKTLSPRTLQSLQRTYHLQDQDAEVRHRWCELIVKHKFTKAYKSVERFLQEDQAMGVYLYGELMVSEDARQQQLARRCFERTKEQMDRSSAQVVAEMLF

SEQ ID NO: 10778 - protein, 566 aa, Homo sapiens
MDIQLDPARDDLPLMANTSHILVKHYVLDLDVDFESQVIEGTIVLFLEDGNRFKKQNSSIEEACQSESNKACKFGMPEPCHIPVTNARTFSSEMEYNDFAICSKGEKDTSDKDGNHDNQEHASGISSSKYCCDTGNHGSEDFLLVLDCCDLSVLKVEEVDVAAVPGLEKFTRSPELTVVSEEFRNQIVRELVTLPANRWREQLDYYARCSQAPGCGELLFDTDTWSLQIRKTGAQTATDFPHAIRIWYKTKPEGRSVTWTSDQSGRPCVYTVGSPINNRALFPCQEPPVAMSTWQATVRAAASFVVLMSGENSAKPTQLWEECSSWYYYVTMPMPASTFTIAVGCWTEMKMETWSSNDLATERPFSPSEANFRHVGVCSHMEYPCRFQNASATTQEIIPHRVFAPVCLTGACQETLLRLIPPCLSAAHSVLGAHPFSRLDVLIVPANFPSLGMASPHIMFLSQSILTGGNHLCGTRLCHEIAHAWFGLAIGARDWTEEWLSEGFATHLEDVFWATAQQLAPYEAREQQELRACLRWRRLQDEMQCSPEEMQVLRFPHVGGCSGSFS

SEQ ID NO: 10779 - protein, 685 aa, Homo sapiens
MDIQLDPARDDLPLMANTSHILVKHYVLDLDVDFESQVIEGTIVLFLEDGNRFKKQNSSIEEACQSESNKACKFGMPEPCHIPVTNARTFSSEMEYNDFAICSKGEKDTSDKDGNHDNQEHASGISSSKYCCDTGNHGSEDFLLVLDCCDLSVLKVEEVDVAAVPGLEKFTRSPELTVVSEEFRNQIVRELVTLPANRWREQLDYYARCSQAPGCGELLFDTDTWSLQIRKTGAQTATDFPHAIRIWYKTKPEGRSVTWTSDQSGRPCVYTVGSPINNRALFPCQEPPVAMSTWQATVRAAASFVVLMSGENSAKPTQLWEECSSWYYYVTMPMPASTFTIAVGCWTEMKMETWSSNDLATERPFSPSEANFRHVGVCSHMEYPCRFQNASATTQEIIPHRVFAPVCLTGACQETLLRLIPPCLSAAHSVLGAHPFSRLDVLIVPANFPSLGMARPSKDKTGHTSDSGASVIKHGLNPEKIFMQVHYLKGYFLLRFLAKRLGDETYFSFLRKFVHTFHGQLILSQDFLQMLLENIPEEKRLELSVENIYQDWLESSGIPKPLQRERRAGAECGLARQVRAEVTKWIGVNRRPRKRKRREKEEVFEKLLPDQLVLLLEHLLEQKTLSPRTLQSLQRTYHLQDQDAEVRHRWCELIVKHKFTKAYKSVERFLQEDQVGVIFQQMGIL

SEQ ID NO: 10780 - protein, 471 aa, Homo sapiens
MNYDSQQPPLPPLPYAGCRRASGFPALGRGGTVPVGVWGGAGQGREGRSWGEGPRGPGLGRRDLSSADPAVLGATMESRCYGCAVKFTLFKKEYGCKNCGRAFCSGCLSFSAAVPRTGNTQQKVCKQCHEVLTRGSSANASKWSPPQNYKKRVAALEAKQKPSTSQSQGLTRQDQMIAERLARLRQENKPKLVPSQAEIEARLAALKDERQGSIPSTQEMEARLAALQGRVLPSQTPQPAHHTPDTRTQAQQTQDLLTQLAAEVAIDESWKGGGPAASLQNDLNQGGPGSTNSKRQANWSLEEEKSRLLAEAALELREENTRQERILALAKRLAMLRGQDPERVTLQDYRLPDSDDDEDEETAIQRVLQQLTEEASLDEASGFNIPAEQASRPWTQPRGAEPEAQDVDPRPEAEEEELPWCCICNEDATLRCAGCDGDLFCARCFREGHDAFELKEHQTSAYSPPRAGQEH

SEQ ID NO: 10781 - protein, 461 aa, Homo sapiens
MPAVAEALGQEGPPDLSRSAFLATVLTSLSAAFSSMPSSAYSLPFSRSLELDYHTSSCFRGTMVKADCPVPITDLPDSSGKLQYGCKNCGRAFCSGCLSFSAAVPRTGNTQQKVCKQCHEVLTRGSSANASKWSPPQNYKKRVAALEAKQKPSTSQSQGLTRQDQMIAERLARLRQENKPKLVPSQAEIEARLAALKDERQGSIPSTQEMEARLAALQGRVLPSQTPQPAHHTPDTRTQAQQTQDLLTQLAAEVAIDESWKGGGPAASLQNDLNQGGPGSTNSKRQANWSLEEEKSRLLAEAALELREENTRQERILALAKRLAMLRGQDPERVTLQDYRLPDSDDDEDEETAIQRVLQQLTEEASLDEASGFNIPAEQASRPWTQPRGAEPEAQDVDPRPEAEEEELPWCCICNEDATLRCAGCDGDLFCARCFREGHDAFELKEHQTSAYSPPRAGQEH

SEQ ID NO: 10782 - protein, 403 aa, Homo sapiens
MNYDSQQPPLPPLPYAGCRRASGFPALGRGGTVPVGVWGGAGQGREGRSWGEGPRGPGLGRRDLSSADPAVLGATMESRCYGCAVKFTLFKKEYGCKNCGRAFCSGCLSFSAAVPRTGNTQQKVCKQCHEVLTRGSSANASKWSPPQNYKKRVAALEAKQKPSTSQSQGLTRQDQMIAERLARLRQENKPKLVPSQAEIEARLAALKDERQGSIPSTQEMEARLAALQGRVLPSQTPQPAHHTPDTRTQAQQTQDLLTQLAAEVAIDESWKGGGPVTLQDYRLPDSDDDEDEETAIQRVLQQLTEEASLDEASGFNIPAEQASRPWTQPRGAEPEAQDVDPRPEAEEEELPWCCICNEDATLRCAGCDGDLFCARCFREGHDAFELKEHQTSAYSPPRAGQEH

SEQ ID NO: 10783 - protein, 296 aa, Homo sapiens
MIAERLARLRQENKPKLVPSQAEIEARLAALKDERQGSIPSTQEMEARLAALQGRVLPSQTPQPAHHTPDTRTQAQQTQDLLTQLAAEVAIDESWKGGGPAASLQNDLNQGGPGSTNSKRQANWSLEEEKSRLLAEAALELREENTRQERILALAKRLAMLRGQDPERVTLQDYRLPDSDDDEDEETAIQRVLQQLTEEASLDEASGFNIPAEQASRPWTQPRGAEPEAQDVDPRPEAEEEELPWCCICNEDATLRCAGCDGDLFCARCFREGHDAFELKEHQTSAYSPPRAGQEH

SEQ ID NO: 10784 - protein, 1146 aa, Homo sapiens
MKTLRARFKKTELRLSPTDLGSCPPCGPCPIPKPAARGRRQSQDWGKSDERLLQAVENNDAPRVAALIARKGLVPTKLDPEGKSAFHLAAMRGAASCLEVMIAHGSNVMSADGAGYNALHLAAKYGHPQCLKQLLQASCVVDVVDSSGWTALHHAAAGGCLSCSEVLCSFKAHLNPQDRSGATPLIIAAQMCHTDLCRLLLQQGAAANDQDLQGRTALMLACEGASPETVEVLLQGGAQPGITDALGQDAAHYGALAGDKLILHLLQEAAQRPSPPSALTEDDSGEASSQNSMSSHGKQGAPKKRKAPPPPASIPMPDDRDAYEEIVRLRQERGRLLQKIRGLEQHKERRQQESPEASSLHILERQVQELQQLLVERQEEKESLGREVESLQSRLSLLENERENTSYDVTTLQDEEGELPDLPGAEVLLSRQLSPSAQEHLASLQEQVAVLTRQNQELMEKVQILENFEKDETQMEVEALAEVIPLALYDSLRAEFDQLRRQHAEALQALRQQETREVPREEGAACGESEVAGATATKNGPTHMELNGSVAPETKVNGAETIDEEAAGDETMEARTMEAEATGAEATGAEATGAKVTETKPTGAEVREMETTEEEANMETKPTGAQATDTETTGVEAMGVEATKTKAEEAEMQAYGVGAGQAEPPVTGTTNMEATGSRATGMESTGVSATGVENPGVEATVPGISAGPILHPGAAEASEKLQVELETRIRGLEEALRQREREAAAELEAALGKCEAAEAEAGRLRERVREAEGSGASGGGGGDTTQLRAALEQAREDLRDRDSRLRELEAASACLDEARASRLLAEEEARGLRAELAQREEARLEQSRELEVLREQLATARATGEQQRTAAAELGRARDAAEARVAELPAACEEARQGLAELREASEALRQSVVPASEHRRLQEEALELRGRAASLEQEVVATGKEAARLRAELERERVCSVALSEHERIVGTLQANVAQLEGQLEELGRRHEKTSAEVFQVQREALFMKSERHAAEAQLATAEQQLRGLRTEAERARQAQSRAQEALDKAKEKDKKITELSKEVFNLKEALKEQPAALATPEVEALRDQVKDLQQQLQEAARDHSSVVALYRSHLLYAIQGQMDEDVQRILSQILQMQRLQAQGR

SEQ ID NO: 10785 - protein, 1236 aa, Homo sapiens
MQPAACAGEGAGPPAPRPPHPPGDKVRRGRGGAPSLSPQPPAPYLGLPIPSRGGGGWRGGQGGGGGTREGGTGRAGGAGSSGSAQPRPPAAPRGPSRPSGRRLLLEPRAPPAPRAPDAMKQLCLCAAASFASQDWGKSDERLLQAVENNDAPRVAALIARKGLVPTKLDPEGKSAFHLAAMRGAASCLEVMIAHGSNVMSADGAGYNALHLAAKYGHPQCLKQLLQASCVVDVVDSSGWTALHHAAAGGCLSCSEVLCSFKAHLNPQDRSGATPLIIAAQMCHTDLCRLLLQQGAAANDQDLQGRTALMLACEGASPETVEVLLQGGAQPGITDALGQDAAHYGALAGDKLILHLLQEAAQRPSPPSALTEDDSGEASSQNSMSSHGKQGAPKKRKAPPPPASIPMPDDRDAYEEIVRLRQERGRLLQKIRGLEQHKERRQQESPEASSLHILERQVQELQQLLVERQEEKESLGREVESLQSRLSLLENERENTSYDVTTLQDEEGELPDLPGAEVLLSRQLSPSAQEHLASLQEQVAVLTRQNQELMEKVQILENFEKDETQMEVEALAEVIPLALYDSLRAEFDQLRRQHAEALQALRQQETREVPREEGAACGESEVAGATATKNGPTHMELNGSVAPETKVNGAETIDEEAAGDETMEARTMEAEATGAEATGAEATGAKVTETKPTGAEVREMETTEEEANMETKPTGAQATDTETTGVEAMGVEATKTKAEEAEMQAYGVGAGQAEPPVTGTTNMEATGSRATGMESTGVSATGVENPGVEATVPGISAGPILHPGAAEASEKLQVELETRIRGLEEALRQREREAAAELEAALGKCEAAEAEAGRLRERVREAEGSGASGGGGGDTTQLRAALEQAREDLRDRDSRLRELEAASACLDEARASRLLAEEEARGLRAELAQREEARLEQSRELEVLREQLATARATGEQQRTAAAELGRARDAAEARVAELPAACEEARQGLAELREASEALRQSVVPASEHRRLQEEALELRGRAASLEQEVVATGKEAARLRAELERERVCSVALSEHERIVGTLQANVAQLEGQLEELGRRHEKTSAEVFQVQREALFMKSERHAAEAQLATAEQQLRGLRTEAERARQAQSRAQEALDKAKEKDKKITELSKEVFNLKEALKEQPAALATPEVEALRDQVKDLQQQLQEAARDHSSVVALYRSHLLYAIQGQMDEDVQRILSQILQMQRLQAQGR

SEQ ID NO: 10786 - protein, 368 aa, Homo sapiens
MNALLEQKEQQERLREAAALGDIREVQKLVESGVDVNSQNEVNGWTCLHWACKRNHGQVVSYLLKSGADKEILTTKGEMPVQLTSRREIRKIMGVEEEDDDDDDDDNLPQLKKESELPFVPNYLANPAFPFIYTPTAEDSAQMQNGGPSTPPASPPADGSPPLLPPGEPPLLGTFPRDHTSLALVQNGDVSAPSAILRTPESTKPGPVCQPPVSQSRSLFSSVPSKPPMSLEPQNGTYAGPAPAFQPFFFTGAFPFNMQELVLKVRIQNPSLRENDFIEIELDRQELTYQELLRVCCCELGVNPDQVEKIRKLPNTLLRKDKDVARLQDFQELELVLMISENNFLFRNAASTLTERPCYNRRASKLTY

SEQ ID NO: 10787 - protein, 279 aa, Homo sapiens
MFRAPCHRLRARGTRKARAGAWRGCTFPCLGKGMERPAAREPHGPDALRRFQGLLLDRRGRLHGQVLRLREVARRLERLRRRSLVANVAGSSLSATGALAAIVGLSLSPVTLGTSLLVSAVGLGVATAGGAVTITSDLSLIFCNSRELRRVQEIAATCQDQMREILSCLEFFCRWQGCGDRQLLQCGRNASIALYNSVYFIVFFGSRGFLIPRRAEGDTKVSQAVLKAKIQKLAESLESCTGALDELSEQLESRVQLCTKSSRGHDLKISADQRAGLFF

SEQ ID NO: 10788 - protein, 248 aa, Homo sapiens
MGMERPAAREPHGPDALRRFQGLLLDRRGRLHGQVLRLREVARRLERLRRRSLVANVAGSSLSATGALAAIVGLSLSPVTLGTSLLVSAVGLGVATAGGAVTITSDLSLIFCNSRELRRVQEIAATCQDQMREILSCLEFFCRWQGCGDRQLLQCGRNASIALYNSVYFIVFFGSRGFLIPRRAEGDTKVSQAVLKAKIQKLAESLESCTGALDELSEQLESRVQLCTKSSRGHDLKISADQRAGLFF

SEQ ID NO: 10789 - protein, 673 aa, Homo sapiens
MAKPAQGAKYRGSIHDFPGFDPNQDAEALYTAMKGFGSDKEAILDIITSRSNRQRQEVCQSYKSLYGKDLIADLKYELTGKFERLIVGLMRPPAYCDAKEIKDAISGIGTDEKCLIEILASRTNEQMHQLVAAYKDAYERDLEADIIGDTSGHFQKMLVVLLQGTREEDDVVSEDLVQQDVQDLYEAGELKWGTDEAQFIYILGNRSKQHLRLVFDEYLKTTGKPIEASIRGELSGDFEKLMLAVVKCIRSTPEYFAERLFKAMKGLGTRDNTLIRIMVSRSELDMLDIREIFRTKYEKSLYSMIKNDTSGEYKKTLLKLSGGDDDAAGQFFPEAAQVAYQMWELSAVARVELKGTVRPANDFNPDADAKALRKAMKGLGTDEDTIIDIITHRSNVQRQQIRQTFKSHFGRDLMTDLKSEISGDLARLILGLMMPPAHYDAKQLKKAMEGAGTDEKALIEILATRTNAEIRAINEAYKEDYHKSLEDALSSDTSGHFRRILISLATGHREEGGENLDQAREDAQVAAEILEIADTPSGDKTSLETRFMTILCTRSYPHLRRVFQEFIKMTNYDVEHTIKKEMSGDVRDAFVAIVQSVKNKPLFFADKLYKSMKGAGTDEKTLTRIMVSRSEIDLLNIRREFIEKYDKSLHQAIEGDTSGDFLKALLALCGGED

SEQ ID NO: 10790 - protein, 641 aa, Homo sapiens
MKGFGSDKEAILDIITSRSNRQRQEVCQSYKSLYGKDLIADLKYELTGKFERLIVGLMRPPAYCDAKEIKDAISGIGTDEKCLIEILASRTNEQMHQLVAAYKDAYERDLEADIIGDTSGHFQKMLVVLLQGTREEDDVVSEDLVQQDVQDLYEAGELKWGTDEAQFIYILGNRSKQHLRLVFDEYLKTTGKPIEASIRGELSGDFEKLMLAVVKCIRSTPEYFAERLFKAMKGLGTRDNTLIRIMVSRSELDMLDIREIFRTKYEKSLYSMIKNDTSGEYKKTLLKLSGGDDDAAGQFFPEAAQVAYQMWELSAVARVELKGTVRPANDFNPDADAKALRKAMKGLGTDEDTIIDIITHRSNVQRQQIRQTFKSHFGRDLMTDLKSEISGDLARLILGLMMPPAHYDAKQLKKAMEGAGTDEKALIEILATRTNAEIRAINEAYKEDYHKSLEDALSSDTSGHFRRILISLATGHREEGGENLDQAREDAQVAAEILEIADTPSGDKTSLETRFMTILCTRSYPHLRRVFQEFIKMTNYDVEHTIKKEMSGDVRDAFVAIVQSVKNKPLFFADKLYKSMKGAGTDEKTLTRIMVSRSEIDLLNIRREFIEKYDKSLHQAIEGDTSGDFLKALLALCGGED

SEQ ID NO: 10791 - protein, 1050 aa, Homo sapiens
MALYDEDLLKNPFYLALQKCRPDLCSKVAQIHGIVLVPCKGSLSSSIQSTCQFESYILIPVEEHFQTLNGKDVFIQGNRIKLGAGFACLLSVPILFEETFYNEKEESFSILCIAHPLEKRESSEEPLAPSDPFSLKTIEDVREFLGRHSERFDRNIASFHRTFRECERKSLRHHIDSANALYTKCLQQLLRDSHLKMLAKQEAQMNLMKQAVEIYVHHEIYNLIFKYVGTMEASEDAAFNKITRSLQDLQQKDIGVKPEFSFNIPRAKRELAQLNKCTSPQQKLVCLRKVVQLITQSPSQRVNLETMCADDLLSVLLYLLVKTEIPNWMANLSYIKNFRFSSLAKDELGYCLTSFEAAIEYIRQGSLSAKPPESEGFGDRLFLKQRMSLLSQMTSSPTDCLFKHIASGNQKEVERLLSQEDHDKDTVQKMCHPLCFCDDCEKLVSGRLNDPSVVTPFSRDDRGHTPLHVAAVCGQASLIDLLVSKGAMVNATDYHGATPLHLACQKGYQSVTLLLLHYKASAEVQDNNGNTPLHLACTYGHEDCVKALVYYDVESCRLDIGNEKGDTPLHIAARWGYQGVIETLLQNGASTEIQNRLKETPLKCALNSKILSVMEAYHLSFERRQKSSEAPVQSPQRSVDSISQESSTSSFSSMSASSRQEETKKDYREVEKLLRAVADGDLEMVRYLLEWTEEDLEDAEDTVSAADPEFCHPLCQCPKCAPAQKRLAKVPASGLGVNVTSQDGSSPLHVAALHGRADLIPLLLKHGANAGARNADQAVPLHLACQQGHFQVVKCLLDSNAKPNKKDLSGNTPLIYACSGGHHELVALLLQHGASINASNNKGNTALHEAVIEKHVFVVELLLLHGASVQVLNKRQRTAVDCAEQNSKIMELLQVVPSCVASLDDVAETDRKEYVTVKIRKKWNSKLYDLPDEPFTRQFYFVHSAGQFKGKTSREIMARDRSVPNLTEGSLHEPGRQSVTLRQNNLPAQSGSHAAEKGNSDWPERPGLTQTGPGHRRMLRRHTVEDAVVSQGPEAAGPLSTPQEVSASRS

SEQ ID NO: 10792 - protein, 398 aa, Homo sapiens
MEGAALLRVSVLCIWMSALFLGVGVRAEEAGARVQQNVPSGTDTGDPQSKPLGDWAAGTMDPESSIFIEDAIKYFKEKVSTQNLLLLLTDNEAWNGFVAAAELPRNEADELRKALDNLARQMIMKDKNWHDKGQQYRNWFLKEFPRLKSELEDNIRRLRALADGVQKVHKGTTIANVVSGSLSISSGILTLVGMGLAPFTEGGSLVLLEPGMELGITAALTGITSSTMDYGKKWWTQAQAHDLVIKSLDKLKEVREFLGENISNFLSLAGNTYQLTRGIGKDIRALRRARANLQSVPHASASRPRVTEPISAESGEQVERVNEPSILEMSRGVKLTDVAPVSFFLVLDVVYLVYESKHLHEGAKSETAEELKKVAQELEEKLNILNNNYKILQADQEL

SEQ ID NO: 10793 - protein, 414 aa, Homo sapiens
MRFKSHTVELRRPCSDMEGAALLRVSVLCIWMSALFLGVGVRAEEAGARVQQNVPSGTDTGDPQSKPLGDWAAGTMDPESSIFIEDAIKYFKEKVSTQNLLLLLTDNEAWNGFVAAAELPRNEADELRKALDNLARQMIMKDKNWHDKGQQYRNWFLKEFPRLKSELEDNIRRLRALADGVQKVHKGTTIANVVSGSLSISSGILTLVGMGLAPFTEGGSLVLLEPGMELGITAALTGITSSTMDYGKKWWTQAQAHDLVIKSLDKLKEVREFLGENISNFLSLAGNTYQLTRGIGKDIRALRRARANLQSVPHASASRPRVTEPISAESGEQVERVNEPSILEMSRGVKLTDVAPVSFFLVLDVVYLVYESKHLHEGAKSETAEELKKVAQELEEKLNILNNNYKILQADQEL

SEQ ID NO: 10794 - protein, 380 aa, Homo sapiens
MEGAALLRVSVLCIWVQQNVPSGTDTGDPQSKPLGDWAAGTMDPESSIFIEDAIKYFKEKVSTQNLLLLLTDNEAWNGFVAAAELPRNEADELRKALDNLARQMIMKDKNWHDKGQQYRNWFLKEFPRLKSELEDNIRRLRALADGVQKVHKGTTIANVVSGSLSISSGILTLVGMGLAPFTEGGSLVLLEPGMELGITAALTGITSSTMDYGKKWWTQAQAHDLVIKSLDKLKEVREFLGENISNFLSLAGNTYQLTRGIGKDIRALRRARANLQSVPHASASRPRVTEPISAESGEQVERVNEPSILEMSRGVKLTDVAPVSFFLVLDVVYLVYESKHLHEGAKSETAEELKKVAQELEEKLNILNNNYKILQADQEL

SEQ ID NO: 10795 - protein, 126 aa, Homo sapiens
MHLSQLLACALLLTLLSLRPSEAKPGAPPKVPRTPPAEELAEPQAAGGGQKKGDKAPGGGGANLKGDRSRLLRDLRVDTKSRAAWARLLQEHPNARKYKGANKKGLSKGCFGLKLDRIGSMSGLGC

SEQ ID NO: 10796 - protein, 493 aa, Homo sapiens
MRPLCVTCWWLGLLAAMGAVAGQEDGFEGTEEGSPREFIYLNRYKRAGESQDKCTYTFIVPQQRVTGAICVNSKEPEVLLENRVHKQELELLNNELLKQKRQIETLQQLVEVDGGIVSEVKLLRKESRNMNSRVTQLYMQLLHEIIRKRDNALELSQLENRILNQTADMLQLASKYKDLEHKYQHLATLAHNQSEIIAQLEEHCQRVPSARPVPQPPPAAPPRVYQPPTYNRIINQISTNEIQSDQNLKVLPPPLPTMPTLTSLPSSTDKPSGPWRDCLQALEDGHDTSSIYLVKPENTNRLMQVWCDQRHDPGGWTVIQRRLDGSVNFFRNWETYKQGFGNIDGEYWLGLENIYWLTNQGNYKLLVTMEDWSGRKVFAEYASFRLEPESEYYKLRLGRYHGNAGDSFTWHNGKQFTTLDRDHDVYTGNCAHYQKGGWWYNACAHSNLNGVWYRGGHYRSRYQDGVYWAEFRGGSYSLKKVVMMIRPNPNTFH

SEQ ID NO: 10797 - protein, 191 aa, Homo sapiens
MQVWCDQRHDPGGWTVIQRRLDGSVNFFRNWETYKQGFGNIDGEYWLGLENIYWLTNQGNYKLLVTMEDWSGRKVFAEYASFRLEPESEYYKLRLGRYHGNAGDSFTWHNGKQFTTLDRDHDVYTGNCAHYQKGGWWYNACAHSNLNGVWYRGGHYRSRYQDGVYWAEFRGGSYSLKKVVMMIRPNPNTFH

SEQ ID NO: 10798 - protein, 288 aa, Homo sapiens
MDAELAEVRALQAEIAALRRACEDPPAPWEEKSRVQKSFQAIHQFNLEGWKSSKDLKNQLGHLESELSFLSTLTGINIRNHSKQTEDLTSTEMTEKSIRKVLQRHRLSGNCHMVTFQLEFQILEIQNKERLSSAVTDLNIIMEPTECSELSEFVSRAEERKDLFMFFRSLHFFVEWFEYRKRTFKHLKEKYPDAVYLSEGPSSCSMGIRSASRPGFELVIVWRIQIDEDGKVFPKLDLLTKVPQRALELDKNRAIETAPLSFRTLVGLLGIEAALESLIKSLCAEENN

SEQ ID NO: 10799 - protein, 115 aa, Homo sapiens
MEAPSWSVLQRSGDEEKYPDAVYLSEGPSSCSMGIRSASRPGFELVIVWRIQIDEDGKVFPKLDLLTKVPQRALELDKNRAIETAPLSFRTLVGLLGIEAALESLIKSLCAEENN

SEQ ID NO: 10800 - protein, 101 aa, Homo sapiens
MNKLGHNELKECLKTATDSLQTVQPSISQTCTSYGPALGAPLPGRNEVALLTSLPPNYEISEGKPRAISAYVRAGKGNVTRRRKKTHLGNDDGKKEAQEKM

SEQ ID NO: 10801 - protein, 275 aa, Homo sapiens
MTDDKDVLRDVWFGRIPTCFTLYQDEITEREAEPYYLLLPRVSYLTLVTDKVKKHFQKVMRQEDISEIWFEYEGTPLKWHYPIGLLFDLLASSSALPWNITVHFKSFPEKDLLHCPSKDAIEAHFMSCMKEADALKHKSQVINEMQKKDHKQLWMGLQNDRFDQFWAINRKLMEYPAEENGFRYIPFRIYQTTTERPFIQKLFRPVAADGQLHTLGDLLKEVCPSAIDPEDGEKKNQVMIHGIEPMLETPLQWLSEHLSYPDNFLHISIIPQPTD

SEQ ID NO: 10802 - protein, 197 aa, Homo sapiens
MHYPIGLLFDLLASSSALPWNITVHFKSFPEKDLLHCPSKDAIEAHFMSCMKEADALKHKSQVINEMQKKDHKQLWMGLQNDRFDQFWAINRKLMEYPAEENGFRYIPFRIYQTTTERPFIQKLFRPVAADGQLHTLGDLLKEVCPSAIDPEDGEKKNQVMIHGIEPMLETPLQWLSEHLSYPDNFLHISIIPQPTD

SEQ ID NO: 10803 - protein, 290 aa, Homo sapiens
MDIEAYFERIGYKNSRNKLDLETLTDILEHQIRAVPFENLNMHCGQAMELGLEAIFDHIVRRNRGGWCLQVNQLLYWALTTIGFQTTMLGGYFYIPPVNKYSTGMVHLLLQVTIDGRNYIVDAGSGSSSQMWQPLELISGKDQPQVPCIFCLTEERGIWYLDQIRREQYITNKEFLNSHLLPKKKHQKIYLFTLEPRTIEDFESMNTYLQTSPTSSFITTSFCSLQTPEGVYCLVGFILTYRKFNYKDNTDLVEFKTLTEEEVEEVLKNIFKISLGRNLVPKPGDGSLTI

SEQ ID NO: 10804 - protein, 165 aa, Homo sapiens
MRQHRQFMDRTHYLLTFSSSETLLRLLLRIVDRAPKGRTFGDVLQPAKPEYRVGEVAEVIFVGANPKNSVQNQTHQTFLTVEKYEATSTSWQIVCNDASWETRFYWHKGLLGLSNATVEWHIPDTAQPGIYRIRYFGHNRKQDILKPAVILSFEGTSPAFEVVTI

SEQ ID NO: 10805 - protein, 160 aa, Homo sapiens
MVANLSRGPEPPFFKQLIVPLIPSIVDRAPKGRTFGDVLQPAKPEYRVGEVAEVIFVGANPKNSVQNQTHQTFLTVEKYEATSTSWQIVCNDASWETRFYWHKGLLGLSNATVEWHIPDTAQPGIYRIRYFGHNRKQDILKPAVILSFEGTSPAFEVVTI

SEQ ID NO: 10806 - protein, 780 aa, Homo sapiens
MAKRTFSNLETFLIFLLVMMSAITVALLSLLFITSGTIENHKDLGGHFFSTTQSPPATQGSTAAQRSTATQHSTATQSSTATQTSPVPLTPESPLFQNFSGYHIGVGRADCTGQVADINLMGYGKSGQNAQGILTRLYSRAFIMAEPDGSNRTVFVSIDIGMVSQRLRLEVLNRLQSKYGSLYRRDNVILSGTHTHSGPAGYFQYTVFVIASEGFSNQTFQHMVTGILKSIDIAHTNMKPGKIFINKGNVDGVQINRSPYSYLQNPQSERARYSSNTDKEMIVLKMVDLNGDDLGLISWFAIHPVSMNNSNHLVNSDNVGYASYLLEQEKNKGYLPGQGPFVAAFASSNLGDVSPNILGPRCINTGESCDNANSTCPIGGPSMCIAKGPGQDMFDSTQIIGRAMYQRAKELYASASQEVTGPLASAHQWVDMTDVTVWLNSTHASKTCKPALGYSFAAGTIDGVGGLNFTQGKTEGDPFWDTIRDQILGKPSEEIKECHKPKPILLHTGELSKPHPWHPDIVDVQIITLGSLAITAIPGEFTTMSGRRLREAVQAEFASHGMQNMTVVISGLCNVYTHYITTYEEYQAQRYEAASTIYGPHTLSAYIQLFRNLAKAIATDTVANLSRGPEPPFFKQLIVPLIPSIVDRAPKGRTFGDVLQPAKPEYRVGEVAEVIFVGANPKNSVQNQTHQTFLTVEKYEATSTSWQIVCNDASWETRFYWHKGLLGLSNATVEWHIPDTAQPGIYRIRYFGHNRKQDILKPAVILSFEGTSPAFEVVTI

SEQ ID NO: 10807 - protein, 745 aa, Homo sapiens
MAKRTFSNLETFLIFLLVMMSAITVALLSLLFITSGTIENHKDLGGHFFSTTQSPPATQGSTAAQRSTATQHSTATQSSTATQTSPVPLTPESPLFQNFSGYHIGVGRADCTGQVADINLMGYGKSGQNAQGILTRLYSRAFIMAEPDGSNRTVFVSIDIGMVSQRLRLEVLNRLQSKYGSLYRRDNVILSGTHTHSGPAGYFQYTVFVIASEGFSNQTFQHMVTGILKSIDIAHTNMKPGKIFINKGNVDGVQINRSPYSYLQNPQSERARYSSNTDKEMIVLKMVDLNGDDLGLISWFAIHPVSMNNSNHLVNSDNVGYASYLLEQEKNKGYLPGQGPFVAAFASSNLGDVSPNILGPRCINTGESCDNANSTCPIGGPSMCIAKGPGQDMFDSTQIIGRAMYQRAKSKTCKPALGYSFAAGTIDGVGGLNFTQGKTEGDPFWDTIRDQILGKPSEEIKECHKPKPILLHTGELSKPHPWHPDIVDVQIITLGSLAITAIPGEFTTMSGRRLREAVQAEFASHGMQNMTVVISGLCNVYTHYITTYEEYQAQRYEAASTIYGPHTLSAYIQLFRNLAKAIATDTVANLSRGPEPPFFKQLIVPLIPSIVDRAPKGRTFGDVLQPAKPEYRVGEVAEVIFVGANPKNSVQNQTHQTFLTVEKYEATSTSWQIVCNDASWETRFYWHKGLLGLSNATVEWHIPDTAQPGIYRIRYFGHNRKQDILKPAVILSFEGTSPAFEVVTI

SEQ ID NO: 10808 - protein, 140 aa, Homo sapiens
MAEEPQSVLQLPTSIAAGGEGLTDVSPETTTPEPPSSAAVSPGTEEPAGDTKKKIDILLKAVGDTPIMKTKKWAVERTRTIQGLIDFIKKFLKLVASEQLFIYVNQSFAPSPDQEVGTLYECFGSDGKLVLHYCKSQAWG

SEQ ID NO: 10809 - protein, 74 aa, Homo sapiens
MAEEPQSVLQLPTSIAAGGEGLTDVSPETTTPEPPSSAAVSPGTEEPAGDTKKKIYLCESVLCSFPRPRSWNSL

SEQ ID NO: 10810 - protein, 1006 aa, Homo sapiens
MPDQISVSEFVAETHEDYKAPTASSFTTRTAQCRNTVAAIEEALDVDRMVLYKMKKSVKAINSSGLAHVENEEQYTQALEKFGGNCVCRDDPDLGSAFLKFSVFTKELTALFKNLIQNMNNIISFPLDSLLKGDLKGVKGDLKKPFDKAWKDYETKITKIEKEKKEHAKLHGMIRTEISGAEIAEEMEKERRFFQLQMCEYLLKVNEIKIKKGVDLLQNLIKYFHAQCNFFQDGLKAVESLKPSIETLSTDLHTIKQAQDEERRQLIQLRDILKSALQVEQKEDSQIRQSTAYSLHQPQGNKEHGTERNGSLYKKSDGIRKVWQKRKCSVKNGFLTISHGTANRPPAKLNLLTCQVKTNPEEKKCFDLISHDRTYHFQAEDEQECQIWMSVLQNSKEEALNNAFKGDDNTGENNIVQELTKEIISEVQRMTGNDVCCDCGAPDPTWLSTNLGILTCIECSGIHRELGVHYSRMQSLTLDVLGTSELLLAKNIGNAGFNEIMECCLPAEDSVKPNPGSDMNARKDYITAKYIERRYARKKHADNAAKLHSLCEAVKTRDIFGLLQAYADGVDLTEKIPLANGHEPDETALHLAVRSVDRTSLHIVDFLVQNSGNLDKQTGKGSTALHYCCLTDNAECLKLLLRGKASIEIANESGETPLDIAKRLKHEHCEELLTQALSGRFNSHVHVEYEWRLLHEDLDESDDDMDEKLQPSPNRREDRPISFYQLGSNQLQSNAVSLARDAANLAKEKQRAFMPSILQNETYGALLSGSPPPAQPAAPSTTSAPPLPPRNVGKVQTASSANTLWKTNSVSVDGGSRQRSSSDPPAVHPPLPPLRVTSTNPLTPTPPPPVAKTPSVMEALSQPSKPAPPGISQIRPPPLPPQPPSRLPQKKPAPGADKSTPLTNKGQPRGPVDLSATEALGPLSNAMVLQPPAPMPRKSQATKLKPKRVKALYNCVADNPDELTFSEGDVIIVDGEEDQEWWIGHIDGDPGRKGAFPVSFVHFIAD

SEQ ID NO: 10811 - protein, 961 aa, Homo sapiens
MPDQISVSEFVAETHEDYKAPTASSFTTRTAQCRNTVAAIEEALDVDRMVLYKMKKSVKAINSSGLAHVENEEQYTQALEKFGGNCVCRDDPDLGSAFLKFSVFTKELTALFKNLIQNMNNIISFPLDSLLKGDLKGVKGDLKKPFDKAWKDYETKITKIEKEKKEHAKLHGMIRTEISGAEIAEEMEKERRFFQLQMCEYLLKVNEIKIKKGVDLLQNLIKYFHAQCNFFQDGLKAVESLKPSIETLSTDLHTIKQAQDEERRQLIQLRDILKSALQVEQKEDSQIRQSTAYSLHQPQGNKEHGTERNGSLYKKSDGIRKVWQKRKCSVKNGFLTISHGTANRPPAKLNLLTCQVKTNPEEKKCFDLISHDRTYHFQAEDEQECQIWMSVLQNSKEEALNNAFKGDDNTGENNIVQELTKEIISEVQRMTGNDVCCDCGAPDPTWLSTNLGILTCIECSGIHRELGVHYSRMQSLTLDVLGTSELLLAKNIGNAGFNEIMECCLPAEDSVKPNPGSDMNARKDYITAKYIERRYARKKHADNAAKLHSLCEAVKTRDIFGLLQAYADGVDLTEKIPLANGHEPDETALHLAVRSVDRTSLHIVDFLVQNSGNLDKQTGKGSTALHYCCLTDNAECLKLLLRGKASIEIANESGETPLDIAKRLKHEHCEELLTQALSGRFNSHVHVEYEWRLLHEDLDESDDDMDEKLQPSPNRREDRPISFYQLGSNQLQSNAVSLARDAANLAKEKQRAFMPSILQNETYGALLSGSPPPAQPAAPSTTSAPPLPPRNVGKDPLTPTPPPPVAKTPSVMEALSQPSKPAPPGISQIRPPPLPPQPPSRLPQKKPAPGADKSTPLTNKGQPRGPVDLSATEALGPLSNAMVLQPPAPMPRKSQATKLKPKRVKALYNCVADNPDELTFSEGDVIIVDGEEDQEWWIGHIDGDPGRKGAFPVSFVHFIAD

SEQ ID NO: 10812 - protein, 458 aa, Homo sapiens
MEATGTDEVDKLKTKFISAWNNMKYSWVLKTKTYFSRNSPVLLLGKCYHFKYEDEDKTLPAESGCTIEDHVIAGNVEEFRKDFISRIWLTYREEFPQIEGSALTTDCGWGCTLRTGQMLLAQGLILHFLGRAWTWPDALNIENSDSESWTSHTVKKFTASFEASLSGEREFKTPTISLKETIGKYSDDHEMRNEVYHRKIISWFGDSPLALFGLHQLIEYGKKSGKKAGDWYGPAVVAHILRKAVEEARHPDLQGITIYVAQDCTVYNSDVIDKQSASMTSDNADDKAVIILVPVRLGGERTNTDYLEFVKGILSLEYCVGIIGGKPKQSYYFAGFQDDSLIYMDPHYCQSFVDVSIKDFPLETFHCPSPKKMSFRKMDPSCTIGFYCRNVQDFKRASEEITKMLKFSSKEKYPLFTFVNGHSRDYDFTSTTTNEEDLFSEDEKKQLKRFSTEEFVLL

SEQ ID NO: 10813 - protein, 738 aa, Homo sapiens
MKGFKLSCTASNSNRSTPACSPILRKRSRSPTPQNQDGDTMVEKGSDHSSDKSPSTPEQGVQRSCSSQSGRSGGKNSKKSQSWYNVLSPTYKQRNEDFRKLFKQLPDTERLIVDYSCALQRDILLQGRLYLSENWICFYSNIFRWETLLTVRLKDICSMTKEKTARLIPNAIQVCTDSEKHFFTSFGARDRTYMMMFRLWQNALLEKPLCPKELWHFVHQCYGNELGLTSDDEDYVPPDDDFNTMGYCEEIPVEENEVNDSSSKSSIETKPDASPQLPKKSITNSTLTSTGSSEAPVSFDGLPLEEEALEGDGSLEKELAIDNIMGEKIEMIAPVNSPSLDFNDNEDIPTELSDSSDTHDEGEVQAFYEDLSGRQYVNEVFNFSVDKLYDLLFTNSPFQRDFMEQRRFSDIIFHPWKKEENGNQSRVILYTITLTNPLAPKTATVRETQTMYKASQESECYVIDAEVLTHDVPYHDYFYTINRYTLTRVARNKSRLRVSTELRYRKQPWGLVKTFIEKNFWSGLEDYFRHLESELAKTESTYLAEMHRQSPKEKASKTTTVRRRKRPHAHLRVPHLEEVMSPVTTPTDEDVGHRIKHVAGSTQTRHIPEDTPNGFHLQSVSKLLLVISCVICFSLVLLVILNMMLFYKLWMLEYTTQTLTAWQGLRLQERLPQSQTEWAQLLESQQKYHDTELQKWREIIKSSVMLLDQMKDSLINLQNGIRSRDYTSESEEKRNRYH

SEQ ID NO: 10814 - protein, 698 aa, Homo sapiens
MVEKGSDHSSDKSPSTPEQGVQRSCSSQSGRSGGKNSKKSQSWYNVLSPTYKQRNEDFRKLFKQLPDTERLIVDYSCALQRDILLQGRLYLSENWICFYSNIFRWETLLTVRLKDICSMTKEKTARLIPNAIQVCTDSEKHFFTSFGARDRTYMMMFRLWQNALLEKPLCPKELWHFVHQCYGNELGLTSDDEDYVPPDDDFNTMGYCEEIPVEENEVNDSSSKSSIETKPDASPQLPKKSITNSTLTSTGSSEAPVSFDGLPLEEEALEGDGSLEKELAIDNIMGEKIEMIAPVNSPSLDFNDNEDIPTELSDSSDTHDEGEVQAFYEDLSGRQYVNEVFNFSVDKLYDLLFTNSPFQRDFMEQRRFSDIIFHPWKKEENGNQSRVILYTITLTNPLAPKTATVRETQTMYKASQESECYVIDAEVLTHDVPYHDYFYTINRYTLTRVARNKSRLRVSTELRYRKQPWGLVKTFIEKNFWSGLEDYFRHLESELAKTESTYLAEMHRQSPKEKASKTTTVRRRKRPHAHLRVPHLEEVMSPVTTPTDEDVGHRIKHVAGSTQTRHIPEDTPNGFHLQSVSKLLLVISCVICFSLVLLVILNMMLFYKLWMLEYTTQTLTAWQGLRLQERLPQSQTEWAQLLESQQKYHDTELQKWREIIKSSVMLLDQMKDSLINLQNGIRSRDYTSESEEKRNRYH

SEQ ID NO: 10815 - protein, 425 aa, Homo sapiens
MPTSSAVLLRVLSIPLLTVLILARDLSALGGCPWGPLPLRCHCLLPDPLFCAGEVQAFYEDLSGRQYVNEVFNFSVDKLYDLLFTNSPFQRDFMEQRRFSDIIFHPWKKEENGNQSRVILYTITLTNPLAPKTATVRETQTMYKASQESECYVIDAEVLTHDVPYHDYFYTINRYTLTRVARNKSRLRVSTELRYRKQPWGLVKTFIEKNFWSGLEDYFRHLESELAKTESTYLAEMHRQSPKEKASKTTTVRRRKRPHAHLRVPHLEEVMSPVTTPTDEDVGHRIKHVAGSTQTRHIPEDTPNGFHLQSVSKLLLVISCVLVLLVILNMMLFYKLWMLEYTTQTLTAWQGLRLQERLPQSQTEWAQLLESQQKYHDTELQKWREIIKSSVMLLDQMKDSLINLQNGIRSRDYTSESEEKRNRYH

SEQ ID NO: 10816 - protein, 745 aa, Homo sapiens
MKGFKLSCTASNSNRSTPACSPILRKRSRSPTPQNQDGDTMVEKGSDHSSDKSPSTPEQGVQRSCSSQSGRSGGKNSKSHKRLSKKSQSWYNVLSPTYKQRNEDFRKLFKQLPDTERLIVDYSCALQRDILLQGRLYLSENWICFYSNIFRWETLLTVRLKDICSMTKEKTARLIPNAIQVCTDSEKHFFTSFGARDRTYMMMFRLWQNALLEKPLCPKELWHFVHQCYGNELGLTSDDEDYVPPDDDFNTMGYCEEIPVEENEVNDSSSKSSIETKPDASPQLPKKSITNSTLTSTGSSEAPVSFDGLPLEEEALEGDGSLEKELAIDNIMGEKIEMIAPVNSPSLDFNDNEDIPTELSDSSDTHDEGEVQAFYEDLSGRQYVNEVFNFSVDKLYDLLFTNSPFQRDFMEQRRFSDIIFHPWKKEENGNQSRVILYTITLTNPLAPKTATVRETQTMYKASQESECYVIDAEVLTHDVPYHDYFYTINRYTLTRVARNKSRLRVSTELRYRKQPWGLVKTFIEKNFWSGLEDYFRHLESELAKTESTYLAEMHRQSPKEKASKTTTVRRRKRPHAHLRVPHLEEVMSPVTTPTDEDVGHRIKHVAGSTQTRHIPEDTPNGFHLQSVSKLLLVISCVICFSLVLLVILNMMLFYKLWMLEYTTQTLTAWQGLRLQERLPQSQTEWAQLLESQQKYHDTELQKWREIIKSSVMLLDQMKDSLINLQNGIRSRDYTSESEEKRNRYH

SEQ ID NO: 10817 - protein, 1435 aa, Homo sapiens
MREKGRRKKGRTWAEAAKTVLEKYPNTPMSHKEILQVIQREGLKEIRSGTSPLACLNAMLHTNSRGEEGIFYKVPGRMGVYTLKKDVPDGVKELSEGSEESSDGQSDSQSSENSSSSSDGGSNKEGKKSRWKRKVSSSSPQSGCPSPTIPAGKVISPSQKHSKKALKQALKQQQQKKQQQQCRPSISISSNQHLSLKTVKAASDSVPAKPATWEGKQSDGQTGSPQNSNSSFSSSVKVENTLLGLGKKSFQRSERLHTRQMKRTKCADIDVETPDSILVNTNLRALINKHTFSVLPGDCQQRLLLLLPEVDRQVGPDGLMKLNGSALNNEFFTSAAQGWKERLSEGEFTPEMQVRIRQEIEKEKKVEPWKEQFFESYYGQSSGLSLEDSKKLTASPSDPKVKKTPAEQPKSMPVSEASLIRIVPVVSQSECKEEALQMSSPGRKEECESQGEVQPNFSTSSEPLLSSALNTHELSSILPIKCPKDEDLLEQKPVTSAEQESEKNHLTTASNYNKSESQESLVTSPSKPKSPGVEKPIVKPTAGAGPQETNMKEPLATLVDQSPESLKRKSSLTQEEAPVSWEKRPRVTENRQHQQPFQVSPQPFLNRGDRIQVRKVPPLKIPVSRISPMPFHPSQVSPRARFPVSITSPNRTGARTLADIKAKAQLVKAQRAAAAAAAAAAAAASVGGTIPGPGPGGGQGPGEGGEGQTARGGSPGSDRVSETGKGPTLELAGTGSRGGTRELLPCGPETQPQSETKTTPSQAQPHSVSGAQLQQTPPVPPTPAVSGACTSVPSPAHIEKLDNEKLNPTRATATVASVSHPQGPSSCRQEKAPSPTGPALISGASPVHCAADGTVELKAGPSKNIPNPSASSKTDASVPVAVTPSPLTSLLTTATLEKLPVPQVSATTAPAGSAPPSSTLPAASSLKTPGTSLNMNGPTLRPTSSIPANNPLVTQLLQGKDVPMEQILPKPLTKVEMKTVPLTAKEERGMGALIATNTTENSTREEVNERQSHPATQQQLGKTLQSKQLPQVPRPLQLFSAKELRDSSIDTHQYHEGLSKATQDQILQTLIQRVRRQNLLSVVPPSQFNFAHSGFQLEDISTSQRFMLGFAGRRTSKPAMAGHYLLNISTYGRGSESFRRTHSVNPEDRFCLSSPTEALKMGYTDCKNATGESSSSKEDDTDEESTGDEQESVTVKEEPQVSQSAGKGDTSSGPHSRETLSTSDCLASKNVKAEIPLNEQTTLSKENYLFTRGQTFDEKTLARDLIQAAQKQMAHAVRGKAIRSSPELFSSTVLPLPADSPTHQPLLLPPLQTPKLYGSPTQIGPSYRGMINVSTSSDMDHNSAVPGSQVSSNVGDVMSFSVTVTTIPASQAMNPSSHGQTIPVQAFSEENSIEGTPSKCYCRLKAMIMCKGCGAFCHDDCIGPSKLCVSCLVVR

SEQ ID NO: 10818 - protein, 918 aa, Homo sapiens
MKRTKCADIDVETPDSILVNTNLRALINKHTFSVLPGDCQQRLLLLLPEVDRQVGPDGLMKLNGSALNNEFFTSAAQGWKERLSEGEFTPEMQVRIRQEIEKEKKVEPWKEQFFESYYGQSSGLSLEDSKKLTASPSDPKVKKTPAEQPKSMPVSEASLIRIVPVVSQSECKEEALQMSSPGRKEECESQGEVQPNFSTSSEPLLSSALNTHELSSILPIKCPKDEDLLEQKPVTSAEQESEKNHLTTASNYNKSESQESLVTSPSKPKSPGVEKPIVKPTAGAGPQETNMKEPLATLVDQSPESLKRKSSLTQEEAPVSWEKRPRVTENRQHQQPFQVSPQPFLNRGDRIQVRKVPPLKIPVSRISPMPFHPSQVSPRARFPVSITSPNRTGARTLADIKAKAQLVKAQRAAAAAAAAAAAAASVGGTIPGPGPGGGQGPGEGGEGQTARGGSPGSDRVSETGKGPTLELAGTGSRGGTRELLPCGPETQPQSETKTTPSQAQPHSVSGAQLQQTPPVPPTPAVSGACTSVPSPAHIEKLDNEKLNPTRATATVASVSHPQGPSSCRQEKAPSPTGFQLEDISTSQRFMLGFAGRRTSKPAMAGHYLLNISTYGRGSESFRRTHSVNPEDRFCLSSPTEALKMGYTDCKNATGESSSSKEDDTDEESTGDEQESVTVKEEPQVSQSAGKGDTSSGPHSRETLSTSDCLASKNVKAEIPLNEQTTLSKENYLFTRGQTFDEKTLARDLIQAAQKQMAHAVRGKAIRSSPELFSSTVLPLPADSPTHQPLLLPPLQTPKLYGSPTQIGPSYRGMINVSTSSDMDHNSAVPGSQVSSNVGDVMSFSVTVTTIPASQAMNPSSHGQTIPVQAFSEENSIEGTPSKCYCRLKAMIMCKGCGAFCHDDCIGPSKLCVSCLVVR

SEQ ID NO: 10819 - protein, 309 aa, Homo sapiens
MNLMDITKIFSLLQPDKEEEDTDTEEKQALNQAVYDNDSYTLDQLLRQERYKRFINSRSGWGVPGTPLRLAASYGHLSCLQVLLAHGADVDSLDVKAQTPLFTAVSHGHLDCVRVLLEAGASPGGSIYNNCSPVLTAARDGAVAILQELLDHGAEANVKAKLPVWASNIASCSGPLYLAAVYGHLDCFRLLLLHGADPDYNCTDQGLLARVPRPRTLLEICLHHNCEPEYIQLLIDFGANIYLPSLSLDLTSQDDKGIALLLQARATPRSLLSQVRLVVRRALCQAGQPQAINQLDIPPMLISYLKHQL

SEQ ID NO: 10820 - protein, 318 aa, Homo sapiens
MRIVLQLAKMNLMDITKIFSLLQPDKEEEDTDTEEKQALNQAVYDNDSYTLDQLLRQERYKRFINSRSGWGVPGTPLRLAASYGHLSCLQVLLAHGADVDSLDVKAQTPLFTAVSHGHLDCVRVLLEAGASPGGSIYNNCSPVLTAARDGAVAILQELLDHGAEANVKAKLPVWASNIASCSGPLYLAAVYGHLDCFRLLLLHGADPDYNCTDQGLLARVPRPRTLLEICLHHNCEPEYIQLLIDFGANIYLPSLSLDLTSQDDKGIALLLQARATPRSLLSQVRLVVRRALCQAGQPQAINQLDIPPMLISYLKHQL

SEQ ID NO: 10821 - protein, 1499 aa, Homo sapiens
MEREPAGTEEPGPPGRRRRREGRTRTVRSNLLPPPGAEDPAAGAAKGERRRRRGCAQHLADNRLKTTKYTLLSFLPKNLFEQFHRPANVYFVFIALLNFVPAVNAFQPGLALAPVLFILAITAFRDLWEDYSRHRSDHKINHLGCLVFSREEKKYVNRFWKEIHVGDFVRLRCNEIFPADILLLSSSDPDGLCHIETANLDGETNLKRRQVVRGFSELVSEFNPLTFTSVIECEKPNNDLSRFRGCIIHDNGKKAGLYKENLLLRGCTLRNTDAVVGIVIYAGHETKALLNNSGPRYKRSKLERQMNCDVLWCVLLLVCMSLFSAVGHGLWIWRYQEKKSLFYVPKSDGSSLSPVTAAVYSFLTMIIVLQVLIPISLYVSIEIVKACQVYFINQDMQLYDEETDSQLQCRALNITEDLGQIQYIFSDKTGTLTENKMVFRRCTVSGVEYSHDANAQRLARYQEADSEEEEVVPRGGSVSQRGSIGSHQSVRVVHRTQSTKSHRRTGSRAEAKRASMLSKHTAFSSPMEKDITPDPKLLEKVSECDKSLAVARHQEHLLAHLSPELSDVFDFFIALTICNTVVVTSPDQPRTKVRVRFELKSPVKTIEDFLRRFTPSCLTSGCSSIGSLAANKSSHKLGSSFPSTPSSDGMLLRLEERLGQPTSAIASNGYSSQADNWASELAQEQESERELRYEAESPDEAALVYAARAYNCVLVERLHDQVSVELPHLGRLTFELLHTLGFDSVRKRMSVVIRHPLTDEINVYTKGADSVVMDLLQPCSSVDARGRHQKKIRSKTQNYLNVYAAEGLRTLCIAKRVLSKEEYACWLQSHLEAESSLENSEELLFQSAIRLETNLHLLGATGIEDRLQDGVPETISKLRQAGLQIWVLTGDKQETAVNIAYACKLLDHDEEVITLNATSQEACAALLDQCLCYVQSRGLQRAPEKTKGKVSMRFSSLCPPSTSTASGRRPSLVIDGRSLAYALEKNLEDKFLFLAKQCRSVLCCRSTPLQKSMVVKLVRSKLKAMTLAIGDGANDVSMIQVADVGVGISGQEGMQAVMASDFAVPKFRYLERLLILHGHWCYSRLANMVLYFFYKNTMFVGLLFWFQFFCGFSASTMIDQWYLIFFNLLFSSLPPLVTGVLDRDVPANVLLTNPQLYKSGQNMEEYRPRTFWFNMADAAFQSLVCFSIPYLAYYDSNVDLFTWGTPIVTIALLTFLLHLGIETKTWTWLNWITCGFSVLLFFTVALIYNASCATCYPPSNPYWTMQALLGDPVFYLTCLMTPVAALLPRLFFRSLQGRVFPTQLQLARQLTRKSPRRCSAPKETFAQGRLPKDSGTEHSSGRTVKTSVPLSQPSWHTQQPVCSLEASGEPSTVDMSMPVREHTLLEGLSAPAPMSSAPGEAVLRSPGGCPEESKVRAASTGRVTPLSSLFSLPTFSLLNWISSWSLVSRLGSVLQFSRTEQLADGQAGRGLPVQPHSGRSGLQGPDHRLLIGASSRRSQ

SEQ ID NO: 10822 - protein, 155 aa, Homo sapiens
MEREPAGTEEPGPPGRRRRREGRTRTVRSNLLPPPGAEDPAAGAAKGERRRRRGCAQHLADNRLKTTKYTLLSFLPKNLFEQFHRPANVYFVFIALLNFVPAVNAFQPGLALAPVLFILAITAFRDLWEDYSRHRSDHKINHLGCLVFSSRSHLK

SEQ ID NO: 10823 - protein, 421 aa, Homo sapiens
MPFLHGFRRIIFEYQPLVDAILGSLGIQDPERQESLDRPSYVASEESRILVLTELLERKAHSPFYQEGVSNALLKMAELGLTRAADVLLRHGANLNFEDPVTYYTALHIAVLRNQPDMVELLVHHGADVNRRDRIHESSPLDLASEEPERLPCLQRLLDLGADVNAADKHGKTALLHALASSDGVQIHNTENIRLLLEGGADVKATTKDGDTVFTCIIFLLGETVGGDKEEAQMINRFCFQVTRLLLAHGADPSECPAHESLTHICLKSFKLHFPLLRFLLESGAAYNCSLHGASCWSGFHIIFERLCSHPGCTEDESHADLLRKAETVLDLMVTNSQKLQLPENFDIHPVGSLAEKIQALHFSLRQLESYPPPLKHLCRVAIRLYLQPWPVDVKVKALPLPDRLKWYLLSEHSGSVEDDI

SEQ ID NO: 10824 - protein, 197 aa, Homo sapiens
MPFLHGFRRIIFEYQPLVDAILGSLGIQDPERQESLDRPSYVASEESRILVLTELLERKAHSPFYQEGVSNALLKMAELGLTRAADVLLRHGANLNFEDPVTYYTALHIAVLRNQPDMVELLVHHGADVNRRDREKLLCSMLWPAATGCRSTILRTFVSYWKEGQTSRPPPKMGTQCSPASSSCLVRPWEGTKRRPR

SEQ ID NO: 10825 - protein, 518 aa, Homo sapiens
MDFTEAYADTCSTVGLAAREGNVKVLRKLLKKGRSVDVADNRGWMPIHEAAYHNSVECLQMLINADSSENYIKMKTFEGFCALHLAASQGHWKIVQILLEAGADPNATTLEETTPLFLAVENGQIDVLRLLLQHGANVNGSHSMCGWNSLHQASFQENAEIIKLLLRKGANKECQDDFGITPLFVAAQYGKLESLSILISSGANVNCQALDKATPLFIAAQEGHTKCVELLLSSGADPDLYCNEDSWQLPIHAAAQMGHTKILDLLIPLTNRACDTGLNKVSPVYSAVFGGHEDCLEILLRNGYSPDAQACLVFGFSSPVCMAFQKDCEFFGIVNILLKYGAQINELHLAYCLKYEKFSIFRYFLRKGCSLGPWNHIYEFVNHAIKAQAKYKEWLPHLLVAGFDPLILLCNSWIDSVSIDTLIFTLEFTNWKTLAPAVERMLSARASNAWILQQHIATVPSLTHLCRLEIRSSLKSERLRSDSYISQLPLPRSLHNYLLYEDVLRMYEVPELAAIQDG

SEQ ID NO: 10826 - protein, 445 aa, Homo sapiens
MKTFEGFCALHLAASQGHWKIVQILLEAGADPNATTLEETTPLFLAVENGQIDVLRLLLQHGANVNGSHSMCGWNSLHQASFQENAEIIKLLLRKGANKECQDDFGITPLFVAAQYGKLESLSILISSGANVNCQALDKATPLFIAAQEGHTKCVELLLSSGADPDLYCNEDSWQLPIHAAAQMGHTKILDLLIPLTNRACDTGLNKVSPVYSAVFGGHEDCLEILLRNGYSPDAQACLVFGFSSPVCMAFQKDCEFFGIVNILLKYGAQINELHLAYCLKYEKFSIFRYFLRKGCSLGPWNHIYEFVNHAIKAQAKYKEWLPHLLVAGFDPLILLCNSWIDSVSIDTLIFTLEFTNWKTLAPAVERMLSARASNAWILQQHIATVPSLTHLCRLEIRSSLKSERLRSDSYISQLPLPRSLHNYLLYEDVLRMYEVPELAAIQDG

SEQ ID NO: 10827 - protein, 556 aa, Homo sapiens
MAMMPLVLHHPERQAELGSGLRDGGGAALRPPGRLVKQMDFTEAYADTCSTVGLAAREGNVKVLRKLLKKGRSVDVADNRGWMPIHEAAYHNSVECLQMLINADSSENYIKMKTFEGFCALHLAASQGHWKIVQILLEAGADPNATTLEETTPLFLAVENGQIDVLRLLLQHGANVNGSHSMCGWNSLHQASFQENAEIIKLLLRKGANKECQDDFGITPLFVAAQYGKLESLSILISSGANVNCQALDKATPLFIAAQEGHTKCVELLLSSGADPDLYCNEDSWQLPIHAAAQMGHTKILDLLIPLTNRACDTGLNKVSPVYSAVFGGHEDCLEILLRNGYSPDAQACLVFGFSSPVCMAFQKDCEFFGIVNILLKYGAQINELHLAYCLKYEKFSIFRYFLRKGCSLGPWNHIYEFVNHAIKAQAKYKEWLPHLLVAGFDPLILLCNSWIDSVSIDTLIFTLEFTNWKTLAPAVERMLSARASNAWILQQHIATVPSLTHLCRLEIRSSLKSERLRSDSYISQLPLPRSLHNYLLYEDVLRMYEVPELAAIQDG

SEQ ID NO: 10828 - protein, 371 aa, Homo sapiens
MGTTEATLRMENVDVKEEWQDEDLPRPLPEETGVELLGSPVEDTSSPPNTLNFNGAHRKRKTLVAPEINISLDQSEGSLLSDDFLDTPDDLDINVDDIETPDETDSLEFLGNGNELEWEDDTPVATAKNMPGDSADLFGDGTTEDGSAANGRLWRTVIIGEQEHRIDLHMIRPYMKVVTHGGYYGEGLNAIIVFAACFLPDSSLPDYHYIMENLFLYVISSLELLVAEDYMIVYLNGATPRRRMPGIGWLKKCYQMIDRRLRKNLKSLIIVHPSWFIRTVLAISRPFISVKFINKIQYVHSLEDLEQLIPMEHVQIPDCVLQYEEERLKARRESARPQPEFVLPRSEEKPEVAPVENRSALVSEDQETSMS

SEQ ID NO: 10829 - protein, 377 aa, Homo sapiens
MGTTEATLRMENVDVKEEWQDEDLPRPLPEETGVELLGSPVEDTSSPPNTLNFNGAHRKRKTLVAPEINISLDQSEGSLLSDDFLDTPDDLDINVDDIETPDETDSLEFLGNGNELEWEDDTPVATAKNMPGDSADLFGDGTTEDGSAANGRLWRTVIIGEQEHRIDLHMIRPYMKVVTHGGYYGEGLNAIIVFAACFLPDSSLPDYHYIMENLFLYVISSLELLVAEDYMIVYLNGATPRRRMPGIGWLKKCYQMIDRRLRKNLKSLIIVHPSWFIRTVLAISRPFISVKFINKIQYVHSLEDLEQLIPMEHVQIPDCVLQYEEERLKARRESARPQPEFVLPRSEEKPEVAPVENRSALVSEDQETSLQPLHRSS

SEQ ID NO: 10830 - protein, 1218 aa, Homo sapiens
MEENSKKDHRALLNQGEEDELEVFGYRDHNVRKAFCLVASVLTCGGLLLVFYWRPQWRVWANCIPCPLQEADTVLLRTTDEFQRYMRKKVFCLYLSTLKFPVSKKWEESLVADRHSVINQALIKPELKLRCMEVQKIRYVWNDLEKRFQKVGLLEDSNSCSDIHQTFGLGLTSEEQEVRRLVCGPNAIEVEIQPIWKLLVKQVLNPFYVFQAFTLTLWLSQGYIEYSVAIIILTVISIVLSVYDLRQQSVKLHNLVEDHNKVQVTIIVKDKGLEELESRLLVPGDILILPGKFSLPCDAVLIDGSCVVNEGMLTGESIPVTKTPLPQMENTMPWKCHSLEDYRKHVLFCGTEVIQVKPSGQGPVRAVVLQTGYNTAKGDLVRSILYPRPLNFKLYSDAFKFIVFLACLGVMGFFYALGVYMYHGVPPKDTVTMALILLTVTVPPVLPAALTIGNVYAQKRLKKKKIFCISPQRINMCGQINLVCFDKTGTLTEDGLDLWGTVPTADNCFQEAHSFASGQAVPWSPLCAAMASCHSLILLNGTIQGDPLDLKMFEGTAWKMEDCIVDSCKFGTSVSNIIKPGPKASKSPVEAIITLCQFPFSSSLQRMSVIAQLAGENHFHVYMKGAPEMVARFCRSETVPKNFPQELRSYTVQGFRVIALAHKTLKMGNLSEVEHLAREKVESELTFLGLLIMENRLKKETKLVLKELSEARIRTVMITGDNLQTAITVAKNSEMIPPGSQVIIVEADEPEEFVPASVTWQLVENQETGPGKKEIYMHTGNSSTPRGEGGSCYHFAMSGKSYQVIFQHFNSLLPKILVNGTVFARMSPGQKSSLIEEFQKLNYYVGMCGDGANDCGALKAAHAGISLSEQEASVASPFTSKTTNIQCVPHLIREGRAALVSSFGVFKYLTMYGIIQFISALLLYWQLQLFGNYQYLMQDVAITLMVCLTMSSTHAYPKLAPYRPAGQLLSPPLLLSIFLNSCFSCIVQISAFLYVKQQPWYCEVYQYSECFLANQSNFSTNVSLERNWTGNATLIPGSILSFETTTLWPITTINYITVAFIFSKGKPFRKPIYTNYIFSFLLLAALGLTIFILFSDFQVIYRGMELIPTITSWRVLILVVALTQFCVAFFVEDSILQNHELWLLIKREFGFYSKSQYRTWQKKLAEDSTWPPINRTDYSGDGKNGFYINGGYESHEQIPKRKLKLGGQPTEQHFWARL

SEQ ID NO: 10831 - protein, 757 aa, Homo sapiens
MPALPLDQLQITHKDPKTGKLRTSPALHPEQKADRYFVLYKPPPKDNIPALVEEYLERATFVANDLDWLLALPHDKFWCQVIFDETLQKCLDSYLRYVPRKFDEGVASAPEVVDMQKRLHRSVFLTFLRMSTHKESKDHFISPSAFGEILYNNFLFDIPKILDLCVLFGKGNSPLLQKMIGNIFTQQPSYYSDLDETLPTILQVFSNILQHCGLQGDGANTTPQKLEERGRLTPSDMPLLELKDIVLYLCDTCTTLWAFLDIFPLACQTFQKHDFCYRLASFYEAAIPEMESAIKKRRLEDSKLLGDLWQRLSHSRKKLMEIFHIILNQICLLPILESSCDNIQGFIEEFLQIFSSLLQEKRFLRDYDALFPVAEDISLLQQASSVLDETRTAYILQAVESAWEGVDRRKATDAKDPSVIEEPNGEPNGVTVTAEAVSQASSHPENSEEEECMGAAAAVGPAMCGVELDSLISQVKDLLPDLGEGFILACLEYYHYDPEQVINNILEERLAPTLSQLDRNLDREMKPDPTPLLTSRHNVFQNDEFDVFSRDSVDLSRVHKGKSTRKEENTRSLLNDKRAVAAQRQRYEQYSVVVEEVPLQPGESLPYHSVYYEDEYDDTYDGNQVGANDADSDDELISRRPFTIPQVLRTKVPREGQEEDDDDEEDDADEEAPKPDHFVQDPAVLREKAEARRMAFLAKKGYRHDSSTAVAGSPRGHGQSRETTQERRKKEANKATRANHNRRTMADRKRSKGMIPS

SEQ ID NO: 10832 - protein, 370 aa, Homo sapiens
MQKRLHRSVFLTFLRMSTHKESKDHFISPSAFGEILYNNFLFDIPKILDLCVLFGKGNSPLLQKMIGNIFTQQPSYYSDLDETLPTILQVFSNILQHCGLQGDGANTTPQKLEERGRLTPSDMPLLELKDIVLYLCDTCTTLWAFLDIFPLACQTFQKHDFCYRLASFYEAAIPEMESAIKKRRLEDSKLLGDLWQRLSHSRKKLMEIFHIILNQICLLPILESSCDNIQGFIEEFLQIFSSLLQEKRFLRDYDALFPVAEDISLLQQASSVLDETRTAYILQAVESAWEGVDRRKATDAKDPSVIEEPNGEPNGVTVTAEAVSQASSHPENSEEEECMGAAAAVGPAMCGVELDSLISQVKDLLPDLEK

SEQ ID NO: 10833 - protein, 681 aa, Homo sapiens
MPALPLDQLQITHKDPKTGKLRTSPALVIFDETLQKCLDSYLRYVPRKFDEGVASAPEVVDMQKRLHRSVFLTFLRMSTHKESKILDLCVLFGKGNSPLLQKMIGNIFTQQPSYYSDLDETLPTILQVFSNILQHCGLQGDGANTTPQKLEERGRLTPSDMPLLELKDIVLYLCDTCTTLWAFLDIFPLACQTFQKHDFCYRLASFYEAAIPEMESAIKKRRLEDSKLLGDLWQRLSHSRKKLMEIFHIILNQICLLPILESSCDNIQGFIEEFLQIFSSLLQEKRFLRDYDALFPVAEDISLLQQASSVLDETRTAYILQAVESAWEGVDRRKATDAKDPSVIEEPNGEPNGVTVTAEAVSQASSHPENSEEEECMGAAAAVGPAMCGVELDSLISQVKDLLPDLGEGFILACLEYYHYDPEQVINNILEERLAPTLSQLDRNLDREMKPDPTPLLTSRHNVFQNDEFDVFSRDSVDLSRVHKGKSTRKEENTRSLLNDKRAVAAQRQRYEQYSVVVEEVPLQPGESLPYHSVYYEDEYDDTYDGNQVGANDADSDDELISRRPFTIPQVLRTKVPREGQEEDDDDEEDDADEEAPKPDHFVQDPAVLREKAEARRMAFLAKKGYRHDSSTAVAGSPRGHGQSRETTQERRKKEANKATRANHNRRTMADRKRSKGMIPS

SEQ ID NO: 10834 - protein, 1226 aa, Homo sapiens
MDREERKTINQGQEDEMEIYGYNLSRWKLAIVSLGVICSGGFLLLLLYWMPEWRVKATCVRAAIKDCEVVLLRTTDEFKMWFCAKIRVLSLETYPVSSPKSMSNKLSNGHAVCLIENPTEENRHRISKYSQTESQQIRYFTHHSVKYFWNDTIHNFDFLKGLDEGVSCTSIYEKHSAGLTKGMHAYRKLLYGVNEIAVKVPSVFKLLIKEVLNPFYIFQLFSVILWSTDEYYYYALAIVVMSIVSIVSSLYSIRKQYVMLHDMVATHSTVRVSVCRVNEEIEEIFSTDLVPGDVMVIPLNGTIMPCDAVLINGTCIVNESMLTGESVPVTKTNLPNPSVDVKGIGDELYNPETHKRHTLFCGTTVIQTRFYTGELVKAIVVRTGFSTSKGQLVRSILYPKPTDFKLYRDAYLFLLCLVAVAGIGFIYTIINSILNEVQVGVIIIESLDIITITVPPALPAAMTAGIVYAQRRLKKIGIFCISPQRINICGQLNLVCFDKTGTLTEDGLDLWGIQRVENARFLSPEENVCNEMLVKSQFVACMATCHSLTKIEGVLSGDPLDLKMFEAIGWILEEATEEETALHNRIMPTVVRPPKQLLPESTPAGNQEMELFELPATYEIGIVRQFPFSSALQRMSVVARVLGDRKMDAYMKGAPEAIAGLCKPETVPVDFQNVLEDFTKQGFRVIALAHRKLESKLTWHKVQNISRDAIENNMDFMGLIIMQNKLKQETPAVLEDLHKANIRTVMVTGDSMLTAVSVARDCGMILPQDKVIIAEALPPKDGKVAKINWHYADSLTQCSHPSAIDPEAIPVKLVHDSLEDLQMTRYHFAMNGKSFSVILEHFQDLVPKLMLHGTVFARMAPDQKTQLIEALQNVDYFVGMCGDGANDCGALKRAHGGISLSELEASVASPFTSKTPSISCVPNLIREGRAALITSFCVFKFMALYSIIQYFSVTLLYSILSNLGDFQFLFIDLAIILVVVFTMSLNPAWKELVAQRPPSGLISGALLFSVLSQIIICIGFQSLGFFWVKQQPWYEVWHPKSDACNTTGSGFWNSSHVDNETELDEHNIQNYENTTVFFISSFQYLIVAIAFSKGKPFRQPCYKNYFFVFSVIFLYIFILFIMLYPVASVDQVLQIVCVPYQWRVTMLIIVLVNAFVSITVEESVDRWGKCCLPWALGCRKKTPKAKYMYLAQELLVDPEWPPKPQTTTEAKALVKENGSCQIITIT

SEQ ID NO: 10835 - protein, 701 aa, Homo sapiens
MSEIEEIFSTDLVPGDVMVIPLNGTIMPCDAVLINGTCIVNESMLTGESVPVTKTNLPNPSVDVKGIGDELYNPETHKRHTLFCGTTVIQTRFYTGELVKAIVVRTGFSTSKGQLVRSILYPKPTDFKLYRDAYLFLLCLVAVAGIGFIYTIINSILNEVQVGVIIIESLDIITITVPPALPAAMTAGIVYAQRRLKKIGIFCISPQRINICGQLNLVCFDKTGTLTEDGLDLWGIQRVENARFLSPEENVCNEMLVKSQFVACMATCHSLTKIEGVLSGDPLDLKMFEAIGWILEEATEEETALHNRIMPTVVRPPKQLLPESTPAGNQEMELFELPATYEIGIVRQFPFSSALQRMSVVARVLGDRKMDAYMKGAPEAIAGLCKPETVPVDFQNVLEDFTKQGFRVIALAHRKLESKLTWHKVQNISRDAIENNMDFMGLIIMQNKLKQETPAVLEDLHKANIRTVMVTGDSMLTAVSVARDCGMILPQDKVIIAEALPPKDGKVAKINWHYADSLTQCSHPSAIDPEAIPVKLVHDSLEDLQMTRYHFAMNGKSFSVILEHFQDLVPKLMLHGTVFARMAPDQKTQLIEALQNVDYFVGMCGDGANDCGALKRAHGGISLSELEASVASPFTSKTPSISCVPNLIREGRAALITSSCELALFSIVTYSLDHFIISILISSMLVLFFSDFHNCAFYSLV

SEQ ID NO: 10836 - protein, 835 aa, Homo sapiens
MKRRTDPECTAPIKKQKKRVAELALSLSSTSDDEPPSSVSHGAKASTTSLSGSDSETEGKQHSSDSFDDAFKADSLVEGTSSRYSMYNSVSQKLMAKMGFREGEGLGKYSQGRKDIVEASSQKGRRGLGLTLRGFDQELNVDWRDEPEPSACEQVSWFPECTTEIPDTQEMSDWMVVGKRKMIIEDETEFCGEELLHSVLQCKSVFDVLDGEEMRRARTRANPYEMIRGVFFLNRAAMKMANMDFVFDRMFTNPRDSYGKPLVKDREAELLYFADVCAGPGGFSEYVLWRKKWHAKGFGMTLKGPNDFKLEDFYSASSELFEPYYGEGGIDGDGDITRPENISAFRNFVLDNTDRKGVHFLMADGGFSVEGQENLQEILSKQLLLCQFLMALSIVRTGGHFICKTFDLFTPFSVGLVYLLYCCFERVCLFKPITSRPANSERYVVCKGLKVGIDDVRDYLFAVNIKLNQLRNTDSDVNLVVPLEVIKGDHEFTDYMIRSNESHCSLQIKALAKIHAFVQDTTLSEPRQAEIRKECLRLWGIPDQARVAPSSSDPKSKFFELIQGTEIDIFSYKPTLLTSKTLEKIRPVFDYRCMVSGSEQKFLIGLGKSQIYTWDGRQSDRWIKLDLKTELPRDTLLSVEIVHELKGEGKAQRKISAIHILDVLVLNGTDVREQHFNQRIQLAEKFVKAVSKPSRPDMNPIRVKEVYRLEEMEKIFVRLEMKIIKGSSGTPKLSYTGRDDRHFVPMGLYIVRTVNEPWTMGFSKSFKKKFFYNKKTKDSTFDLPADSIAPFHICYYGRLFWEWGDGIRVHDSQKPQDQDKLSKEDVLSFIQMHRA

SEQ ID NO: 10837 - protein, 303 aa, Homo sapiens
MARGKAKEEGSWKKFIWNSEKKEFLGRTGGSWFKILLFYVIFYGCLAGIFIGTIQVMLLTISEFKPTYQDRVAPPGLTQIPQIQKTEISFRPNDPKSYEAYVLNIVRFLEKYKDSAQRDDMIFEDCGDVPSEPKERGDFNHERGERKVCRFKLEWLGNCSGLNDETYGYKEGKPCIIIKLNRVLGFKPKPPKNESLETYPVMKYNPNVLPVQCTGKRDEDKDKVGNVEYFGLGNSPGFPLQYYPYYGKLLQPKYLQPLLAVQFTNLTMDTEIRIECKAYGENIGYSEKDRFQGRFDVKIEVKS

SEQ ID NO: 10838 - protein, 301 aa, Homo sapiens
MARGKAKEEGSWKKFIWNSEKKEFLGRTGGSWFKILLFYVIFYGCLAGIFIGTIQVMLLTISEFKPTYQDRVAPPGLTQIPQIQKTEISFRPNDPKSYEAYVLNIVRFLEKYKDSAQRDDMIFEDCGDVPSEPKERGDFNHERGERKVCRFKLEWLGNCSGLNDETYGYKEGKPCIIIKLNRVLGFKPKPPKNESLETYPVMKYNPNVLPVQCTGKRDEDKDKVGNVEYFGLGNSPGFPLQYYPYYGKLLQPKYLQPLLAVQFTNLTMDTEIRIECKAYGENIGYSEKDRFQGRFDVKIKF

SEQ ID NO: 10839 - protein, 308 aa, Homo sapiens
MNPIVVVHGGGAGPISKDRKERVHQGMVRAATVGYGILREGGSAVDAVEGAVVALEDDPEFNAGCGSVLNTNGEVEMDASIMDGKDLSAGAVSAVQCIANPIKLARLVMEKTPHCFLTDQGAAQFAAAMGVPEIPGEKLVTERNKKRLEKEKHEKGAQKTDCQKNLGTVGAVALDCKGNVAYATSTGGIVNKMVGRVGDSPCLGAGGYADNDIGAVSTTGHGESILKVNLARLTLFHIEQGKTVEEAADLSLGYMKSRVKGLGGLIVVSKTGDWVAKWTSTSMPWAAAKDGKLHFGIDPDDTTITDLP

SEQ ID NO: 10840 - protein, 180 aa, Homo sapiens
MGVPEIPGEKLVTERNKKRLEKEKHEKGAQKTDCQKNLGTVGAVALDCKGNVAYATSTGGIVNKMVGRVGDSPCLGAGGYADNDIGAVSTTGHGESILKVNLARLTLFHIEQGKTVEEAADLSLGYMKSRVKGLGGLIVVSKTGDWVAKWTSTSMPWAAAKDGKLHFGIDPDDTTITDLP

SEQ ID NO: 10841 - protein, 531 aa, Homo sapiens
MKPTSGPEEARRPASDIRVFASNCSMHGLGHVFGPGSLSLRRGMWAAAVVLSVATFLYQVAERVRYYREFHHQTALDERESHRLIFPAVTLCNINPLRRSRLTPNDLHWAGSALLGLDPAEHAAFLRALGRPPAPPGFMPSPTFDMAQLYARAGHSLDDMLLDCRFRGQPCGPENFTTIFTRMGKCYTFNSGADGAELLTTTRGGMGNGLDIMLDVQQEEYLPVWRDNEETPFEVGIRVQIHSQEEPPIIDQLGLGVSPGYQTFVSCQQQQLSFLPPPWGDCSSASLNPNYEPEPSDPLGSPSPSPSPPYTLMGCRLACETRYVARKCGCRMVYMPGDVPVCSPQQYKNCAHPAIDAMLRKDSCACPNPCASTRYAKELSMVRIPSRAAARFLARKLNRSEAYIAENVLALDIFFEALNYETVEQKKAYEMSELLGDIGGQMGLFIGASLLTILEILDYLCEVFRDKVLGYFWNRQHSQRHSSTNLLQEGLGSHRTQVPHLSLGPRPPTPPCAVTKTLSASHRTCYLVTQL

SEQ ID NO: 10842 - protein, 543 aa, Homo sapiens
MKPTSGPEEARRPASDIRVFASNCSMHGLGHVFGPGSLSLRRGMWAAAVVLSVATFLYQVAERVRYYREFHHQTALDERESHRLIFPAVTLCNINPLRRSRLTPNDLHWAGSALLGLDPAEHAAFLRALGRPPAPPGFMPSPTFDMAQLYARAGHSLDDMLLDCRFRGQPCGPENFTTIFTRMGKCYTFNSGADGAELLTTTRGGMGNGLDIMLDVQQEEYLPVWRDNEETPFEVGIRVQIHSQEEPPIIDQLGLGVSPGYQTFVSCQQQQLSFLPPPWGDCSSASLNPNYEPEPSDPLGSPSPSPSPPYTLMGCRLACETRYVARKCGCRMVYMPGDVPVCSPQQYKNCAHPAIDAMLRKDSCACPNPCASTRYAKELSMVRIPSRAAARFLARKLNRSEAYIAENVLALDIFFEALNYETVEQKKAYEMSELLGDIGGQMGLFIGASLLTILEILDYLCEVFRDKVLGYFWNRQHSQRHSSTNLTSHPSLCRHQDSLRLPPHLLPCHTALDLLSVSSEPRPDILDMPSLHVAFPSSPQIKS

SEQ ID NO: 10843 - protein, 549 aa, Homo sapiens
MKPTSGPEEARRPASDIRVFASNCSMHGLGHVFGPGSLSLRRGMWAAAVVLSVATFLYQVAERVRYYREFHHQTALDERESHRLIFPAVTLCNINPLRRSRLTPNDLHWAGSALLGLDPAEHAAFLRALGRPPAPPGFMPSPTFDMAQLYARAGHSLDDMLLDCRFRGQPCGPENFTTIFTRMGKCYTFNSGADGAELLTTTRGGMGNGLDIMLDVQQEEYLPVWRDNEETPFEVGIRVQIHSQEEPPIIDQLGLGVSPGYQTFVSCQQQQLSFLPPPWGDCSSASLNPNYEPEPSDPLGSPSPSPSPPYTLMGCRLACETRYVARKCGCRMVYMPGDVPVCSPQQYKNCAHPAIDAMLRKDSCACPNPCASTRYAKELSMVRIPSRAAARFLARKLNRSEAYIAENVLALDIFFEALNYETVEQKKAYEMSELLGDIGGQMGLFIGASLLTILEILDYLCEVFRDKVLGYFWNRQHSQRHSSTNLLQEGLGSHRTQVPHLSLGPSTLLCSEDLPPLPVPSPRLSPPPTAPATLSHSSRPAVCVLGAPP

SEQ ID NO: 10844 - protein, 407 aa, Homo sapiens
MKPTSGPEEARRPASDIRVFASNCSMHGLGHVFGPGSLSLRRGMWAAAVVLSVATFLYQVAERVRYYREFHHQTALDERESHRLIFPAVTLCNINPLRRSRLTPNDLHWAGSALLGLDPAEHAAFLRALGRPPAPPGFMPSPTFDMAQLYARAGHSLDDMLLDCRFRGQPCGPENFTTIFTRMGKCYTFNSGADGAELLTTTRGGMGNGLDIMLDVQQEEYLPVWRDNEETPFEVGIRVQIHSQEEPPIIDQLGLGVSPGYQTFVSCQQQQLSFLPPPWGDCSSASLNPNYEPEPSDPLGSPSPSPSPPYTLMGCRLACETRYVARKCGCRMVYMPGDVPVCSPQQYKNCAHPAIGRTCWPWTSSLRPSTMRPWSRRRPMRCQSCLVTLGARWGCSSGPACSPSSRS

SEQ ID NO: 10845 - protein, 576 aa, Homo sapiens
MRRHMVTYAWQLLKKELGLYQLAMDIIIMIRVCKMFRQGLRGFREYQIIETAHWKHPIFSFWDKKMQSRVTFDTMDFIAEEGHFPPKAIQIMQKKPSWRTEDEIQAVCNILQVLDSYRNYAEPLQLLLAKVMRFERFGRRRVIIKKGQKGNSFYFIYLGTVAITKDEDGSSAFLDPHPKLLHKGSCFGEMDVLHASVRRSTIVCMEETEFLVVDREDFFANKLDQEVQKDAQYRFEFFRKMELFASWSDEKLWQLVAMAKIERFSYGQLISKDFGESPFIMFISKGSCEVLRLLDLGASPSYRRWIWQHLELIDGRPLKTHLSEYSPMERFKEFQIKSYPLQDFSSLKLPHLKKAWGLQGTSFSRKIRTSGDTLPKMLGPKIQSRPAQSIKCAMINIKPGELPKEAAVGAYVKVHTVEQGEILGLHQAFLPEGECDTRPLILMSLGNELIRIRKEIFYELIDNDDEMIKKLLKLNIAFPSDEDMCQKFLQQNSWNIFRKDLLQLLVEPCQSQLFTPNRPKKREIYNPKSVVLDLCSINKTTKPRYPIFMAPQKYLPPLRIVQAIKAPRYKIRELLA

SEQ ID NO: 10846 - protein, 572 aa, Homo sapiens
MRRHMVTYAWQLLKKELGLYQLAMDIIIMIRVCKMFRQGLRGFREYQIIETAHWKHPIFSFWDKKMQSRVTFDTMDFIAEEGHFPPKAIQIMQKKPSWRTEDEIQAVCNILQVLDSYRNYAEPLQLLLAKVMRFERFGRRRVIIKKGQKGNSFYFIYLGTVAITKDEDGSSAFLDPHPKLLHKGSCFGEMDVLHASVRRSTIVCMEETEFLVVDREDFFANKLDQEVQKDAQYRFEFFRKMELFASWSDEKLWQLVAMAKIERFSYGQLISKDFGESPFIMFISKGSCEVLRLLDLGASPSYRRWIWQHLELIDGRPLKTHLSEYSPMERFKEFQIKSYPLQDFSSLKLPHLKKAWGLQGTSFSRKIRTSGDTLPKMLGPKIQSRPAQSIKCAMINIKPGELPKEAAVGAYVKVHTVEQGEILAFLPEGECDTRPLILMSLGNELIRIRKEIFYELIDNDDEMIKKLLKLNIAFPSDEDMCQKFLQQNSWNIFRKDLLQLLVEPCQSQLFTPNRPKKREIYNPKSVVLDLCSINKTTKPRYPIFMAPQKYLPPLRIVQAIKAPRYKIRELLA

SEQ ID NO: 10847 - protein, 423 aa, Homo sapiens
MRRHMVTYAWQLLKKELGLYQLAMDIIIMIRVCKMFRQGLRGFREYQIIETAHWKHPIFSFWDKKMQSRVTFDTMDFIAEEGHFPPKAIQIMQKKPSWRTEDEIQAVCNILQVLDSYRNYAEPLQLLLAKVMRFERFGRRRVIIKKGQKGNSFYFIYLGTVAITKDEDGSSAFLDPHPKLLHKGSCFGEMDVLHASVRRSTIVCMEETEFLVVDREDFFANKLDQEVQKDAQYRFEFFRKMELFASWSDEKLWQLVAMAKIERFSYGQLISKDFGESPFIMFISKGSCEVLRLLDLGASPSYRRWIWQHLELIDGRPLKTHLSEYSPMERFKEFQIKSYPLQDFSSLKLPHLKKAWGLQGTSFSRKIRTSGDTLPKMLGPKIQSRPAQSIKCAMINIKPGELPKEAAVGAYVKVHTVEQGEIL

SEQ ID NO: 10848 - protein, 409 aa, Homo sapiens
MGEKPGTRVFKKSSPNCKLTVYLGKRDFVDHLDKVDPVDGVVLVDPDYLKDRKVFVTLTCAFRYGREDLDVLGLSFRKDLFIATYQAFPPVPNPPRPPTRLQDRLLRKLGQHAHPFFFTIPQNLPCSVTLQPGPEDTGKACGVDFEIRAFCAKSLEEKSHKRNSVRLVIRKVQFAPEKPGPQPSAETTRHFLMSDRSLHLEASLDKELYYHGEPLNVNVHVTNNSTKTVKKIKVSVRQYADICLFSTAQYKCPVAQLEQDDQVSPSSTFCKVYTITPLLSDNREKRGLALDGKLKHEDTNLASSTIVKEGANKEVLGILVSYRVKVKLVVSRGGDVSVELPFVLMHPKPHDHIPLPRPQSAAPETDVPVDTNLIEFDTNYATDDDIVFEDFARLRLKGMKDDDYDDQLC

SEQ ID NO: 10849 - protein, 421 aa, Homo sapiens
MGEKPGTRVFKKSSPNCKLTVYLGKRDFVDHLDKVDPVDGVVLVDPDYLKDRKVFVTLTCAFRYGREDLDVLGLSFRKDLFIATYQAFPPVPNPPRPPTRLQDRLLRKLGQHAHPFFFTIPQNLPCSVTLQPGPEDTGKACGVDFEIRAFCAKSLEEKSHKRNSVRLVIRKVQFAPEKPGPQPSAETTRHFLMSDRSLHLEASLDKELYYHGEPLNVNVHVTNNSTKTVKKIKVSVRQYADICLFSTAQYKCPVAQLEQDDQVSPSSTFCKVYTITPLLSDNREKRGLALDGKLKHEDTNLASSTIVKEGANKEVLGILVSYRVKVKLVVSRGGDVSVELPFVLMHPKPHDHIPLPRPQSAPTPTPPLPVPPAAPETDVPVDTNLIEFDTNYATDDDIVFEDFARLRLKGMKDDDYDDQLC

SEQ ID NO: 10850 - protein, 406 aa, Homo sapiens
MGEKPGTRVFKKSSPNCKLTVYLGKRDFVDHLDKVDPVVFVTLTCAFRYGREDLDVLGLSFRKDLFIATYQAFPPVPNPPRPPTRLQDRLLRKLGQHAHPFFFTIPQNLPCSVTLQPGPEDTGKACGVDFEIRAFCAKSLEEKSHKRNSVRLVIRKVQFAPEKPGPQPSAETTRHFLMSDRSLHLEASLDKELYYHGEPLNVNVHVTNNSTKTVKKIKVSVRQYADICLFSTAQYKCPVAQLEQDDQVSPSSTFCKVYTITPLLSDNREKRGLALDGKLKHEDTNLASSTIVKEGANKEVLGILVSYRVKVKLVVSRGGDVSVELPFVLMHPKPHDHIPLPRPQSAPTPTPPLPVPPAAPETDVPVDTNLIEFDTNYATDDDIVFEDFARLRLKGMKDDDYDDQLC

SEQ ID NO: 10851 - protein, 430 aa, Homo sapiens
MGEKPGTRVFKKSSPNCKLTVYLGKRDFVDHLDKVDPVDGVVLVDPDYLKDRKVFVTLTCAFRYGREDLDVLGLSFRKDLFIATYQAFPPVPNPPRPPTRLQDRLLRKLGQHAHPFFFTVRMPLPSEGQGAGAGTVSGVGIPQNLPCSVTLQPGPEDTGKACGVDFEIRAFCAKSLEEKSHKRNSVRLVIRKVQFAPEKPGPQPSAETTRHFLMSDRSLHLEASLDKELYYHGEPLNVNVHVTNNSTKTVKKIKVSVRQYADICLFSTAQYKCPVAQLEQDDQVSPSSTFCKVYTITPLLSDNREKRGLALDGKLKHEDTNLASSTIVKEGANKEVLGILVSYRVKVKLVVSRGGDVSVELPFVLMHPKPHDHIPLPRPQSAAPETDVPVDTNLIEFDTNYATDDDIVFEDFARLRLKGMKDDDYDDQLC

SEQ ID NO: 10852 - protein, 394 aa, Homo sapiens
MGEKPGTRVFKKSSPNCKLTVYLGKRDFVDHLDKVDPVVFVTLTCAFRYGREDLDVLGLSFRKDLFIATYQAFPPVPNPPRPPTRLQDRLLRKLGQHAHPFFFTIPQNLPCSVTLQPGPEDTGKACGVDFEIRAFCAKSLEEKSHKRNSVRLVIRKVQFAPEKPGPQPSAETTRHFLMSDRSLHLEASLDKELYYHGEPLNVNVHVTNNSTKTVKKIKVSVRQYADICLFSTAQYKCPVAQLEQDDQVSPSSTFCKVYTITPLLSDNREKRGLALDGKLKHEDTNLASSTIVKEGANKEVLGILVSYRVKVKLVVSRGGDVSVELPFVLMHPKPHDHIPLPRPQSAAPETDVPVDTNLIEFDTNYATDDDIVFEDFARLRLKGMKDDDYDDQLC

SEQ ID NO: 10853 - protein, 183 aa, Homo sapiens
MEVKFITGKHGGRRPQRAEPQRICRALWLTPWPSLILKLLSWIILSNLFLHLRATHHMTELPLRFLYIALSEMTFREQTSHQIIQQMSLSNKLEQNQLYGEVINKETDNPVISSGLTLLFAQKPQSPGWKNMSSTKRVCTILADSCRAQAHAADRGERGHFGVQILHHFIEVFNVMAVRSNPF

SEQ ID NO: 10854 - protein, 342 aa, Homo sapiens
MGDREECLSTPQPPMSVVKSIELVLPEDRIYLAGSSIKGQVILTLNSTLVDPIVKVELVGRGYVEWSEEAGASCDYSRNVICNNKADYVHKTKTFPVEDNWLSAGSHTFDFHFNLPPRLPSTFTSKFGHVFYFVQASCMGREHILAKKRMYLLVQGTSTFHKETPFQNPLFVEAEEKVSYNCCRQGTVCLQIQMERNTFTPGEKVVFTTEINNQTSKCIKTVVFALYAHIQYEGFTPSAERRSRLDSSELLRQEANTPVTRFNTTKVVSTFNLPLLLSVSSSTQDGEIMHTRYELVTTVHLPWSLTSLKAKVPIIITSASVDSAICQLSEDGVLPVNPDHQN

SEQ ID NO: 10855 - protein, 1686 aa, Homo sapiens
MPGGPSPRSPAPLLRPLLLLLCALAPGAPGPAPGRATEGRAALDIVHPVRVDAGGSFLSYELWPRALRKRDVSVRRDAPAFYELQYRGRELRFNLTANQHLLAPGFVSETRRRGGLGRAHIRAHTPACHLLGEVQDPELEGGLAAISACDGLKGVFQLSNEDYFIEPLDSAPARPGHAQPHVVYKRQAPERLAQRGDSSAPSTCGVQVYPELESRRERWEQRQQWRRPRLRRLHQRSVSKEKWVETLVVADAKMVEYHGQPQVESYVLTIMNMVAGLFHDPSIGNPIHITIVRLVLLEDEEEDLKITHHADNTLKSFCKWQKSINMKGDAHPLHHDTAILLTRKDLCAAMNRPCETLGLSHVAGMCQPHRSCSINEDTGLPLAFTVAHELGHSFGIQHDGSGNDCEPVGKRPFIMSPQLLYDAAPLTWSRCSRQYITRFLDRGWGLCLDDPPAKDIIDFPSVPPGVLYDVSHQCRLQYGAYSAFCEDMDNVCHTLWCSVGTTCHSKLDAAVDGTRCGENKWCLSGECVPVGFRPEAVDGGWSGWSAWSICSRSCGMGVQSAERQCTQPTPKYKGRYCVGERKRFRLCNLQACPAGRPSFRHVQCSHFDAMLYKGQLHTWVPVVNDVNPCELHCRPANEYFAEKLRDAVVDGTPCYQVRASRDLCINGICKNVGCDFEIDSGAMEDRCGVCHGNGSTCHTVSGTFEEAEGLGYVDVGLIPAGAREIRIQEVAEAANFLALRSEDPEKYFLNGGWTIQWNGDYQVAGTTFTYARRGNWENLTSPGPTKEPVWIQLLFQESNPGVHYEYTIHREAGGHDEVPPPVFSWHYGPWTKCTVTCGRGVQRQNVYCLERQAGPVDEEHCDPLGRPDDQQRKCSEQPCPARWWAGEWQLCSSSCGPGGLSRRAVLCIRSVGLDEQSALEPPACEHLPRPPTETPCNRHVPCPATWAVGNWSQCSVTCGEGTQRRNVLCTNDTGVPCDEAQQPASEVTCSLPLCRWPLGTLGPEGSGSGSSSHELFNEADFIPHHLAPRPSPASSPKPGTMGNAIEEEAPELDLPGPVFVDDFYYDYNFINFHEDLSYGPSEEPDLDLAGTGDRTPPPHSHPAAPSTGSPVPATEPPAAKEEGVLGPWSPSPWPSQAGRSPPPPSEQTPGNPLINFLPEEDTPIGAPDLGLPSLSWPRVSTDGLQTPATPESQNDFPVGKDSQSQLPPPWRDRTNEVFKDDEEPKGRGAPHLPPRPSSTLPPLSPVGSTHSSPSPDVAELWTGGTVAWEPALEGGLGPVDSELWPTVGVASLLPPPIAPLPEMKVRDSSLEPGTPSFPTPGPGSWDLQTVAVWGTFLPTTLTGLGHMPEPALNPGPKGQPESLSPEVPLSSRLLSTPAWDSPANSHRVPETQPLAPSLAEAGPPADPLVVRNAGWQAGNWSECSTTCGLGAVWRPVRCSSGRDEDCAPAGRPQPARRCHLRPCATWHSGNWSKCSRSCGGGSSVRDVQCVDTRDLRPLRPFHCQPGPAKPPAHRPCGAQPCLSWYTSSWRECSEACGGGEQQRLVTCPEPGLCEEALRPNTTRPCNTHPCTQWVVGPWGQCSGPCGGGVQRRLVKCVNTQTGLPEEDSDQCGHEAWPESSRPCGTEDCEPVEPPRCERDRLSFGFCETLRLLGRCQLPTIRTQCCRSCSPPSHGAPSRGHQRVARR

SEQ ID NO: 10856 - protein, 418 aa, Homo sapiens
MAGSLPPCVVDCGTGYTKLGYAGNTEPQFIIPSCIAIRESAKVVDQAQRRVLRGVDDLDFFIGDEAIDKPTYATKWPIRHGIIEDWDLMERFMEQVVFKYLRAEPEDHYFLMTEPPLNTPENREYLAEIMFESFNVPGLYIAVQAVLALAASWTSRQVGERTLTGIVIDSGDGVTHVIPVAEGYVIGSCIKHIPIAGRDITYFIQQLLREREVGIPPEQSLETAKAIKEKYCYICPDIVKEFAKYDVDPRKWIKQYTGINAINQKKFVIDVGYERFLGPEIFFHPEFANPDFMESISDVVDEVIQNCPIDVRRPLYKNVVLSGGSTMFRDFGRRLQRDLKRVVDARLRLSEELSGGRIKPKPVEVQVVTHHMQRYAVWFGGSMLASTPEFFQVCHTKKDYEEYGPSICRHNPVFGVMS

SEQ ID NO: 10857 - protein, 330 aa, Homo sapiens
MERFMEQVVFKYLRAEPEDHYFLMTEPPLNTPENREYLAEIMFESFNVPGLYIAVQAVLALAASWTSRQVGERTLTGIVIDSGDGVTHVIPVAEGYVIGSCIKHIPIAGRDITYFIQQLLREREVGIPPEQSLETAKAIKEKYCYICPDIVKEFAKYDVDPRKWIKQYTGINAINQKKFVIDVGYERFLGPEIFFHPEFANPDFMESISDVVDEVIQNCPIDVRRPLYKNVVLSGGSTMFRDFGRRLQRDLKRVVDARLRLSEELSGGRIKPKPVEVQVVTHHMQRYAVWFGGSMLASTPEFFQVCHTKKDYEEYGPSICRHNPVFGVMS

SEQ ID NO: 10858 - protein, 348 aa, Homo sapiens
MAGSLPPCVVDCGTGYTKLGYAGNTEPQFIIPSCIAIRESAKVVDQAQRRVLRGVDDLDFFIGDEAIDKPTYATKWPIRHGIIEDWDLMERFMEQVVFKYLRAEPEDHYFLMTEPPLNTPENREYLAEIMFESFNVPGLYIAVQAVLALAASWTSRQVGERTLTGIVIDSGDGVTHVIPVAEGYVIGSCIKHIPIAGRDITYFIQQLLREREVGIPPEQSLETAKAIKEKYCYICPDIVKEFAKYDVDPRKWIKQYTGINAINQKKFVIDVGYERFLGPEIFFHPEFANPDFMESISDVVDEVIQNCPIDVRRPLYKPEFFQVCHTKKDYEEYGPSICRHNPVFGVMS

SEQ ID NO: 10859 - protein, 224 aa, Homo sapiens
MANSGLQLLGYFLALGGWVGIIASTALPQWKQSSYAGDAIITAVGLYEGLWMSCASQSTGQVQCKLYDSLLALDGHIQSARALMVVAVLLGFVAMVLSVVGMKCTRVGDSNPIAKGRVAIAGGALFILAGLCTLTAVSWYATLVTQEFFNPSTPVNARYEFGPALFVGWASAGLAVLGGSFLCCTCPEPERPNSSPQPYRPGPSAAAREPVVKLPASAKGPLGV

SEQ ID NO: 10860 - protein, 211 aa, Homo sapiens
MANSGLQLLGYFLALGGWVGIIASTALPQWKQSSYAGDAIITAVGLYEGLWMSCASQSTGQVQCKLYDSLLALDGHIQSARALMVVAVLLGFVAMVLSVVGMKCTRVGDSNPIAKGRVAIAGGALFILAGLCTLTAVSWYATLVTQEFFNPSTPVNARYEFGPALFVGWASAGLAVLGGSFLCCTCPEPERPNSSPQPYRPGPSAAAREYV

SEQ ID NO: 10861 - protein, 218 aa, Homo sapiens
MANSGLQLLGYFLALGGWVGIIASTALPQWKQSSYAGDAIITAVGLYEGLWMSCASQSTGQVQCKLYDSLLALDGHIQSARALMVVAVLLGFVAMVLSVVGMKCTRVGDSNPIAKGRVAIAGGALFILAGMNLAQPCSWAGPQLAWPCWAAPSSAAHARSQRDPTAAHSPIGLDPLLLPESTSELRLPWPAPHPVAPLPSIQPASQHPGQGHWGIGWA

SEQ ID NO: 10862 - protein, 1223 aa, Homo sapiens
MAPLRALLSYLLPLHCALCAAAGSRTPELHLSGKLSDYGVTVPCSTDFRGRFLSHVVSGPAAASAGSMVVDTPPTLPRHSSHLRVARSPLHPGGTLWPGRVGRHSLYFNVTVFGKELHLRLRPNRRLVVPGSSVEWQEDFRELFRQPLRQECVYTGGVTGMPGAAVAISNCDGLAGLIRTDSTDFFIEPLERGQQEKEASGRTHVVYRREAVQQEWAEPDGDLHNEAFGLGDLPNLLGLVGDQLGDTERKRRHAKPGSYSIEVLLVVDDSVVRFHGKEHVQNYVLTLMNIVDEIYHDESLGVHINIALVRLIMVGYRQSLSLIERGNPSRSLEQVCRWAHSQQRQDPSHAEHHDHVVFLTRQDFGPSGYAPVTGMCHPLRSCALNHEDGFSSAFVIAHETGHVLGMEHDGQGNGCADETSLGSVMAPLVQAAFHRFHWSRCSKLELSRYLPSYDCLLDDPFDPAWPQPPELPGINYSMDEQCRFDFGSGYQTCLAFRTFEPCKQLWCSHPDNPYFCKTKKGPPLDGTECAPGKWCFKGHCIWKSPEQTYGQDGGWSSWTKFGSCSRSCGGGVRSRSRSCNNPSPAYGGRLCLGPMFEYQVCNSEECPGTYEDFRAQQCAKRNSYYVHQNAKHSWVPYEPDDDAQKCELICQSADTGDVVFMNQVVHDGTRCSYRDPYSVCARGECVPVGCDKEVGSMKADDKCGVCGGDNSHCRTVKGTLGKASKQAGALKLVQIPAGARHIQIEALEKSPHRIVVKNQVTGSFILNPKGKEATSRTFTAMGLEWEDAVEDAKESLKTSGPLPEAIAILALPPTEGGPRSSLAYKYVIHEDLLPLIGSNNVLLEEMDTYEWALKSWAPCSKACGGGIQFTKYGCRRRRDHHMVQRHLCDHKKRPKPIRRRCNQHPCSQPVWVTEEWGACSRSCGKLGVQTRGIQCLLPLSNGTHKVMPAKACAGDRPEARRPCLRVPCPAQWRLGAWSQCSATCGEGIQQRQVVCRTNANSLGHCEGDRPDTVQVCSLPACGGNHQNSTVRADVWELGTPEGQWVPQSEPLHPINKISSTEPCTGDRSVFCQMEVLDRYCSIPGYHRLCCVSCIKKASGPNPGPDPGPTSLPPFSTPGSPLPGPQDPADAAEPPGKPTGSEDHQHGRATQLPGALDTSSPGTQHPFAPETPIPGASWSISPTTPGGLPWGWTQTPTPVPEDKGQPGEDLRHPGTSLPAASPVT

SEQ ID NO: 10863 - protein, 1156 aa, Homo sapiens
MVVDTPPTLPRHSSHLRVARSPLHPGGTLWPGRVGRHSLYFNVTVFGKELHLRLRPNRRLVVPGSSVEWQEDFRELFRQPLRQECVYTGGVTGMPGAAVAISNCDGLAGLIRTDSTDFFIEPLERGQQEKEASGRTHVVYRREAVQQEWAEPDGDLHNEAFGLGDLPNLLGLVGDQLGDTERKRRHAKPGSYSIEVLLVVDDSVVRFHGKEHVQNYVLTLMNIVDEIYHDESLGVHINIALVRLIMVGYRQSLSLIERGNPSRSLEQVCRWAHSQQRQDPSHAEHHDHVVFLTRQDFGPSGYAPVTGMCHPLRSCALNHEDGFSSAFVIAHETGHVLGMEHDGQGNGCADETSLGSVMAPLVQAAFHRFHWSRCSKLELSRYLPSYDCLLDDPFDPAWPQPPELPGINYSMDEQCRFDFGSGYQTCLAFRTFEPCKQLWCSHPDNPYFCKTKKGPPLDGTECAPGKWCFKGHCIWKSPEQTYGQDGGWSSWTKFGSCSRSCGGGVRSRSRSCNNPSPAYGGRLCLGPMFEYQVCNSEECPGTYEDFRAQQCAKRNSYYVHQNAKHSWVPYEPDDDAQKCELICQSADTGDVVFMNQVVHDGTRCSYRDPYSVCARGECVPVGCDKEVGSMKADDKCGVCGGDNSHCRTVKGTLGKASKQAGALKLVQIPAGARHIQIEALEKSPHRIVVKNQVTGSFILNPKGKEATSRTFTAMGLEWEDAVEDAKESLKTSGPLPEAIAILALPPTEGGPRSSLAYKYVIHEDLLPLIGSNNVLLEEMDTYEWALKSWAPCSKACGGGIQFTKYGCRRRRDHHMVQRHLCDHKKRPKPIRRRCNQHPCSQPVWVTEEWGACSRSCGKLGVQTRGIQCLLPLSNGTHKVMPAKACAGDRPEARRPCLRVPCPAQWRLGAWSQCSATCGEGIQQRQVVCRTNANSLGHCEGDRPDTVQVCSLPACGGNHQNSTVRADVWELGTPEGQWVPQSEPLHPINKISSTEPCTGDRSVFCQMEVLDRYCSIPGYHRLCCVSCIKKASGPNPGPDPGPTSLPPFSTPGSPLPGPQDPADAAEPPGKPTGSEDHQHGRATQLPGALDTSSPGTQHPFAPETPIPGASWSISPTTPGGLPWGWTQTPTPVPEDKGQPGEDLRHPGTSLPAASPVT

SEQ ID NO: 10864 - protein, 1159 aa, Homo sapiens
MVVDTPPTLPRHSSHLRVARSPLHPGGTLWPGRVGRHSLYFNVTVFGKELHLRLRPNRRLVVPGSSVEWQEDFRELFRQPLRQECVYTGGVTGMPGAAVAISNCDGLAGLIRTDSTDFFIEPLERGQQEKEASGRTHVVYRREAVQQEWAEPDGDLHNEAFGLGDLPNLLGLVGDQLGDTERKRRHAKPGSYSIEVLLVVDDSVVRFHGKEHVQNYVLTLMNIVDEIYHDESLGVHINIALVRLIMVGYRQSLSLIERGNPSRSLEQVCRWAHSQQRQDPSHAEHHDHVVFLTRQDFGPSGMQGYAPVTGMCHPLRSCALNHEDGFSSAFVIAHETGHVLGMEHDGQGNGCADETSLGSVMAPLVQAAFHRFHWSRCSKLELSRYLPSYDCLLDDPFDPAWPQPPELPGINYSMDEQCRFDFGSGYQTCLAFRTFEPCKQLWCSHPDNPYFCKTKKGPPLDGTECAPGKWCFKGHCIWKSPEQTYGQDGGWSSWTKFGSCSRSCGGGVRSRSRSCNNPSPAYGGRLCLGPMFEYQVCNSEECPGTYEDFRAQQCAKRNSYYVHQNAKHSWVPYEPDDDAQKCELICQSADTGDVVFMNQVVHDGTRCSYRDPYSVCARGECVPVGCDKEVGSMKADDKCGVCGGDNSHCRTVKGTLGKASKQAGALKLVQIPAGARHIQIEALEKSPHRIVVKNQVTGSFILNPKGKEATSRTFTAMGLEWEDAVEDAKESLKTSGPLPEAIAILALPPTEGGPRSSLAYKYVIHEDLLPLIGSNNVLLEEMDTYEWALKSWAPCSKACGGGIQFTKYGCRRRRDHHMVQRHLCDHKKRPKPIRRRCNQHPCSQPVWVTEEWGACSRSCGKLGVQTRGIQCLLPLSNGTHKVMPAKACAGDRPEARRPCLRVPCPAQWRLGAWSQCSATCGEGIQQRQVVCRTNANSLGHCEGDRPDTVQVCSLPACGGNHQNSTVRADVWELGTPEGQWVPQSEPLHPINKISSTEPCTGDRSVFCQMEVLDRYCSIPGYHRLCCVSCIKKASGPNPGPDPGPTSLPPFSTPGSPLPGPQDPADAAEPPGKPTGSEDHQHGRATQLPGALDTSSPGTQHPFAPETPIPGASWSISPTTPGGLPWGWTQTPTPVPEDKGQPGEDLRHPGTSLPAASPVT

SEQ ID NO: 10865 - protein, 1226 aa, Homo sapiens
MAPLRALLSYLLPLHCALCAAAGSRTPELHLSGKLSDYGVTVPCSTDFRGRFLSHVVSGPAAASAGSMVVDTPPTLPRHSSHLRVARSPLHPGGTLWPGRVGRHSLYFNVTVFGKELHLRLRPNRRLVVPGSSVEWQEDFRELFRQPLRQECVYTGGVTGMPGAAVAISNCDGLAGLIRTDSTDFFIEPLERGQQEKEASGRTHVVYRREAVQQEWAEPDGDLHNEAFGLGDLPNLLGLVGDQLGDTERKRRHAKPGSYSIEVLLVVDDSVVRFHGKEHVQNYVLTLMNIVDEIYHDESLGVHINIALVRLIMVGYRQSLSLIERGNPSRSLEQVCRWAHSQQRQDPSHAEHHDHVVFLTRQDFGPSGMQGYAPVTGMCHPLRSCALNHEDGFSSAFVIAHETGHVLGMEHDGQGNGCADETSLGSVMAPLVQAAFHRFHWSRCSKLELSRYLPSYDCLLDDPFDPAWPQPPELPGINYSMDEQCRFDFGSGYQTCLAFRTFEPCKQLWCSHPDNPYFCKTKKGPPLDGTECAPGKWCFKGHCIWKSPEQTYGQDGGWSSWTKFGSCSRSCGGGVRSRSRSCNNPSPAYGGRLCLGPMFEYQVCNSEECPGTYEDFRAQQCAKRNSYYVHQNAKHSWVPYEPDDDAQKCELICQSADTGDVVFMNQVVHDGTRCSYRDPYSVCARGECVPVGCDKEVGSMKADDKCGVCGGDNSHCRTVKGTLGKASKQAGALKLVQIPAGARHIQIEALEKSPHRIVVKNQVTGSFILNPKGKEATSRTFTAMGLEWEDAVEDAKESLKTSGPLPEAIAILALPPTEGGPRSSLAYKYVIHEDLLPLIGSNNVLLEEMDTYEWALKSWAPCSKACGGGIQFTKYGCRRRRDHHMVQRHLCDHKKRPKPIRRRCNQHPCSQPVWVTEEWGACSRSCGKLGVQTRGIQCLLPLSNGTHKVMPAKACAGDRPEARRPCLRVPCPAQWRLGAWSQCSATCGEGIQQRQVVCRTNANSLGHCEGDRPDTVQVCSLPACGGNHQNSTVRADVWELGTPEGQWVPQSEPLHPINKISSTEPCTGDRSVFCQMEVLDRYCSIPGYHRLCCVSCIKKASGPNPGPDPGPTSLPPFSTPGSPLPGPQDPADAAEPPGKPTGSEDHQHGRATQLPGALDTSSPGTQHPFAPETPIPGASWSISPTTPGGLPWGWTQTPTPVPEDKGQPGEDLRHPGTSLPAASPVT

SEQ ID NO: 10866 - protein, 760 aa, Homo sapiens
MVNAGAMSGSGNLMDFLDEPFPDVGTYEDFHTIDWLREKSRDTDRHRKITSKSKESIWEFIKSLLDAWSGWVVMLLIGLLAGTLAGVIDLAVDWMTDLKEGVCLSAFWYSHEQCCWTSNETTFEDRDKCPLWQKWSELLVNQSEGASAYILNYLMYILWALLFAFLAVSLVRVFAPYACGSGIPEIKTILSGFIIRGYLGKWTLLIKTVTLVLVVSSGLSLGKEGPLVHVACCCGNFFSSLFSKYSKNEGKRREVLSAAAAAGVSVAFGAPIGGVLFSLEEVSYYFPLKTLWRSFFAALVAAFTLRSINPFGNSRLVLFYVEYHTPWYMAELFPFILLGVFGGLWGTLFIRCNIAWCRRRKTTRLGKYPVLEVIVVTAITAIIAYPNPYTRQSTSELISELFNDCGALESSQLCDYINDPNMTRPVDDIPDRPAGVGVYTAMWQLALALIFKIVVTIFTFGMKIPSGLFIPSMAVGAIAGRMVGIGVEQLAYHHHDWIIFRNWCRPGADCVTPGLYAMVGAAACLGGVTRMTVSLVVIMFELTGGLEYIVPLMAAAVTSKWVADAFGKEGIYEAHIHLNGYPFLDVKDEFTHRTLATDVMRPRRGEPPLSVLTQDSMTVEDVETLIKETDYNGFPVVVSRDSERLIGFAQRRELILAIKNARQRQEGIVSNSIMYFTEEPPELPANSPHPLKLRRILNLSPFTVTDHTPMETVVDIFRKLGLRQCLVTRSGRLLGIITKKDVLRHMAQMANQDPESIMFN

SEQ ID NO: 10867 - protein, 666 aa, Homo sapiens
MTDLKEGVCLSAFWYSHEQCCWTSNETTFEDRDKCPLWQKWSELLVNQSEGASAYILNYLMYILWALLFAFLAVSLVRVFAPYACGSGIPEIKTILSGFIIRGYLGKWTLLIKTVTLVLVVSSGLSLGKEGPLVHVACCCGNFFSSLFSKYSKNEGKRREVLSAAAAAGVSVAFGAPIGGVLFSLEEVSYYFPLKTLWRSFFAALVAAFTLRSINPFGNSRLVLFYVEYHTPWYMAELFPFILLGVFGGLWGTLFIRCNIAWCRRRKTTRLGKYPVLEVIVVTAITAIIAYPNPYTRQSTSELISELFNDCGALESSQLCDYINDPNMTRPVDDIPDRPAGVGVYTAMWQLALALIFKIVVTIFTFGMKIPSGLFIPSMAVGAIAGRMVGIGVEQLAYHHHDWIIFRNWCRPGADCVTPGLYAMVGAAACLGGVTRMTVSLVVIMFELTGGLEYIVPLMAAAVTSKWVADAFGKEGIYEAHIHLNGYPFLDVKDEFTHRTLATDVMRPRRGEPPLSVLTQDSMTVEDVETLIKETDYNGFPVVVSRDSERLIGFAQRRELILAIKNARQRQEGIVSNSIMYFTEEPPELPANSPHPLKLRRILNLSPFTVTDHTPMETVVDIFRKLGLRQCLVTRSGRLLGIITKKDVLRHMAQMANQDPESIMFN

SEQ ID NO: 10868 - protein, 194 aa, Homo sapiens
MAKRRAAEPVTFHVPWKRLLLCDFAEQPPPPPLWIRPPGVAHAGQLLGVPEQHRKRKIDAGTMAEPSASPSKRRDSGDNSAPSGQEREDHGLETGDPPLPPPPVLPGPGEELPGARLPGGGGDDGAGRAGPPRGDWGVASRQHNEEFWQYNTFQYWRNPLPPIDLADIEDLSEDTLTEATLQGRNEGAEVDMES

SEQ ID NO: 10869 - protein, 169 aa, Homo sapiens
MDPEHAKPESSEAPSGNLKQPETAAALSLILGALACFIITQANESFITITSLEICIVVFFILIYVLTLHHLLTYLHWPLLDLTNSIITAVFLSVVAILAMQEKKRRHLLYVGGSLCLTAVIVCCIDAFVVTTKMRTNLKRFLGVEVERKLSPAKDAYPETGPDAPQRPA

SEQ ID NO: 10870 - protein, 149 aa, Homo sapiens
MLKILRLSLILGALACFIITQANESFITITSLEICIVVFFILIYVLTLHHLLTYLHWPLLDLTNSIITAVFLSVVAILAMQEKKRRHLLYVGGSLCLTAVIVCCIDAFVVTTKMRTNLKRFLGVEVERKLSPAKDAYPETGPDAPQRPA

SEQ ID NO: 10871 - protein, 94 aa, Homo sapiens
MLKILRLSLILGALACFIITQANESFITITSLEICIVVFFILIYVLTLHHLLTYLHWPLLDLTNSIITAVFLSVVAILAMQEKKRRHLLYVGGS

SEQ ID NO: 10872 - protein, 114 aa, Homo sapiens
MDPEHAKPESSEAPSGNLKQPETAAALSLILGALACFIITQANESFITITSLEICIVVFFILIYVLTLHHLLTYLHWPLLDLTNSIITAVFLSVVAILAMQEKKRRHLLYVGGR

SEQ ID NO: 10873 - protein, 122 aa, Homo sapiens
MDPEHAKPESSEAPSGNLKQPETAAALASSGSVDLTNSIITAVFLSVVAILAMQEKKRRHLLYVGGSLCLTAVIVCCIDAFVVTTKMRTNLKRFLGVEVERKLSPAKDAYPETGPDAPQRPA

SEQ ID NO: 10874 - protein, 116 aa, Homo sapiens
MDPEHAKPESSEAPSGNLKQPETAAALDLTNSIITAVFLSVVAILAMQEKKRRHLLYVGGSLCLTAVIVCCIDAFVVTTKMRTNLKRFLGVEVERKLSPAKDAYPETGPDAPQRPA

SEQ ID NO: 10875 - protein, 61 aa, Homo sapiens
MDPEHAKPESSEAPSGNLKQPETAAALDLTNSIITAVFLSVVAILAMQEKKRRHLLYVGGR

SEQ ID NO: 10876 - protein, 92 aa, Homo sapiens
MDPEHAKPESSEAPSGNLKQPETAAALASSGSVVSSVPKAQRNISAKTAPRKHPAVSIRSAQSAAAARPQGSEGTAPSRILPTVSLQLCSFQ

SEQ ID NO: 10877 - protein, 91 aa, Homo sapiens
MDPEHAKPESSEAPSGNLKQPETAAALSLILGALACFIITQANESFITITSLEICIVVFFILIYVLTLHHLLTYLHWPLLNAEYRKQTKQI

SEQ ID NO: 10878 - protein, 65 aa, Homo sapiens
MDPEHAKPESSEAPSGNLKQPETAAALASSGSVVSSVPKAQRNISAKTAPRKHPETGPDAPQRPA

SEQ ID NO: 10879 - protein, 33 aa, Homo sapiens
MDPEHAKPESSEAPSGNLKQPETAAALEAYNSK

SEQ ID NO: 10880 - protein, 45 aa, Homo sapiens
MDPEHAKLTLHHLLTYLHRPLLAAELSLSHRMPSTGSRQSKYEQL

SEQ ID NO: 10881 - protein, 38 aa, Homo sapiens
MDPEHAKPESSEAPSGNLKQPETAAALEADKANMSNFN

SEQ ID NO: 10882 - protein, 32 aa, Homo sapiens
MDPEHAKPESSEAPSGNLKQPETAAALLCSFQ

SEQ ID NO: 10883 - protein, 28 aa, Homo sapiens
MDPEHAKPESSEAPSGNLKQPETAAALR

SEQ ID NO: 10884 - protein, 71 aa, Homo sapiens
MLKILRLSLILGALACFIITQANESFITITSLEICIVVFFILIYVLTLHHLLTYLHWPLLNAEYRKQTKQI

SEQ ID NO: 10885 - protein, 286 aa, Homo sapiens
MDPEHAKPESSEAPSGNLKQPETAAALASSGSVVSSVPKAQRNISAKTAPRKHPAVSIRSAQSAAAARPQGSEGTAPSRKATTRPPPKPTLPPPTPSAHTESKLLNEMAIKERVEGRAKVPYKFRDSLKRFSFSPTGMLKILRLSLILGALACFIITQANESFITITSLEICIVVFFILIYVLTLHHLLTYLHWPLLDLTNSIITAVFLSVVAILAMQEKKRRHLLYVGGSLCLTAVIVCCIDAFVVTTKMRTNLKRFLGVEVERKLSPAKDAYPETGPDAPQRPA

SEQ ID NO: 10886 - protein, 328 aa, Homo sapiens
MAAVVVAAAGGAGPAVLQVAGLYRGLCAVRSRALGLGLVSPAQLRVFPVRPGSGRPEGGADSSGVGAEAELQANPFYDRYRDKIQLLRRSDPAAFESRLEKRSEFRKQPVGHSRQGDFIKCVEQKTDALGKQSVNRGFTKDKTLSSIFNIEMVKEKTAEEIKQIWQQYFAAKDTVYAVIPAEKFDLIWNRAQSCPTFLCALPRREGYEFFVGQWTGTELHFTALINIQTRGEAAASQLILYHYPELKEEKGIVLMTAEMDSTFLNVAEAQCIANQVQLFYATDRKETYGLVETFNLRPNEFKYMSVIAELEQSGLGAELKCAQNQNKT

SEQ ID NO: 10887 - protein, 177 aa, Homo sapiens
MVKEKTAEEIKQIWQQYFAAKDTVYAVIPAEKFDLIWNRAQSCPTFLCALPRREGYEFFVGQWTGTELHFTALINIQTRGEAAASQLILYHYPELKEEKGIVLMTAEMDSTFLNVAEAQCIANQVQLFYATDRKETYGLVETFNLRPNEFKYMSVIAELEQSGLGAELKCAQNQNKT

SEQ ID NO: 10888 - protein, 240 aa, Homo sapiens
MSDPAAFESRLEKRSEFRKQPVGHSRQGDFIKCVEQKTDALGKQSVNRGFTKDKTLSSIFNIEMVKEKTAEEIKQIWQQYFAAKDTVYAVIPAEKFDLIWNRAQSCPTFLCALPRREGYEFFVGQWTGTELHFTALINIQTRGEAAASQLILYHYPELKEEKGIVLMTAEMDSTFLNVAEAQCIANQVQLFYATDRKETYGLVETFNLRPNEFKYMSVIAELEQSGLGAELKCAQNQNKT

SEQ ID NO: 10889 - protein, 182 aa, Homo sapiens
MWPPDPDPDPDPEPAGGSRPGPAVPGLRALLPARAFLCSLKGRLLLAESGLSFITFICYVASSASAFLTAPLLEFLLALYFLFADAMQLNDKWQGLCWPMMDFLRCVTAALIYFAISITAIAKYSDGASKAAGVFGFFATIVFATDFYLIFNDVAKFLKQGDSADETTAHKTEEENSDSDSD

SEQ ID NO: 10890 - protein, 59 aa, Homo sapiens
MWPPDPDPDPDPEPAGGSRPGPAVPGLRALLPARAFLCSLKGPGGFVCTWCSCPHQPLW

SEQ ID NO: 10891 - protein, 1205 aa, Homo sapiens
MVLLSLWLIAAALVEVRTSADGQAGNEEMVQIDLPIKRYREYELVTPVSTNLEGRYLSHTLSASHKKRSARDVSSNPEQLFFNITAFGKDFHLRLKPNTQLVAPGAVVEWHETSLVPGNITDPINNHQPGSATYRIRRTEPLQTNCAYVGDIVDIPGTSVAISNCDGLAGMIKSDNEEYFIEPLERGKQMEEEKGRIHVVYKRSAVEQAPIDMSKDFHYRESDLEGLDDLGTVYGNIHQQLNETMRRRRHAGENDYNIEVLLGVDDSVVRFHGKEHVQNYLLTLMNIVNEIYHDESLGVHINVVLVRMIMLGYAKSISLIERGNPSRSLENVCRWASQQQRSDLNHSEHHDHAIFLTRQDFGPAGMQGYAPVTGMCHPVRSCTLNHEDGFSSAFVVAHETGHVLGMEHDGQGNRCGDETAMGSVMAPLVQAAFHRYHWSRCSGQELKRYIHSYDCLLDDPFDHDWPKLPELPGINYSMDEQCRFDFGVGYKMCTAFRTFDPCKQLWCSHPDNPYFCKTKKGPPLDGTECAAGKWCYKGHCMWKNANQQKQDGNWGSWTKFGSCSRTCGTGVRFRTRQCNNPMPINGGQDCPGVNFEYQLCNTEECQKHFEDFRAQQCQQRNSHFEYQNTKHHWLPYEHPDPKKRCHLYCQSKETGDVAYMKQLVHDGTHCSYKDPYSICVRGECVKVGCDKEIGSNKVEDKCGVCGGDNSHCRTVKGTFTRTPRKLGYLKMFDIPPGARHVLIQEDEASPHILAIKNQATGHYILNGKGEEAKSRTFIDLGVEWDYNIEDDIESLHTDGPLHDPVIVLIIPQENDTRSSLTYKYIIHEDSVPTINSNNVIQEELDTFEWALKSWSQCSKPCGGGFQYTKYGCRRKSDNKMVHRSFCEANKKPKPIRRMCNIQECTHPLWVAEEWEHCTKTCGSSGYQLRTVRCLQPLLDGTNRSVHSKYCMGDRPESRRPCNRVPCPAQWKTGPWSECSVTCGEGTEVRQVLCRAGDHCDGEKPESVRACQLPPCNDEPCLGDKSIFCQMEVLARYCSIPGYNKLCCESCSKRSSTLPPPYLLEAAETHDDVISNPSDLPRSLVMPTSLVPYHSETPAKKMSLSSISSVGGPNAYAAFRPNSKPDGANLRQRSAQQAGSKTVRLVTVPSSPPTKRVHLSSASQMAAASFFAASDSIGASSQARTSKKDGKIIDNRRPTRSSTLER

SEQ ID NO: 10892 - protein, 173 aa, Homo sapiens
MEEPQRARSHTVTTTASSFAENFSTSSSSFAYDREFLRTLPGFLIVAEIVLGLLVWTLIAGTEYFRVPAFGWVMFVAVFYWVLTVFFLIIYITMTYTRIPQVPWTTVGLCFNGSAFVLYLSAAVVDASSVSPERDSHNFNSWAASSFFAFLVTICYAGNTYFSFIAWRSRTIQ

SEQ ID NO: 10893 - protein, 115 aa, Homo sapiens
MEEPQRARSHTVTTTASSFAENFSTSSSSFAYDREFLRTLPGFLIVAEIGLCFNGSAFVLYLSAAVVDASSVSPERDSHNFNSWAASSFFAFLVTICYAGNTYFSFIAWRSRTIQ

SEQ ID NO: 10894 - protein, 196 aa, Homo sapiens
MPGMVPPHVPPQMLNIPQTSLQAKPVAPQVPSPGGAPGQGPYPYSLSEPAPLTLDTSGKNLTEQNSYSNIPHEGKHTPLYERSLPINPAQSGSPNHVDSAYFPGSSTSSSSDNDEGSGGATKYTIYWGFRATDHHVQGRDSQARGTAAHWHGGHVCSPNVFWRISHGPAQQLTFPTEQAAPPVCPAPASRRLSAPG

SEQ ID NO: 10895 - protein, 837 aa, Homo sapiens
MSQTGSHPGRGLAGRWLWGAQPCLLLPIVPLSWLVWLLLLLLASLLPSARLASPLPREEEIVFPEKLNGSVLPGSGAPARLLCRLQAFGETLLLELEQDSGVQVEGLTVQYLGQAPELLGGAEPGTYLTGTINGDPESVASLHWDGGALLGVLQYRGAELHLQPLEGGTPNSAGGPGAHILRRKSPASGQGPMCNVKAPLGSPSPRPRRAKRFASLSRFVETLVVADDKMAAFHGAGLKRYLLTVMAAAAKAFKHPSIRNPVSLVVTRLVILGSGEEGPQVGPSAAQTLRSFCAWQRGLNTPEDSDPDHFDTAILFTRQDLCGVSTCDTLGMADVGTVCDPARSCAIVEDDGLQSAFTAAHELGHVFNMLHDNSKPCISLNGPLSTSRHVMAPVMAHVDPEEPWSPCSARFITDFLDNGYGHCLLDKPEAPLHLPVTFPGKDYDADRQCQLTFGPDSRHCPQLPPPCAALWCSGHLNGHAMCQTKHSPWADGTPCGPAQACMGGRCLHMDQLQDFNIPQAGGWGPWGPWGDCSRTCGGGVQFSSRDCTRPVPRNGGKYCEGRRTRFRSCNTEDCPTGSALTFREEQCAAYNHRTDLFKSFPGPMDWVPRYTGVAPQDQCKLTCQAQALGYYYVLEPRVVDGTPCSPDSSSVCVQGRCIHAGCDRIIGSKKKFDKCMVCGGDGSGCSKQSGSFRKFRYGYNNVVTIPAGATHILVRQQGNPGHRSIYLALKLPDGSYALNGEYTLMPSPTDVVLPGAVSLRYSGATAASETLSGHGPLAQPLTLQVLVAGNPQDTRLRYSFFVPRPTPSTPRPTPQDWLHRRAQILEILRRRPWAGRK

SEQ ID NO: 10896 - protein, 846 aa, Homo sapiens
MSQTGSHPGRGLAGRWLWGAQPCLLLPIVPLSWLVWLLLLLLASLLPSARLASPLPREEEIVFPEKLNGSVLPGSGAPARLLCRLQAFGETLLLELEQDSGVQVEGLTVQYLGQAPELLGGAEPGTYLTGTINGDPESVASLHWDGGALLGVLQYRGAELHLQPLEGGTPNSAGGPGAHILRRKSPASGQGPMCNVKAPLGSPSPRPRRAKRFASLSRFVETLVVADDKMAAFHGAGLKRYLLTVMAAAAKAFKHPSIRNPVSLVVTRLVILGSGEEGPQVGPSAAQTLRSFCAWQRGLNTPEDSDPDHFDTAILFTRQDLCGVSTCDTLGMADVGTVCDPARSCAIVEDDGLQSAFTAAHELGHVFNMLHDNSKPCISLNGPLSTSRHVMAPVMAHVDPEEPWSPCSARFITDFLDNGYGHCLLDKPEAPLHLPVTFPGKDYDADRQCQLTFGPDSRHCPQLPPPCAALWCSGHLNGHAMCQTKHSPWADGTPCGPAQACMGGRCLHMDQLQDFNIPQAGGWGPWGPWGDCSRTCGGGVQFSSRDCTRPVPRNGGKYCEGRRTRFRSCNTEDCPTGSALTFREEQCAAYNHRTDLFKSFPGPMDWVPRYTGVAPQDQCKLTCQAQALGYYYVLEPRVVDGTPCSPDSSSVCVQGRCIHAGCDRIIGSKKKFDKCMVCGGDGSGCSKQSGSFRKFRCGTAWGSQLALQRGHCSLRDTVRPWATGPAFDTASPSGWQPPGHTPPIQLLRAPADPFNATPHSPGLAAPKSTDSGDPSAAPLGGQEITSLSRLPFLGTGASDLAGRKRELLLLPHAKTQWGGAVGVRPAPPLCPNAQAGPALVSCPGRQ

SEQ ID NO: 10897 - protein, 152 aa, Homo sapiens
MDNVQPKIKHRPFCFSVKGHVKMLRLALTVTSMTFFIIAQAPEPYIVITGFEVTVILFFILLYVLRLDRLMKWLFWPLLDIINSLVTTVFMLIVSVLALIPETTTLTVGGGVFALVTAVCCLADGALIYRKLLFNPSGPYQKKPVHEKKEVL

SEQ ID NO: 10898 - protein, 99 aa, Homo sapiens
MDNVQPKIKHRPFCFSVKGHVKMLRLDIINSLVTTVFMLIVSVLALIPETTTLTVGGGVFALVTAVCCLADGALIYRKLLFNPSGPYQKKPVHEKKEVL

SEQ ID NO: 10899 - protein, 67 aa, Homo sapiens
MDNVQPKIKHRPFCFSVKGHVKMLRLVFALVTAVCCLADGALIYRKLLFNPSGPYQKKPVHEKKEVL

SEQ ID NO: 10900 - protein, 120 aa, Homo sapiens
MDNVQPKIKHRPFCFSVKGHVKMLRLALTVTSMTFFIIAQAPEPYIVITGFEVTVILFFILLYVLRLDRLMKWLFWPLLVFALVTAVCCLADGALIYRKLLFNPSGPYQKKPVHEKKEVL

SEQ ID NO: 10901 - protein, 113 aa, Homo sapiens
MDNVQPKIKHRPFCFSVKGHVKMLRLALTVTSMTFFIIAQAPEPYIVITGFEVTVILFFILLYVLRLDRLMKWLFWPLLDIINSLVTTVFMLIVSVLALIPETTTLTVGGGLF

SEQ ID NO: 10902 - protein, 1487 aa, Homo sapiens
MIRLGAPQTLVLLTLLVAAVLRCQGQDVQEAGSCVQDGQRYNDKDVWKPEPCRICVCDTGTVLCDDIICEDVKDCLSPEIPFGECCPICPTDLATASGQPGPKGQKGEPGDIKDIVGPKGPPGPQGPAGEQGPRGDRGDKGEKGAPGPRGRDGEPGTPGNPGPPGPPGPPGPPGLGGNFAAQMAGGFDEKAGGAQLGVMQGPMGPMGPRGPPGPAGAPGPQGFQGNPGEPGEPGVSGPMGPRGPPGPPGKPGDDGEAGKPGKAGERGPPGPQGARGFPGTPGLPGVKGHRGYPGLDGAKGEAGAPGVKGESGSPGENGSPGPMGPRGLPGERGRTGPAGAAGARGNDGQPGPAGPPGPVGPAGGPGFPGAPGAKGEAGPTGARGPEGAQGPRGEPGTPGSPGPAGASGNPGTDGIPGAKGSAGAPGIAGAPGFPGPRGPPGPQGATGPLGPKGQTGEPGIAGFKGEQGPKGEPGPAGPQGAPGPAGEEGKRGARGEPGGVGPIGPPGERGAPGNRGFPGQDGLAGPKGAPGERGPSGLAGPKGANGDPGRPGEPGLPGARGLTGRPGDAGPQGKVGPSGAPGEDGRPGPPGPQGARGQPGVMGFPGPKGANGEPGKAGEKGLPGAPGLRGLPGKDGETGAAGPPGPAGPAGERGEQGAPGPSGFQGLPGPPGPPGEGGKPGDQGVPGEAGAPGLVGPRGERGFPGERGSPGAQGLQGPRGLPGTPGTDGPKGASGPAGPPGAQGPPGLQGMPGERGAAGIAGPKGDRGDVGEKGPEGAPGKDGGRGLTGPIGPPGPAGANGEKGEVGPPGPAGSAGARGAPGERGETGPPGPAGFAGPPGADGQPGAKGEQGEAGQKGDAGAPGPQGPSGAPGPQGPTGVTGPKGARGAQGPPGATGFPGAAGRVGPPGSNGNPGPPGPPGPSGKDGPKGARGDSGPPGRAGEPGLQGPAGPPGEKGEPGDDGPSGAEGPPGPQGLAGQRGIVGLPGQRGERGFPGLPGPSGEPGKQGAPGASGDRGPPGPVGPPGLTGPAGEPGREGSPGADGPPGRDGAAGVKGDRGETGAVGAPGAPGPPGSPGPAGPTGKQGDRGEAGAQGPMGPSGPAGARGIQGPQGPRGDKGEAGEPGERGLKGHRGFTGLQGLPGPPGPSGDQGASGPAGPSGPRGPPGPVGPSGKDGANGIPGPIGPPGPRGRSGETGPAGPPGNPGPPGPPGPPGPGIDMSAFAGLGPREKGPDPLQYMRADQAAGGLRQHDAEVDATLKSLNNQIESIRSPEGSRKNPARTCRDLKLCHPEWKSGDYWIDPNQGCTLDAMKVFCNMETGETCVYPNPANVPKKNWWSSKSKEKKHIWFGETINGGFHFSYGDDNLAPNTANVQMTFLRLLSTEGSQNITYHCKNSIAYLDEAAGNLKKALLIQGSNDVEIRAEGNSRFTYTALKDGCTKHTGKWGKTVIEYRSQKTSRLPIIDIAPMDIGGPEQEFGVDIGPVCFL

SEQ ID NO: 10903 - protein, 1418 aa, Homo sapiens
MIRLGAPQTLVLLTLLVAAVLRCQGQDVRQPGPKGQKGEPGDIKDIVGPKGPPGPQGPAGEQGPRGDRGDKGEKGAPGPRGRDGEPGTPGNPGPPGPPGPPGPPGLGGNFAAQMAGGFDEKAGGAQLGVMQGPMGPMGPRGPPGPAGAPGPQGFQGNPGEPGEPGVSGPMGPRGPPGPPGKPGDDGEAGKPGKAGERGPPGPQGARGFPGTPGLPGVKGHRGYPGLDGAKGEAGAPGVKGESGSPGENGSPGPMGPRGLPGERGRTGPAGAAGARGNDGQPGPAGPPGPVGPAGGPGFPGAPGAKGEAGPTGARGPEGAQGPRGEPGTPGSPGPAGASGNPGTDGIPGAKGSAGAPGIAGAPGFPGPRGPPGPQGATGPLGPKGQTGEPGIAGFKGEQGPKGEPGPAGPQGAPGPAGEEGKRGARGEPGGVGPIGPPGERGAPGNRGFPGQDGLAGPKGAPGERGPSGLAGPKGANGDPGRPGEPGLPGARGLTGRPGDAGPQGKVGPSGAPGEDGRPGPPGPQGARGQPGVMGFPGPKGANGEPGKAGEKGLPGAPGLRGLPGKDGETGAAGPPGPAGPAGERGEQGAPGPSGFQGLPGPPGPPGEGGKPGDQGVPGEAGAPGLVGPRGERGFPGERGSPGAQGLQGPRGLPGTPGTDGPKGASGPAGPPGAQGPPGLQGMPGERGAAGIAGPKGDRGDVGEKGPEGAPGKDGGRGLTGPIGPPGPAGANGEKGEVGPPGPAGSAGARGAPGERGETGPPGPAGFAGPPGADGQPGAKGEQGEAGQKGDAGAPGPQGPSGAPGPQGPTGVTGPKGARGAQGPPGATGFPGAAGRVGPPGSNGNPGPPGPPGPSGKDGPKGARGDSGPPGRAGEPGLQGPAGPPGEKGEPGDDGPSGAEGPPGPQGLAGQRGIVGLPGQRGERGFPGLPGPSGEPGKQGAPGASGDRGPPGPVGPPGLTGPAGEPGREGSPGADGPPGRDGAAGVKGDRGETGAVGAPGAPGPPGSPGPAGPTGKQGDRGEAGAQGPMGPSGPAGARGIQGPQGPRGDKGEAGEPGERGLKGHRGFTGLQGLPGPPGPSGDQGASGPAGPSGPRGPPGPVGPSGKDGANGIPGPIGPPGPRGRSGETGPAGPPGNPGPPGPPGPPGPGIDMSAFAGLGPREKGPDPLQYMRADQAAGGLRQHDAEVDATLKSLNNQIESIRSPEGSRKNPARTCRDLKLCHPEWKSGDYWIDPNQGCTLDAMKVFCNMETGETCVYPNPANVPKKNWWSSKSKEKKHIWFGETINGGFHFSYGDDNLAPNTANVQMTFLRLLSTEGSQNITYHCKNSIAYLDEAAGNLKKALLIQGSNDVEIRAEGNSRFTYTALKDGCTKHTGKWGKTVIEYRSQKTSRLPIIDIAPMDIGGPEQEFGVDIGPVCFL

SEQ ID NO: 10904 - protein, 268 aa, Homo sapiens
MSAFAGLGPREKGPDPLQYMRADQAAGGLRQHDAEVDATLKSLNNQIESIRSPEGSRKNPARTCRDLKLCHPEWKSGDYWIDPNQGCTLDAMKVFCNMETGETCVYPNPANVPKKNWWSSKSKEKKHIWFGETINGGFHFSYGDDNLAPNTANVQMTFLRLLSTEGSQNITYHCKNSIAYLDEAAGNLKKALLIQGSNDVEIRAEGNSRFTYTALKDGCTKHTGKWGKTVIEYRSQKTSRLPIIDIAPMDIGGPEQEFGVDIGPVCFL

SEQ ID NO: 10905 - protein, 229 aa, Homo sapiens
MDSLDRSCQDWCDRKQHWLEIGPPDLVERKGSLTLRSHHKKYSKPVLVYSWHRDREAFPKGYDIEGPEKVKKLCNSTYRRLGTDESPIWTSETHEKLSQMCLNTEWVEMKSKALLNEETVSSGIIERVTGLPATGFGAVFPRHPPDWSKMCALTTYSEDYVPPYDYQPHAYPCQDDYSIVHRKCRSQFTDLNGSKRFGINTWHDESGIYANSDVKQKLYPLTSGPIVPI

SEQ ID NO: 10906 - protein, 159 aa, Homo sapiens
MDSLDRSCQDWCDRKQHWLEIGPPDLVERKGSLTLRSHHKKYSKPVLVYSWHRDREAFPKGYDIEGPEKVKKLCNSTYRRLGTDESPIWTSETHEKLSQMCLNTEWVEMKSKALLNEETVSSGIIERVTGLPATGFGAVFPRHPPDWSKMLIPVKMIIP

SEQ ID NO: 10907 - protein, 450 aa, Homo sapiens
MGKSFANFMCKKDFHPASKSNIKKVWMAEQKISYDKKKQEELMQQYLKEQESYDNRLLMGDERVKNGLNFMYEAPPGAKKENKEKEETEGETEYKFEWQKGAPREKYAKDDMNIRDQPFGIQVRNVRCIKCHKWGHVNTDRECPLFGLSGINASSVPTDGSGPSMHPSELIAEMRNSGFALKRNVLGRNLTANDPSQEYVASEGEEDPEVEFLKSLTTKQKQKLLRKLDRLEKKKKKKDRKKKKFQKSRSKHKKHKSSSSSSSSSSSSSSTETSESSSESESNNKEKKIQRKKRKKNKCSGHNNSDSEEKDKSKKRKLHEELSSSHHNREKAKEKPRFLKHESSREDSKWSHSDSDKKSRTHKHSPEKRGSERKEGSSRSHGREERSRRSRSRSPGSYKQRETRKRAQRNPGEEQSRRNDSRSHGTDLYRGEKMYREHPGGTHTKVTQRE

SEQ ID NO: 10908 - protein, 202 aa, Homo sapiens
MGKSFANFMCKKDFHPASKSNIKKVWMAEQKISYDKKKQEELMQQYLKEQESYDNRLLMGDERVKNGLNFMYEAPPGAKKENKEKEETEGETEYKFEWQKGAPREKYAKDDMNIRDQPFGIQVRNVRCIKCHKWGHVNTDRECPLFGLSGINASSVPTDGSDAVLQIEGFWAIDAPLGANSGDEKQWVCTETKCTGEKLDRK

SEQ ID NO: 10909 - protein, 1685 aa, Homo sapiens
MKLRGVSLAAGLFLLALSLWGQPAEAAACYGCSPGSKCDCSGIKGEKGERGFPGLEGHPGLPGFPGPEGPPGPRGQKGDDGIPGPPGPKGIRGPPGLPGFPGTPGLPGMPGHDGAPGPQGIPGCNGTKGERGFPGSPGFPGLQGPPGPPGIPGMKGEPGSIIMSSLPGPKGNPGYPGPPGIQGLPGPTGIPGPIGPPGPPGLMGPPGPPGLPGPKGNMGLNFQGPKGEKGEQGLQGPPGPPGQISEQKRPIDVEFQKGDQGLPGDRGPPGPPGIRGPPGPPGGEKGEKGEQGEPGKRGKPGKDGENGQPGIPGLPGDPGYPGEPGRDGEKGQKGDTGPPGPPGLVIPRPGTGITIGEKGNIGLPGLPGEKGERGFPGIQGPPGLPGPPGAAVMGPPGPPGFPGERGQKGDEGPPGISIPGPPGLDGQPGAPGLPGPPGPAGPHIPPSDEICEPGPPGPPGSPGDKGLQGEQGVKGDKGDTCFNCIGTGISGPPGQPGLPGLPGPPGSLGFPGQKGEKGQAGATGPKGLPGIPGAPGAPGFPGSKGEPGDILTFPGMKGDKGELGSPGAPGLPGLPGTPGQDGLPGLPGPKGEPGGITFKGERGPPGNPGLPGLPGNIGPMGPPGFGPPGPVGEKGIQGVAGNPGQPGIPGPKGDPGQTITQPGKPGLPGNPGRDGDVGLPGDPGLPGQPGLPGIPGSKGEPGIPGIGLPGPPGPKGFPGIPGPPGAPGTPGRIGLEGPPGPPGFPGPKGEPGFALPGPPGPPGLPGFKGALGPKGDRGFPGPPGPPGRTGLDGLPGPKGDVGPNGQPGPMGPPGLPGIGVQGPPGPPGIPGPIGQPGLHGIPGEKGDPGPPGLDVPGPPGERGSPGIPGAPGPIGPPGSPGLPGKAGASGFPGTKGEMGMMGPPGPPGPLGIPGRSGVPGLKGDDGLQGQPGLPGPTGEKGSKGEPGLPGPPGPMDPNLLGSKGEKGEPGLPGIPGVSGPKGYQGLPGDPGQPGLSGQPGLPGPPGPKGNPGLPGQPGLIGPPGLKGTIGDMGFPGPQGVEGPPGPSGVPGQPGSPGLPGQKGDKGDPGISSIGLPGLPGPKGEPGLPGYPGNPGIKGSVGDPGLPGLPGTPGAKGQPGLPGFPGTPGPPGPKGISGPPGNPGLPGEPGPVGGGGHPGQPGPPGEKGKPGQDGIPGPAGQKGEPGQPGFGNPGPPGLPGLSGQKGDGGLPGIPGNPGLPGPKGEPGFHGFPGVQGPPGPPGSPGPALEGPKGNPGPQGPPGRPGLPGPEGPPGLPGNGGIKGEKGNPGQPGLPGLPGLKGDQGPPGLQGNPGRPGLNGMKGDPGLPGVPGFPGMKGPSGVPGSAGPEGEPGLIGPPGPPGLPGPSGQSIIIKGDAGPPGIPGQPGLKGLPGPQGPQGLPGPTGPPGDPGRNGLPGFDGAGGRKGDPGLPGQPGTRGLDGPPGPDGLQGPPGPPGTSSVAHGFLITRHSQTTDAPQCPQGTLQVYEGFSLLYVQGNKRAHGQDLGTAGSCLRRFSTMPFMFCNINNVCNFASRNDYSYWLSTPEPMPMSMQPLKGQSIQPFISRCAVCEAPAVVIAVHSQTIQIPHCPQGWDSLWIGYSFMMHTSAGAEGSGQALASPGSCLEEFRSAPFIECHGRGTCNYYANSYSFWLATVDVSDMFSKPQSETLKAGDLRTRISRCQVCMKRT

SEQ ID NO: 10910 - protein, 1691 aa, Homo sapiens
MKLRGVSLAAGLFLLALSLWGQPAEAAACYGCSPGSKCDCSGIKGEKGERGFPGLEGHPGLPGFPGPEGPPGPRGQKGDDGIPGPPGPKGIRGPPGLPGFPGTPGLPGMPGHDGAPGPQGIPGCNGTKGERGFPGSPGFPGLQGPPGPPGIPGMKGEPGSIIMSSLPGPKGNPGYPGPPGIQGLPGPTGIPGPIGPPGPPGLMGPPGPPGLPGPKGNMGLNFQGPKGEKGEQGLQGPPGPPGQISEQKRPIDVEFQKGDQGLPGDRGPPGPPGIRGPPGPPGGEKGEKGEQGEPGKRGKPGKDGENGQPGIPGLPGDPGYPGEPGRDGEKGQKGDTGPPGPPGLVIPRPGTGITIGEKGNIGLPGLPGEKGERGFPGIQGPPGLPGPPGAAVMGPPGPPGFPGERGQKGDEGPPGISIPGPPGLDGQPGAPGLPGPPGPAGPHIPPSDEICEPGPPGPPGSPGDKGLQGEQGVKGDKGDTCFNCIGTGISGPPGQPGLPGLPGPPGSLGFPGQKGEKGQAGATGPKGLPGIPGAPGAPGFPGSKGEPGDILTFPGMKGDKGELGSPGAPGLPGLPGTPGQDGLPGLPGPKGEPGGITFKGERGPPGNPGLPGLPGNIGPMGPPGFGPPGPVGEKGIQGVAGNPGQPGIPGPKGDPGQTITQPGKPGLPGNPGRDGDVGLPGDPGLPGQPGLPGIPGSKGEPGIPGIGLPGPPGPKGFPGIPGPPGAPGTPGRIGLEGPPGPPGFPGPKGEPGFALPGPPGPPGLPGFKGALGPKGDRGFPGPPGPPGRTGLDGLPGPKGDVGPNGQPGPMGPPGLPGIGVQGPPGPPGIPGPIGQPGLHGIPGEKGDPGPPGLDVPGPPGERGSPGIPGAPGPIGPPGSPGLPGKAGASGFPGTKGEMGMMGPPGPPGPLGIPGRSGVPGLKGDDGLQGQPGLPGPTGEKGSKGEPGLPGPPGPMDPNLLGSKGEKGEPGLPGIPGVSGPKGYQGLPGDPGQPGLSGQPGLPGPPGPKGNPGLPGQPGLIGPPGLKGTIGDMGFPGPQGVEGPPGPSGVPGQPGSPGLPGQKGDKGDPGISSIGLPGLPGPKGEPGLPGYPGNPGIKGSVGDPGLPGLPGTPGAKGQPGLPGFPGTPGPPGPKGISGPPGNPGLPGEPGPVGGGGHPGQPGPPGEKGKPGQDGIPGPAGQKGEPGQPGFGNPGPPGLPGLSGQKGDGGLPGIPGNPGLPGPKGEPGFHGFPGVQGPPGPPGSPGPALEGPKGNPGPQGPPGRPGPTGFQGLPGPEGPPGLPGNGGIKGEKGNPGQPGLPGLPGLKGDQGPPGLQGNPGRPGLNGMKGDPGLPGVPGFPGMKGPSGVPGSAGPEGEPGLIGPPGPPGLPGPSGQSIIIKGDAGPPGIPGQPGLKGLPGPQGPQGLPGPTGPPGDPGRNGLPGFDGAGGRKGDPGLPGQPGTRGLDGPPGPDGLQGPPGPPGTSSVAHGFLITRHSQTTDAPQCPQGTLQVYEGFSLLYVQGNKRAHGQDLGTAGSCLRRFSTMPFMFCNINNVCNFASRNDYSYWLSTPEPMPMSMQPLKGQSIQPFISRCAVCEAPAVVIAVHSQTIQIPHCPQGWDSLWIGYSFMMHTSAGAEGSGQALASPGSCLEEFRSAPFIECHGRGTCNYYANSYSFWLATVDVSDMFSKPQSETLKAGDLRTRISRCQVCMKRT

SEQ ID NO: 10911 - protein, 930 aa, Homo sapiens
MLLGWASLLLCAFRLPLAAVGPAATPAQDKAGQPPTAAAAAQPRRRQGEEVQERAEPPGHPHPLAQRRRSKGLVQNIDQLYSGGGKVGYLVYAGGRRFLLDLERDGSVGIAGFVPAGGGTSAPWRHRSHCFYRGTVDGSPRSLAVFDLCGGLDGFFAVKHARYTLKPLLRGPWAEEEKGRVYGDGSARILHVYTREGFSFEALPPRASCETPASTPEAHEHAPAHSNPSGRAALASQLLDQSALSPAGGSGPQTWWRRRRRSISRARQVELLLVADASMARLYGRGLQHYLLTLASIANRLYSHASIENHIRLAVVKVVVLGDKDKSLEVSKNAATTLKNFCKWQHQHNQLGDDHEEHYDAAILFTREDLCGHHSCDTLGMADVGTICSPERSCAVIEDDGLHAAFTVAHEIGHLLGLSHDDSKFCEETFGSTEDKRLMSSILTSIDASKPWSKCTSATITEFLDDGHGNCLLDLPRKQILGPEELPGQTYDATQQCNLTFGPEYSVCPGMDVCARLWCAVVRQGQMVCLTKKLPAVEGTPCGKGRICLQGKCVDKTKKKYYSTSSHGNWGSWGSWGQCSRSCGGGVQFAYRHCNNPAPRNNGRYCTGKRAIYRSCSLMPCPPNGKSFRHEQCEAKNGYQSDAKGVKTFVEWVPKYAGVLPADVCKLTCRAKGTGYYVVFSPKVTDGTECRLYSNSVCVRGKCVRTGCDGIIGSKLQYDKCGVCGGDNSSCTKIVGTFNKKSKGYTDVVRIPEGATHIKVRQFKAKDQTRFTAYLALKKKNGEYLINGKYMISTSETIIDINGTVMNYSGWSHRDDFLHGMGYSATKEILIVQILATDPTKPLDVRYSFFVPKKSTPKVNSVTSHGSNKVGSHTSQPQWVTGPWLACSRTCDTGWHTRTVQCQDGNRKLAKGCPLSQRPSAFKQCLLKKC

SEQ ID NO: 10912 - protein, 187 aa, Homo sapiens
MGNKQTVFTHEQLEAYQDCTFFTRKEIMRLFYRYQDLAPQLVPLDYTTCPDVKVPYELIGSMPELKDNPFRQRIAQVFSEDGDGHMTLDNFLDMFSVMSEMAPRDLKAYYAFKIYDFNNDDYICAWDLEQTVTKLTRGGLSAEEVSLVCEKVLDEADGDHDGRLSLEDFQNMILRAPDFLSTFHIRI

SEQ ID NO: 10913 - protein, 138 aa, Homo sapiens
MGNKQTVFTHEQLEAYQDNPFRQRIAQVFSEDGDGHMTLDNFLDMFSVMSEMAPRDLKAYYAFKIYDFNNDDYICAWDLEQTVTKLTRGGLSAEEVSLVCEKVLDEADGDHDGRLSLEDFQNMILRAPDFLSTFHIRI

SEQ ID NO: 10914 - protein, 1691 aa, Homo sapiens
MLINKLWLLLVTLCLTEELAAAGEKSYGKPCGGQDCSGSCQCFPEKGARGRPGPIGIQGPTGPQGFTGSTGLSGLKGERGFPGLLGPYGPKGDKGPMGVPGFLGINGIPGHPGQPGPRGPPGLDGCNGTQGAVGFPGPDGYPGLLGPPGLPGQKGSKGDPVLAPGSFKGMKGDPGLPGLDGITGPQGAPGFPGAVGPAGPPGLQGPPGPPGPLGPDGNMGLGFQGEKGVKGDVGLPGPAGPPPSTGELEFMGFPKGKKGSKGEPGPKGFPGISGPPGFPGLGTTGEKGEKGEKGIPGLPGPRGPMGSEGVQGPPGQQGKKGTLGFPGLNGFQGIEGQKGDIGLPGPDVFIDIDGAVISGNPGDPGVPGLPGLKGDEGIQGLRGPSGVPGLPALSGVPGALGPQGFPGLKGDQGNPGRTTIGAAGLPGRDGLPGPPGPPGPPSPEFETETLHNKESGFPGLRGEQGPKGNLGLKGIKGDSGFCACDGGVPNTGPPGEPGPPGPWGLIGLPGLKGARGDRGSGGAQGPAGAPGLVGPLGPSGPKGKKGEPILSTIQGMPGDRGDSGSQGFRGVIGEPGKDGVPGLPGLPGLPGDGGQGFPGEKGLPGLPGEKGHPGPPGLPGNGLPGLPGPRGLPGDKGKDGLPGQQGLPGSKGITLPCIIPGSYGPSGFPGTPGFPGPKGSRGLPGTPGQPGSSGSKGEPGSPGLVHLPELPGFPGPRGEKGLPGFPGLPGKDGLPGMIGSPGLPGSKGATGDIFGAENGAPGEQGLQGLTGHKGFLGDSGLPGLKGVHGKPGLLGPKGERGSPGTPGQVGQPGTPGSSGPYGIKGKSGLPGAPGFPGISGHPGKKGTRGKKGPPGSIVKKGLPGLKGLPGNPGLVGLKGSPGSPGVAGLPALSGPKGEKGSVGFVGFPGIPGLPGIPGTRGLKGIPGSTGKMGPSGRAGTPGEKGDRGNPGPVGIPSPRRPMSNLWLKGDKGSQGSAGSNGFPGPRGDKGEAGRPGPPGLPGAPGLPGIIKGVSGKPGPPGFMGIRGLPGLKGSSGITGFPGMPGESGSQGIRGSPGLPGASGLPGLKGDNGQTVEISGSPGPKGQPGESGFKGTKGRDGLIGNIGFPGNKGEDGKVGVSGDVGLPGAPGFPGVAGMRGEPGLPGSSGHQGAIGPLGSPGLIGPKGFPGFPGLHGLNGLPGTKGTHGTPGPSITGVPGPAGLPGPKGEKGYPGIGIGAPGKPGLRGQKGDRGFPGLQGPAGLPGAPGISLPSLIAGQPGDPGRPGLDGERGRPGPAGPPGPPGPSSNQGDTGDPGFPGIPGPKGPKGDQGIPGFSGLPGELGLKGMRGEPGFMGTPGKVGPPGDPGFPGMKGKAGPRGSSGLQGDPGQTPTAEAVQVPPGPLGLPGIDGIPGLTGDPGAQGPVGLQGSKGLPGIPGKDGPSGLPGPPGALGDPGLPGLQGPPGFEGAPGQQGPFGMPGMPGQSMRVGYTLVKHSQSEQVPPCPIGMSQLWVGYSLLFVEGQEKAHNQDLGFAGSCLPRFSTMPFIYCNINEVCHYARRNDKSYWLSTTAPIPMMPVSQTQIPQYISRCSVCEAPSQAIAVHSQDITIPQCPLGWRSLWIGYSFLMHTAAGAEGGGQSLVSPGSCLEDFRATPFIECSGARGTCHYFANKYSFWLTTVEERQQFGELPVSETLKAGQLHTRVSRCQVCMKSL

SEQ ID NO: 10915 - protein, 1690 aa, Homo sapiens
MHPGLWLLLVTLCLTEELAAAGEKSYGKPCGGQDCSGSCQCFPEKGARGRPGPIGIQGPTGPQGFTGSTGLSGLKGERGFPGLLGPYGPKGDKGPMGVPGFLGINGIPGHPGQPGPRGPPGLDGCNGTQGAVGFPGPDGYPGLLGPPGLPGQKGSKGDPVLAPGSFKGMKGDPGLPGLDGITGPQGAPGFPGAVGPAGPPGLQGPPGPPGPLGPDGNMGLGFQGEKGVKGDVGLPGPAGPPPSTGELEFMGFPKGKKGSKGEPGPKGFPGISGPPGFPGLGTTGEKGEKGEKGIPGLPGPRGPMGSEGVQGPPGQQGKKGTLGFPGLNGFQGIEGQKGDIGLPGPDVFIDIDGAVISGNPGDPGVPGLPGLKGDEGIQGLRGPSGVPGLPALSGVPGALGPQGFPGLKGDQGNPGRTTIGAAGLPGRDGLPGPPGPPGPPSPEFETETLHNKESGFPGLRGEQGPKGNLGLKGIKGDSGFCACDGGVPNTGPPGEPGPPGPWGLIGLPGLKGARGDRGSGGAQGPAGAPGLVGPLGPSGPKGKKGEPILSTIQGMPGDRGDSGSQGFRGVIGEPGKDGVPGLPGLPGLPGDGGQGFPGEKGLPGLPGEKGHPGPPGLPGNGLPGLPGPRGLPGDKGKDGLPGQQGLPGSKGITLPCIIPGSYGPSGFPGTPGFPGPKGSRGLPGTPGQPGSSGSKGEPGSPGLVHLPELPGFPGPRGEKGLPGFPGLPGKDGLPGMIGSPGLPGSKGATGDIFGAENGAPGEQGLQGLTGHKGFLGDSGLPGLKGVHGKPGLLGPKGERGSPGTPGQVGQPGTPGSSGPYGIKGKSGLPGAPGFPGISGHPGKKGTRGKKGPPGSIVKKGLPGLKGLPGNPGLVGLKGSPGSPGVAGLPALSGPKGEKGSVGFVGFPGIPGLPGIPGTRGLKGIPGSTGKMGPSGRAGTPGEKGDRGNPGPVGIPSPRRPMSNLWLKGDKGSQGSAGSNGFPGPRGDKGEAGRPGPPGLPGAPGLPGIIKGVSGKPGPPGFMGIRGLPGLKGSSGITGFPGMPGESGSQGIRGSPGLPGASGLPGLKGDNGQTVEISGSPGPKGQPGESGFKGTKGRDGLIGNIGFPGNKGEDGKVGVSGDVGLPGAPGFPGVAGMRGEPGLPGSSGHQGAIGPLGSPGLIGPKGFPGFPGLHGLNGLPGTKGTHGTPGPSITGVPGPAGLPGPKGEKGYPGIGIGAPGKPGLRGQKGDRGFPGLQGPAGLPGAPGISLPSLIAGQPGDPGRPGLDGERGRPGPAGPPGPPGPSSNQGDTGDPGFPGIPGPKGPKGDQGIPGFSGLPGELGLKGMRGEPGFMGTPGKVGPPGDPGFPGMKGKAGPRGSSGLQGDPGQTPTAEAVQVPPGPLGLPGIDGIPGLTGDPGAQGPVGLQGSKGLPGIPGKDGPSGLPGPPGALGDPGLPGLQGPPGFEGAPGQQGPFGMPGMPGQSMRVGYTLVKHSQSEQVPPCPIGMSQLWVGYSLLFVEGQEKAHNQDLGFAGSCLPRFSTMPFIYCNINEVCHYARRNDKSYWLSTTAPIPMMPVSQTQIPQYISRCSVCEAPSQAIAVHSQDITIPQCPLGWRSLWIGYSFLMHTAAGAEGGGQSLVSPGSCLEDFRATPFIECSGARGTCHYFANKYSFWLTTVEERQQFGELPVSETLKAGQLHTRVSRCQVCMKSL

SEQ ID NO: 10916 - protein, 185 aa, Homo sapiens
MGQCLRYQMHWEDLEEYQALTFLTRNEILCIHDTFLKLCPPGKYYKEATLTMDQVSSLPALRVNPFRDRICRVFSHKGMFSFEDVLGMASVFSEQACPSLKIEYAFRIYDFNENGFIDEEDLQRIILRLLNSDDMSEDLLMDLTNHVLSESDLDNDNMLSFSEFEHAMAKSPDFMNSFRIHFWGC

SEQ ID NO: 10917 - protein, 889 aa, Homo sapiens
MLPAPAAPRWPPLLLLLLLLLPLARGAPARPAAGGQASELVVPTRLPGSAGELALHLSAFGKGFVLRLAPDDSFLAPEFKIERLGGSGRATGGERGLRGCFFSGTVNGEPESLAAVSLCRGLSGSFLLDGEEFTIQPQGAGGSLAQPHRLQRWGPAGARPLPRGPEWEVETGEGQRQERGDHQEDSEEESQEEEAEGASEPPPPLGATSRTKRFVSEARFVETLLVADASMAAFYGADLQNHILTLMSVAARIYKHPSIKNSINLMVVKVLIVEDEKWGPEVSDNGGLTLRNFCNWQRRFNQPSDRHPEHYDTAILLTRQNFCGQEGLCDTLGVADIGTICDPNKSCSVIEDEGLQAAHTLAHELGHVLSMPHDDSKPCTRLFGPMGKHHVMAPLFVHLNQTLPWSPCSAMYLTELLDGGHGDCLLDAPAAALPLPTGLPGRMALYQLDQQCRQIFGPDFRHCPNTSAQDVCAQLWCHTDGAEPLCHTKNGSLPWADGTPCGPGHLCSEGSCLPEEEVERPKPVADGGWAPWGPWGECSRTCGGGVQFSHRECKDPEPQNGGRYCLGRRAKYQSCHTEECPPDGKSFREQQCEKYNAYNYTDMDGNLLQWVPKYAGVSPRDRCKLFCRARGRSEFKVFEAKVIDGTLCGPETLAICVRGQCVKAGCDHVVDSPRKLDKCGVCGGKGNSCRKVSGSLTPTNYGYNDIVTIPAGATNIDVKQRSHPGVQNDGNYLALKTADGQYLLNGNLAISAIEQDILVKGTILKYSGSIATLERLQSFRPLPEPLTVQLLTVPGEVFPPKVKYTFFVPNDVDFSMQSSKERATTNIIQPLLHAQWVLGDWSECSSTCGAGWQRRTVECRDPSGQASATCNKALKPEDAKPCESQLCPL

SEQ ID NO: 10918 - protein, 378 aa, Homo sapiens
MHNLYSITGYPDPPGTMEEEEEDDDYENSTPPYKDLPPKPGTMEEEEEDDDYENSTPPYKDLPPKPGTMEEEEEDDDYENSTPPYKDLPPKPGSSAPPRPPRAAKETEKPPLPCKPRNMTGLDLAAVTCPPPQLAVNLEPSPLQPSLAATPVPWLNQRSGGPGCCQKRWMVYLCLLVVTSLFLGCLGLTVTLIKYQELMEELRMLSFQQMTWRTNMTGMAGLAGLKHDIARVRADTNQSLVELWGLLDCRRITCPEGWLPFEGKCYYFSPSTKSWDEARMFCQENYSHLVIINSFAEHNFVAKAHGSPRVYWLGLNDRAQEGDWRWLDGSPVTLSFWEPEEPNNIHDEDCATMNKGGTWNDLSCYKTTYWICERKCSC

SEQ ID NO: 10919 - protein, 265 aa, Homo sapiens
MHNLYSITGYPDPPGTMEEEEEDDDYENSTPPYKDLPPKPGTMEEEEEDDDYENSTPPYKDLPPKPGTMEEEEEDDDYENSTPPYKDLPPKPGSSAPPRPPRAAKETEKPPLPCKPRNMTGLDLAAVTCPPPQLAVNLEPSPLQPSLAATPVPWLNQRSGGPGCCQKRWMVYLCLLVVTSLFLGCLGLTVTLIKYQELMEELRMLSFQQMTWRTNMTGMAGLAGLKHDIARVRADTNQSLVELWGLLEFCGQGPWLSTGVLAGAE

SEQ ID NO: 10920 - protein, 306 aa, Homo sapiens
MHNLYSITGYPDPPGTMEEEEEDDDYENSTPPYKDLPPKPGTMEEEEEDDDYENSTPPYKDLPPKPGTMEEEEEDDDYENSTPPYKDLPPKPGSSAPPRPPRAAKETEKPPLPCKPRNMTGLDLAAVTCPPPQLAVNLEPSPLQPSLAATPVPWLNQRSGGPGCCQKRWMVYLCLLVVTSLFLGCLGLTVTLIKYQELMEELRMLSFQQMTWRTNMTGMAGLAGLKHDIARVRADTNQSLVELWGLLDCRRITCPEGWLPFEGKCYYFSPSTKSWDEARMFCQENYSHLVIINSFAEHLLGARGTQ

SEQ ID NO: 10921 - protein, 248 aa, Homo sapiens
MAAQSAPKVVLKSTTKMSLNERFTNMLKNKQPTPVNIRASMQQQQQLASARNRRLAQQMENRPSVQAALKLKQSLKQRLGKSNIQARLGRPIGALARGAIGGRGLPIIQRGLPRGGLRGGRATRTLLRGGMSLRGQNLLRGGRAVAPRMGLRRGGVRGRGGPGRGGLGRGAMGRGGIGGRGRGMIGRGRGGFGGRGRGRGRGRGALARPVLTKEQLDNQLDAYMSKTKGHLDAELDAYMAQTDPETND

SEQ ID NO: 10922 - protein, 249 aa, Homo sapiens
MAAQSAPKVVLKSTTKMSLNERFTNMLKNKQPTPVNIRASMQQQQQLASARNRRLAQQMENRPSVQAALKLKQKSLKQRLGKSNIQARLGRPIGALARGAIGGRGLPIIQRGLPRGGLRGGRATRTLLRGGMSLRGQNLLRGGRAVAPRMGLRRGGVRGRGGPGRGGLGRGAMGRGGIGGRGRGMIGRGRGGFGGRGRGRGRGRGALARPVLTKEQLDNQLDAYMSKTKGHLDAELDAYMAQTDPETND

SEQ ID NO: 10923 - protein, 202 aa, Homo sapiens
MAAQSAPKVVLKSTTKMSLNERFTNMLKNKQPTPVNIRASMQQQQQLASARNRRLAQQMENRPSVQAALKLKQSLKQRLGKSNIQARLGRPIGALARGAIGGRGLPIIQRGLPRGGLRGGRATRTLLRGGMSLRGRGMIGRGRGGFGGRGRGRGRGRGALARPVLTKEQLDNQLDAYMSKTKGHLDAELDAYMAQTDPETND

SEQ ID NO: 10924 - protein, 241 aa, Homo sapiens
MAEEQPQVELFVKAGSDGAKIGNCPFSQRLFMVLWLKGVTFNVTTVDTKRRTETVQKLCPGGQLPFLLYGTEVHTDTNKIEEFLEAVLCPPRYPKLAALNPESNTAGLDIFAKFSAYIKNSNPALNDNLEKGLLKALKVLDNYLTSPLPEEVDETSAEDEGVSQRKFLDGNELTLADCNLLPKLHIVQVVCKKYRGFTIPEAFRGVHRYLSNAYAREEFASTCPDDEEIELAYEQVAKALK

SEQ ID NO: 10925 - protein, 446 aa, Homo sapiens
MLHPETSPGRGHLLAVLLALLGTAWAEVWPPQLQEQAPMAGALNRKESFLLLSLHNRLRSWVQPPAADMRRLDWSDSLAQLAQARAALCGTPTPSLASGLWRTLQVGWNMQLLPAGLVSFVEVVSLWFAEGQRYSHAAGECARNATCTHYTQLVWATSSQLGCGRHLCSAGQAAIEAFVCAYSPRGNWEVNGKTIVPYKKGAWCSLCTASVSGCFKAWDHAGGLCEVPRNPCRMSCQNHGRLNISTCHCHCPPGYTGRYCQVRCSLQCVHGRFREEECSCVCDIGYGGAQCATKVHFPFHTCDLRIDGDCFMVSSEADTYYRARMKCQRKGGVLAQIKSQKVQDILAFYLGRLETTNEVIDSDFETRNFWIGLTYKTAKDSFRWATGEHQAFTSFAFGQPDNHGFGNCVELQASAAFNWNDQRCKTRNRYICQFAQEHISRWGPGS

SEQ ID NO: 10926 - protein, 106 aa, Homo sapiens
MGAASAGKRGQKGSWQQTPGSEWANLDYPGPGLTYKTAKDSFRWATGEHQAFTSFAFGQPDNHGFGNCVELQASAAFNWNDQRCKTRNRYICQFAQEHISRWGPGS

SEQ ID NO: 10927 - protein, 455 aa, Homo sapiens
MLHPETSPGRGHLLAVLLALLGTTWAEVWPPQLQEQAPMAGALNRKESFLLLSLHNRLRSWVQPPAADMRRLDWSDSLAQLAQARAALCGIPTPSLASGLWRTLQVGWNMQLLPAGLASFVEVVSLWFAEGQRYSHAAGECARNATCTHYTQLVWATSSQLGCGRHLCSAGQTAIEAFVCAYSPGGNWEVNGKTIIPYKKGAWCSLCTASVSGCFKAWDHAGGLCEVPRNPCRMSCQNHGRLNISTCHCHCPPGYTGRYCQVRCSLQCVHGRFREEECSCVCDIGYGGAQCATKVHFPFHTCDLRIDGDCFMVSSEADTYYRARMKCQRKGGVLAQIKSQKVQDILAFYLGRLETTNEVIDSDFETRNFWIGLTYKTAKDSFRWATGEHQAFTSFAFGQPDNHGLVWLSAAMGFGNCVELQASAAFNWNDQRCKTRNRYICQFAQEHISRWGPGS

SEQ ID NO: 10928 - protein, 277 aa, Homo sapiens
MLHPETSPGRGHLLAVLLALLGTTWAEVWPPQLQEQAPMAGALNRKESFLLLSLHNRLRSWVQPPAADMRRLLVWATSSQLGCGRHLCSAGQTAIEAFVCAYSPGGNWEVNGKTIIPYKKGAWCSLCTASVSGCFKAWDHAGGLCEVPRNPCRMSCQNHGRLNISTCHCHCPPGYTGRYCQGHLPNSNMPHSAMGTKPKTPGVPAIGSLVRCSLQCVHGRFREEECSCVCDIGYGGAQCASESCPRAPKEPAPLKTPLQWGISSQEPAVCLSFQLIQ

SEQ ID NO: 10929 - protein, 1935 aa, Homo sapiens
MQFVSWATLLTLLVRDLAEMGSPDAAAAVRKDRLHPRQVKLLETLSEYEIVSPIRVNALGEPFPTNVHFKRTRRSINSATDPWPAFASSSSSSTSSQAHYRLSAFGQQFLFNLTANAGFIAPLFTVTLLGTPGVNQTKFYSEEEAELKHCFYKGYVNTNSEHTAVISLCSGMLGTFRSHDGDYFIEPLQSMDEQEDEEEQNKPHIIYRRSAPQREPSTGRHACDTSEHKNRHSKDKKKTRARKWGERINLAGDVAALNSGLATEAFSAYGNKTDNTREKRTHRRTKRFLSYPRFVEVLVVADNRMVSYHGENLQHYILTLMSIVASIYKDPSIGNLINIVIVNLIVIHNEQDGPSISFNAQTTLKNFCQWQHSKNSPGGIHHDTAVLLTRQDICRAHDKCDTLGLAELGTICDPYRSCSISEDSGLSTAFTIAHELGHVFNMPHDDNNKCKEEGVKSPQHVMAPTLNFYTNPWMWSKCSRKYITEFLDTGYGECLLNEPESRPYPLPVQLPGILYNVNKQCELIFGPGSQVCPYMMQCRRLWCNNVNGVHKGCRTQHTPWADGTECEPGKHCKYGFCVPKEMDVPVTDGSWGSWSPFGTCSRTCGGGIKTAIRECNRPEPKNGGKYCVGRRMKFKSCNTEPCLKQKRDFRDEQCAHFDGKHFNINGLLPNVRWVPKYSGILMKDRCKLFCRVAGNTAYYQLRDRVIDGTPCGQDTNDICVQGLCRQAGCDHVLNSKARRDKCGVCGGDNSSCKTVAGTFNTVHYGYNTVVRIPAGATNIDVRQHSFSGETDDDNYLALSSSKGEFLLNGNFVVTMAKREIRIGNAVVEYSGSETAVERINSTDRIEQELLLQVLSVGKLYNPDVRYSFNIPIEDKPQQFYWNSHGPWQACSKPCQGERKRKLVCTRESDQLTVSDQRCDRLPQPGHITEPCGTDCDLRWHVASRSECSAQCGLGYRTLDIYCAKYSRLDGKTEKVDDGFCSSHPKPSNREKCSGECNTGGWRYSAWTECSKSCDGGTQRRRAICVNTRNDVLDDSKCTHQEKVTIQRCSEFPCPQWKSGDWSECLVTCGKGHKHRQVWCQFGEDRLNDRMCDPETKPTSMQTCQQPECASWQAGPWGQCSVTCGQGYQLRAVKCIIGTYMSVVDDNDCNAATRPTDTQDCELPSCHPPPAAPETRRSTYSAPRTQWRFGSWTPCSATCGKGTRMRYVSCRDENGSVADESACATLPRPVAKEECSVTPCGQWKALDWSSCSVTCGQGRATRQVMCVNYSDHVIDRSECDQDYIPETDQDCSMSPCPQRTPDSGLAQHPFQNEDYRPRSASPSRTHVLGGNQWRTGPWGACSSTCAGGSQRRVVVCQDENGYTANDCVERIKPDEQRACESGPCPQWAYGNWGECTKLCGGGIRTRLVVCQRSNGERFPDLSCEILDKPPDREQCNTHACPHDAAWSTGPWSSCSVSCGRGHKQRNVYCMAKDGSHLESDYCKHLAKPHGHRKCRGGRCPKWKAGAWSQCSVSCGRGVQQRHVGCQIGTHKIARETECNPYTRPESERDCQGPRCPLYTWRAEEWQECTKTCGEGSRYRKVVCVDDNKNEVHGARCDVSKRPVDRESCSLQPCEYVWITGEWSECSVTCGKGYKQRLVSCSEIYTGKENYEYSYQTTINCPGTQPPSVHPCYLRDCPVSATWRVGNWGSCSVSCGVGVMQRSVQCLTNEDQPSHLCHTDLKPEERKTCRNVYNCELPQNCKEVKRLKGASEDGEYFLMIRGKLLKIFCAGMHSDHPKEYVTLVHGDSENFSEVYGHRLHNPTECPYNGSRRDDCQCRKDYTAAGFSSFQKIRIDLTSMQIITTDLQFARTSEGHPVPFATAGDCYSAAKCPQGRFSINLYGTGLSLTESARWISQGNYAVSDIKKSPDGTRVVGKCGGYCGKCTPSSGTGLEVRVL

SEQ ID NO: 10930 - protein, 1629 aa, Homo sapiens
MQFVSWATLLTLLVRDLAEMGSPDAAAAVRKDRLHPRQVKLLETLSEYEIVSPIRVNALGEPFPTNVHFKRTRRSINSATDPWPAFASSSSSSTSSQAHYRLSAFGQQFLFNLTANAGFIAPLFTVTLLGTPGVNQTKFYSEEEAELKHCFYKGYVNTNSEHTAVISLCSGMLGTFRSHDGDYFIEPLQSMDEQEDEEEQNKPHIIYRRSAPQREPSTGRHACDTSEHKNRHSKDKKKTRARKWGERINLAGDVAALNSGLATEAFSAYGNKTDNTREKRTHRRTKRFLSYPRFVEVLVVADNRMVSYHGENLQHYILTLMSIVASIYKDPSIGNLINIVIVNLIVIHNEQDGPSISFNAQTTLKNFCQWQHSKNSPGGIHHDTAVLLTRQDICRAHDKCDTLGLAELGTICDPYRSCSISEDSGLSTAFTIAHELGHVFNMPHDDNNKCKEEGVKSPQHVMAPTLNFYTNPWMWSKCSRKYITEFLDTGYGECLLNEPESRPYPLPVQLPGILYNVNKQCELIFGPGSQVCPYMMQCRRLWCNNVNGVHKGCRTQHTPWADGTECEPGKHCKYGFCVPKEMDVPVTDGSWGSWSPFGTCSRTCGGGIKTAIRECNRPEPKNGGKYCVGRRMKFKSCNTEPCLKQKRDFRDEQCAHFDGKHFNINGLLPNVRWVPKYSGILMKDRCKLFCRVAGNTAYYQLRDRVIDGTPCGQDTNDICVQGLCRQAGCDHVLNSKARRDKCGVCGGDNSSCKTVAGTFNTVHYGYNTVVRIPAGATNIDVRQHSFSGETDDDNYLALSSSKGEFLLNGNFVVTMAKREIRIGNAVVEYSGSETAVERINSTDRIEQELLLQVLSVGKLYNPDVRYSFNIPIEDKPQQFYWNSHGPWQACSKPCQGERKRKLVCTRESDQLTVSDQRCDRLPQPGHITEPCGTDCDLRWHVASRSECSAQCGLGYRTLDIYCAKYSRLDGKTEKVDDGFCSSHPKPSNREKCSGECNTGGWRYSAWTECSKSCDGGTQRRRAICVNTRNDVLDDSKCTHQEKVTIQRCSEFPCPQWKSGDWSECLVTCGKGHKHRQVWCQFGEDRLNDRMCDPETKPTSMQTCQQPECASWQAGPWGQCSVTCGQGYQLRAVKCIIGTYMSVVDDNDCNAATRPTDTQDCELPSCHPPPAAPETRRSTYSAPRTQWRFGSWTPCSATCGKGTRMRYVSCRDENGSVADESACATLPRPVAKEECSVTPCGQWKALDWSSCSVTCGQGRATRQVMCVNYSDHVIDRSECDQDYIPETDQDCSMSPCPQRTPDSGLAQHPFQNEDYRPRSASPSRTHVLGGNQWRTGPWGACSSTCAGGSQRRVVVCQDENGYTANDCVERIKPDEQRACESGPCPQWAYGNWGECTKLCGGGIRTRLVVCQRSNGERFPDLSCEILDKPPDREQCNTHACPHDAAWSTGPWSSCSVSCGRGHKQRNVYCMAKDGSHLESDYCKHLAKPHGHRKCRGGRCPKWKAGAWSQCSVSCGRGVQQRHVGCQIGTHKIARETECNPYTRPESERDCQGPRCPLYTWRAEEWQECTKTCGEGSRYRKVVCVDDNKNEVHGARCDVSKRPVDRESCSLQPCEYVWITGEWSEVPSWEL

SEQ ID NO: 10931 - protein, 1072 aa, Homo sapiens
MQFVSWATLLTLLVRDLAEMGSPDAAAAVRKDRLHPRQVKLLETLSEYEIVSPIRVNALGEPFPTNVHFKRTRRSINSATDPWPAFASSSSSSTSSQAHYRLSAFGQQFLFNLTANAGFIAPLFTVTLLGTPGVNQTKFYSEEEAELKHCFYKGYVNTNSEHTAVISLCSGMLGTFRSHDGDYFIEPLQSMDEQEDEEEQNKPHIIYRRSAPQREPSTGRHACDTSEHKNRHSKDKKKTRARKWGERINLAGDVAALNSGLATEAFSAYGNKTDNTREKRTHRRTKRFLSYPRFVEVLVVADNRMVSYHGENLQHYILTLMSIVASIYKDPSIGNLINIVIVNLIVIHNEQDGPSISFNAQTTLKNFCQWQHSKNSPGGIHHDTAVLLTRQDICRAHDKCDTLGLAELGTICDPYRSCSISEDSGLSTAFTIAHELGHVFNMPHDDNNKCKEEGVKSPQHVMAPTLNFYTNPWMWSKCSRKYITEFLDTGYGECLLNEPESRPYPLPVQLPGILYNVNKQCELIFGPGSQVCPYMMQCRRLWCNNVNGVHKGCRTQHTPWADGTECEPGKHCKYGFCVPKEMDVPVTDGSWGSWSPFGTCSRTCGGGIKTAIRECNRPEPKNGGKYCVGRRMKFKSCNTEPCLKQKRDFRDEQCAHFDGKHFNINGLLPNVRWVPKYSGILMKDRCKLFCRVAGNTAYYQLRDRVIDGTPCGQDTNDICVQGLCRQAGCDHVLNSKARRDKCGVCGGDNSSCKTVAGTFNTVHYGYNTVVRIPAGATNIDVRQHSFSGETDDDNYLALSSSKGEFLLNGNFVVTMAKREIRIGNAVVEYSGSETAVERINSTDRIEQELLLQVLSVGKLYNPDVRYSFNIPIEDKPQQFYWNSHGPWQACSKPCQGERKRKLVCTRESDQLTVSDQRCDRLPQPGHITEPCGTDCDLRWHVASRSECSAQCGLGYRTLDIYCAKYSRLDGKTEKVDDGFCSSHPKPSNREKCSGECNTGGWRYSAWTECSKSCDGGTQRRRAICVNTRNDVLDDSKCTHQEKVTIQRCSEFPCPQWKSGDWSEVRWEGCYFP

SEQ ID NO: 10932 - protein, 1907 aa, Homo sapiens
MQFVSWATLLTLLVRDLAEMGSPDAAAAVRKDRLHPRQVKLLETLSEYEIVSPIRVNALGEPFPTNVHFKRTRRSINSATDPWPAFASSSSSSTSSQAHYRLSAFGQQFLFNLTANAGFIAPLFTVTLLGTPGVNQTKFYSEEEAELKHCFYKGYVNTNSEHTAVISLCSGMLGTFRSHDGDYFIEPLQSMDEQEDEEEQNKPHIIYRRSAPQREPSTGRHACDTSEHKNRHSKDKKKTRARKWGERINLAGDVAALNSGLATEAFSAYGNKTDNTREKRTHRRTKRFLSYPRFVEVLVVADNRMVSYHGENLQHYILTLMSIDGPSISFNAQTTLKNFCQWQHSKNSPGGIHHDTAVLLTRQDICRAHDKCDTLGLAELGTICDPYRSCSISEDSGLSTAFTIAHELGHVFNMPHDDNNKCKEEGVKSPQHVMAPTLNFYTNPWMWSKCSRKYITEFLDTGYGECLLNEPESRPYPLPVQLPGILYNVNKQCELIFGPGSQVCPYMMQCRRLWCNNVNGVHKGCRTQHTPWADGTECEPGKHCKYGFCVPKEMDVPVTDGSWGSWSPFGTCSRTCGGGIKTAIRECNRPEPKNGGKYCVGRRMKFKSCNTEPCLKQKRDFRDEQCAHFDGKHFNINGLLPNVRWVPKYSGILMKDRCKLFCRVAGNTAYYQLRDRVIDGTPCGQDTNDICVQGLCRQAGCDHVLNSKARRDKCGVCGGDNSSCKTVAGTFNTVHYGYNTVVRIPAGATNIDVRQHSFSGETDDDNYLALSSSKGEFLLNGNFVVTMAKREIRIGNAVVEYSGSETAVERINSTDRIEQELLLQVLSVGKLYNPDVRYSFNIPIEDKPQQFYWNSHGPWQACSKPCQGERKRKLVCTRESDQLTVSDQRCDRLPQPGHITEPCGTDCDLRWHVASRSECSAQCGLGYRTLDIYCAKYSRLDGKTEKVDDGFCSSHPKPSNREKCSGECNTGGWRYSAWTECSKSCDGGTQRRRAICVNTRNDVLDDSKCTHQEKVTIQRCSEFPCPQWKSGDWSECLVTCGKGHKHRQVWCQFGEDRLNDRMCDPETKPTSMQTCQQPECASWQAGPWGQCSVTCGQGYQLRAVKCIIGTYMSVVDDNDCNAATRPTDTQDCELPSCHPPPAAPETRRSTYSAPRTQWRFGSWTPCSATCGKGTRMRYVSCRDENGSVADESACATLPRPVAKEECSVTPCGQWKALDWSSCSVTCGQGRATRQVMCVNYSDHVIDRSECDQDYIPETDQDCSMSPCPQRTPDSGLAQHPFQNEDYRPRSASPSRTHVLGGNQWRTGPWGACSSTCAGGSQRRVVVCQDENGYTANDCVERIKPDEQRACESGPCPQWAYGNWGECTKLCGGGIRTRLVVCQRSNGERFPDLSCEILDKPPDREQCNTHACPHDAAWSTGPWSSCSVSCGRGHKQRNVYCMAKDGSHLESDYCKHLAKPHGHRKCRGGRCPKWKAGAWSQCSVSCGRGVQQRHVGCQIGTHKIARETECNPYTRPESERDCQGPRCPLYTWRAEEWQECTKTCGEGSRYRKVVCVDDNKNEVHGARCDVSKRPVDRESCSLQPCEYVWITGEWSECSVTCGKGYKQRLVSCSEIYTGKENYEYSYQTTINCPGTQPPSVHPCYLRDCPVSATWRVGNWGSCSVSCGVGVMQRSVQCLTNEDQPSHLCHTDLKPEERKTCRNVYNCELPQNCKEVKRLKGASEDGEYFLMIRGKLLKIFCAGMHSDHPKEYVTLVHGDSENFSEVYGHRLHNPTECPYNGSRRDDCQCRKDYTAAGFSSFQKIRIDLTSMQIITTDLQFARTSEGHPVPFATAGDCYSAAKCPQGRFSINLYGTGLSLTESARWISQGNYAVSDIKKSPDGTRVVGKCGGYCGKCTPSSGTGLEVRVL

SEQ ID NO: 10933 - protein, 446 aa, Homo sapiens
MLHPETSPGRGHLLAVLLALLGTAWAEVWPPQLQEQAPMAGALNRKESFLLLSLHNRLRSWVQPPAADMRRLDWSDSLAQLAQARAALCGIPTPSLASGLWRTLQVGWNMQLLPAGLASFVEVVSLWFAEGQRYSHAAGECARNATCTHYTQLVWATSSQLGCGRHLCSAGQAAIEAFVCAYSPRGNWEVNGKTIVPYKKGAWCSLCTASVSGCFKAWDHAGGLCEVPRNPCRMSCQNHGRLNISTCHCHCPPGYTGRYCQVRCSLQCVHGRFREEECSCVCDIGYGGAQCATKVHFPFHTCDLRIDGDCFMVSSEADTYYRARMKCQRKGGVLAQIKSQKVQDILAFYLGRLETTNEVIDSDFETRNFWIGLTYKTAKDSFRWATGEHQAFTSFAFGQPDNHGFGNCVELQASAAFNWNNQRCKTRNRYICQFAQEHISRWGPGS

SEQ ID NO: 10934 - protein, 339 aa, Homo sapiens
MLHPETSPGRGHLLAVLLALLGTAWAEVWPPQLQEQAPMAGALNRKESFLLLSLHNRLRSWVQPPAADMRRLDWSDSLAQLAQARAALCGIPTPSLASGLWRTLQVGWNMQLLPAGLASFVEVVSLWFAEGQRYSHAAGECARNATCTHYTQLVWATSSQLGCGRHLCSAGQAAIEAFVCAYSPRGNWEVNGKTIVPYKKGAWCSLCTASVSGCFKAWDHAGGLCEVPRNPCRMSCQNHGRLNISTCHCHCPPGYTGRYCQVRCSLQCVHGRFREEECSCVCDIGYGGAQCATKVHFPFHTCDLRIDGDCFMVSSEADTYYRARMKCQVTVTPSFLGTP

SEQ ID NO: 10935 - protein, 1838 aa, Homo sapiens
MDVHTRWKARSALRPGAPLLPPLLLLLLWAPPPSRAAQPADLLKVLDFHNLPDGITKTTGFCATRRSSKGPDVAYRVTKDAQLSAPTKQLYPASAFPEDFSILTTVKAKKGSQAFLVSIYNEQGIQQIGLELGRSPVFLYEDHTGKPGPEDYPLFRGINLSDGKWHRIALSVHKKNVTLILDCKKKTTKFLDRSDHPMIDINGIIVFGTRILDEEVFEGDIQQLLFVSDHRAAYDYCEHYSPDCDTAVPDTPQSQDPNPDEYYTEGDGEGETYYYEYPYYEDPEDLGKEPTPSKKPVEAAKETTEVPEELTPTPTEAAPMPETSEGAGKEEDVGIGDYDYVPSEDYYTPSPYDDLTYGEGEENPDQPTDPGAGAEIPTSTADTSNSSNPAPPPGEGADDLEGEFTEETIRNLDENYYDPYYDPTSSPSEIGPGMPANQDTIYEGIGGPRGEKGQKGEPAIIEPGMLIEGPPGPEGPAGLPGPPGTMGPTGQVGDPGERGPPGRPGLPGADGLPGPPGTMLMLPFRFGGGGDAGSKGPMVSAQESQAQAILQQARLALRGPAGPMGLTGRPGPVGPPGSGGLKGEPGDVGPQGPRGVQGPPGPAGKPGRRGRAGSDGARGMPGQTGPKGDRGFDGLAGLPGEKGHRGDPGPSGPPGPPGDDGERGDDGEVGPRGLPGEPGPRGLLGPKGPPGPPGPPGVTGMDGQPGPKGNVGPQGEPGPPGQQGNPGAQGLPGPQGAIGPPGEKGPLGKPGLPGMPGADGPPGHPGKEGPPGEKGGQGPPGPQGPIGYPGPRGVKGADGIRGLKGTKGEKGEDGFPGFKGDMGIKGDRGEIGPPGPRGEDGPEGPKGRGGPNGDPGPLGPPGEKGKLGVPGLPGYPGRQGPKGSIGFPGFPGANGEKGGRGTPGKPGPRGQRGPTGPRGERGPRGITGKPGPKGNSGGDGPAGPPGERGPNGPQGPTGFPGPKGPPGPPGKDGLPGHPGQRGETGFQGKTGPPGPPGVVGPQGPTGETGPMGERGHPGPPGPPGEQGLPGLAGKEGTKGDPGPAGLPGKDGPPGLRGFPGDRGLPGPVGALGLKGNEGPPGPPGPAGSPGERGPAGAAGPIGIPGRPGPQGPPGPAGEKGAPGEKGPQGPAGRDGLQGPVGLPGPAGPVGPPGEDGDKGEIGEPGQKGSKGDKGEQGPPGPTGPQGPIGQPGPSGADGEPGPRGQQGLFGQKGDEGPRGFPGPPGPVGLQGLPGPPGEKGETGDVGQMGPPGPPGPRGPSGAPGADGPQGPPGGIGNPGAVGEKGEPGEAGEPGLPGEGGPPGPKGERGEKGESGPSGAAGPPGPKGPPGDDGPKGSPGPVGFPGDPGPPGEPGPAGQDGPPGDKGDDGEPGQTGSPGPTGEPGPSGPPGKRGPPGPAGPEGRQGEKGAKGEAGLEGPPGKTGPIGPQGAPGKPGPDGLRGIPGPVGEQGLPGSPGPDGPPGPMGPPGLPGLKGDSGPKGEKGHPGLIGLIGPPGEQGEKGDRGLPGPQGSSGPKGEQGITGPSGPIGPPGPPGLPGPPGPKGAKGSSGPTGPKGEAGHPGPPGPPGPPGEVIQPLPIQASRTRRNIDASQLLDDGNGENYVDYADGMEEIFGSLNSLKLEIEQMKRPLGTQQNPARTCKDLQLCHPDFPDGEYWVDPNQGCSRDSFKVYCNFTAGGSTCVFPDKKSEGARITSWPKENPGSWFSEFKRGKLLSYVDAEGNPVGVVQMTFLRLLSASAHQNVTYHCYQSVAWQDAATGSYDKALRFLGSNDEEMSYDNNPYIRALVDGCATKKGYQKTVLEIDTPKVEQVPIVDIMFNDFGEASQKFGFEVGPACFMG

SEQ ID NO: 10936 - protein, 1838 aa, Homo sapiens
MDVHTRWKARSALRPGAPLLPPLLLLLLWAPPPSRAAQPADLLKVLDFHNLPDGITKTTGFCATRRSSKGPDVAYRVTKDAQLSAPTKQLYPASAFPEDFSILTTVKAKKGSQAFLVSIYNEQGIQQIGLELGRSPVFLYEDHTGKPGPEDYPLFRGINLSDGKWHRIALSVHKKNVTLILDCKKKTTKFLDRSDHPMIDINGIIVFGTRILDEEVFEGDIQQLLFVSDHRAAYDYCEHYSPDCDTAVPDTPQSQDPNPDEYYTEGDGEGETYYYEYPYYEDPEDLGKEPTPSKKPVEAAKETTEVPEELTPTPTEAAPMPETSEGAGKEEDVGIGDYDYVPSEDYYTPSPYDDLTYGEGEENPDQPTDPGAGAEIPTSTADTSNSSNPAPPPGEGADDLEGEFTEETIRNLDENYYDPYYDPTSSPSEIGPGMPANQDTIYEGIGGPRGEKGQKGEPAIIEPGMLIEGPPGPEGPAGLPGPPGTMGPTGQVGDPGERGPPGRPGLPGADGLPGPPGTMLMLPFRFGGGGDAGSKGPMVSAQESQAQAILQQARLALRGPAGPMGLTGRPGPVGPPGSGGLKGEPGDVGPQGPRGVQGPPGPAGKPGRRGRAGSDGARGMPGQTGPKGDRGFDGLAGLPGEKGHRGDPGPSGPPGPPGDDGERGDDGEVGPRGLPGEPGPRGLLGPKGPPGPPGPPGVTGMDGQPGPKGNVGPQGEPGPPGQQGNPGAQGLPGPQGAIGPPGEKGPLGKPGLPGMPGADGPPGHPGKEGPPGEKGGQGPPGPQGPIGYPGPRGVKGADGIRGLKGTKGEKGEDGFPGFKGDMGIKGDRGEIGPPGPRGEDGPEGPKGRGGPNGDPGPLGPPGEKGKLGVPGLPGYPGRQGPKGSIGFPGFPGANGEKGGRGTPGKPGPRGQRGPTGPRGERGPRGITGKPGPKGNSGGDGPAGPPGERGPNGPQGPTGFPGPKGPPGPPGKDGLPGHPGQRGETGFQGKTGPPGPPGVVGPQGPTGETGPMGERGHPGPPGPPGEQGLPGLAGKEGTKGDPGPAGLPGKDGPPGLRGFPGDRGLPGPVGALGLKGNEGPPGPPGPAGSPGERGPAGAAGPIGIPGRPGPQGPPGPAGEKGAPGEKGPQGPAGRDGLQGPVGLPGPAGPVGPPGEDGDKGEIGEPGQKGSKGDKGEQGPPGPTGPQGPIGQPGPSGADGEPGPRGQQGLFGQKGDEGPRGFPGPPGPVGLQGLPGPPGEKGETGDVGQMGPPGPPGPRGPSGAPGADGPQGPPGGIGNPGAVGEKGEPGEAGEPGLPGEGGPPGPKGERGEKGESGPSGAAGPPGPKGPPGDDGPKGSPGPVGFPGDPGPPGEPGPAGQDGPPGDKGDDGEPGQTGSPGPTGEPGPSGPPGKRGPPGPAGPEGRQGEKGAKGEAGLEGPPGKTGPIGPQGAPGKPGPDGLRGIPGPVGEQGLPGSPGPDGPPGPMGPPGLPGLKGDSGPKGEKGHPGLIGLIGPPGEQGEKGDRGLPGPQGSSGPKGEQGITGPSGPIGPPGPPGLPGPPGPKGAKGSSGPTGPKGEAGHPGPPGPPGPPGEVIQPLPIQASRTRRNIDASQLLDDGNGENYVDYADGMEEIFGSLNSLKLEIEQMKRPLGTQQNPARTCKDLQLCHPDFPDGEYWVDPNQGCSRDSFKVYCNFTAGGSTCVFPDKKSEGSKMARWPKEQPSTWYSQYKRGSLLSYVDAEGNPVGVVQMTFLRLLSASAHQNVTYHCYQSVAWQDAATGSYDKALRFLGSNDEEMSYDNNPYIRALVDGCATKKGYQKTVLEIDTPKVEQVPIVDIMFNDFGEASQKFGFEVGPACFMG

SEQ ID NO: 10937 - protein, 1608 aa, Homo sapiens
MYSAHRPLMPASSAASRGLGMFVWTNVEPRSVAVFPWHSLVPFLAPSQPDPSVQPSEAQQPASHPVASNQSKEPAESAAVAHERPPGGTGSADPERPPGATCPESPGPGPPHPLGVVESGKGPPPTTEEEASGPPGEPRLDSETESDHDDAFLSIMSPEIQLPLPPGKRRTQSLSALPKERDSSSEKDGRSPNKREKDHIRRPMNAFMIFSKRHRALVHQRHPNQDNRTVSKILGEWWYALGPKEKQKYHDLAFQVKEAHFKAHPDWKWCNKDRKKSSSEAKPTSLGLAGGHKETRERSMSETGTAAAPGVSSELLSVAAQTLLSSDTKAPGSSSCGAERLHTVGGPGSARPRAFSHSGVHSLDGGEVDSQALQELTQMVSGPASYSGPKPSTQYGAPGPFAAPGEGGALAATGRPPLLPTRASRSQRAASEDMTSDEERMVICEEEGDDDVIADDGFGTTDIDLKCKERVTDSESGDSSGEDPEGNKGFGRKVFSPVIRSSFTHCRPPLDPEPPGPPDPPVAFGKGYGSAPSSSASSPASSSASAATSFSLGSGTFKAQESGQGSTAGPLRPPPPGAGGPATPSKATRFLPMDPATFRRKRPESVGGLEPPGPSVIAAPPSGGGNILQTLVLPPNKEEQEGGGARVPSAPAPSLAYGAPAAPLSRPAATMVTNVVRPVSSTPVPIASKPFPTSGRAEASPNDTAGARTEMGTGSRVPGGSPLGVSLVYSDKKSAAATSPAPHLVAGPLLGTVGKAPATVTNLLVGTPGYGAPAPPAVQFIAQGAPGGGTTAGSGAGAGSGPNGPVPLGILQPGALGKAGGITQVQYILPTLPQQLQVAPAPAPAPGTKAAAPSGPAPTTSIRFTLPPGTSTNGKVLAATAPTPGIPILQSVPSAPPPKAQSVSPVQAPPPGGSAQLLPGKVLVPLAAPSMSVRGGGAGQPLPLVSPPFSVPVQNGAQPPSKIIQLTPVPVSTPSGLVPPLSPATLPGPTSQPQKVLLPSSTRITYVQSAGGHALPLGTSPASSQAGTVTSYGPTSSVALGFTSLGPSGPAFVQPLLSAGQAPLLAPGQVGVSPVPSPQLPPACAAPGGPVITAFYSGSPAPTSSAPLAQPSQAPPSLVYTVATSTTPPAATILPKGPPAPATATPAPTSPFPSATAGSMTYSLVAPKAQRPSPKAPQKVKAAIASIPVGSFEAGASGRPGPAPRQPLEPGPVREPTAPESELEGQPTPPAPPPLPETWTPTARSSPPLPPPAEERTSAKGPETMASKFPSSSSDWRVPGQGLENRGEPPTPPSPAPAPAVAPGGSSESSSGRAAGDTPERKEAAGTGKKVKVRPPPLKKTFDSVDNRVLSEVDFEERFAELPEFRPEEVLPSPTLQSLATSPRAILGSYRKKRKNSTDLDSAPEDPTSPKRKMRRRSSCSSEPNTPKSAKCEGDIFTFDRTGTEAEDVLGELEYDKVPYSSLRRTLDQRRALVMQLFQDHGFFPSAQATAAFQARYADIFPSKVCLQLKIREVRQKIMQAATPTEQPPGAEAPLPVPPPTGTAAAPAPTPSPAGGPDPTSPSSDSGTAQAAPPLPPPPESGPGQPGWEGAPQPSPPPPGPSTAATGR

SEQ ID NO: 10938 - protein, 136 aa, Homo sapiens
MQRWTLWAAAFLTLHSAQAFPQTDISISPALPELPLPSLCPLFWMEFKGHCYRFFPLNKTWAEADLYCSEFSVGRKSAKLASIHSWEENVFVYDLVNSCVPGIPADVWTGLHDHRQVRKQWPLGPLGSSSQDSILI

SEQ ID NO: 10939 - protein, 3177 aa, Homo sapiens
MRKHRHLPLVAVFCLFLSGFPTTHAQQQQADVKNGAAADIIFLVDSSWTIGEEHFQLVREFLYDVVKSLAVGENDFHFALVQFNGNPHTEFLLNTYRTKQEVLSHISNMSYIGGTNQTGKGLEYIMQSHLTKAAGSRAGDGVPQVIVVLTDGHSKDGLALPSAELKSADVNVFAIGVEDADEGALKEIASEPLNMHMFNLENFTSLHDIVGNLVSCVHSSVSPERAGDTETLKDITAQDSADIIFLIDGSNNTGSVNFAVILDFLVNLLEKLPIGTQQIRVGVVQFSDEPRTMFSLDTYSTKAQVLGAVKALGFAGGELANIGLALDFVVENHFTRAGGSRVEEGVPQVLVLISAGPSSDEIRYGVVALKQASVFSFGLGAQAASRAELQHIATDDNLVFTVPEFRSFGDLQEKLLPYIVGVAQRHIVLKPPTIVTQVIEVNKRDIVFLVDGSSALGLANFNAIRDFIAKVIQRLEIGQDLIQVAVAQYADTVRPEFYFNTHPTKREVITAVRKMKPLDGSALYTGSALDFVRNNLFTSSAGYRAAEGIPKLLVLITGGKSLDEISQPAQELKRSSIMAFAIGNKGADQAELEEIAFDSSLVFIPAEFRAAPLQGMLPGLLAPLRTLSGTPEVHSNKRDIIFLLDGSANVGKTNFPYVRDFVMNLVNSLDIGNDNIRVGLVQFSDTPVTEFSLNTYQTKSDILGHLRQLQLQGGSGLNTGSALSYVYANHFTEAGGSRIREHVPQLLLLLTAGQSEDSYLQAANALTRAGILTFCVGASQANKAELEQIAFNPSLVYLMDDFSSLPALPQQLIQPLTTYVSGGVEEVPLAQPESKRDILFLFDGSANLVGQFPVVRDFLYKIIDELNVKPEGTRIAVAQYSDDVKVESRFDEHQSKPEILNLVKRMKIKTGKALNLGYALDYAQRYIFVKSAGSRIEDGVLQFLVLLVAGRSSDRVDGPASNLKQSGVVPFIFQAKNADPAELEQIVLSPAFILAAESLPKIGDLHPQIVNLLKSVHNGAPAPVSGEKDVVFLLDGSEGVRSGFPLLKEFVQRVVESLDVGQDRVRVAVVQYSDRTRPEFYLNSYMNKQDVVNAVRQLTLLGGPTPNTGAALEFVLRNILVSSAGSRITEGVPQLLIVLTADRSGDDVRNPSVVVKRGGAVPIGIGIGNADITEMQTISFIPDFAVAIPTFRQLGTVQQVISERVTQLTREELSRLQPVLQPLPSPGVGGKRDVVFLIDGSQSAGPEFQYVRTLIERLVDYLDVGFDTTRVAVIQFSDDPKVEFLLNAHSSKDEVQNAVQRLRPKGGRQINVGNALEYVSRNIFKRPLGSRIEEGVPQFLVLISSGKSDDEVDDPAVELKQFGVAPFTIARNADQEELVKISLSPEYVFSVSTFRELPSLEQKLLTPITTLTSEQIQKLLASTRYPPPAVESDAADIVFLIDSSEGVRPDGFAHIRDFVSRIVRRLNIGPSKVRVGVVQFSNDVFPEFYLKTYRSQAPVLDAIRRLRLRGGSPLNTGKALEFVARNLFVKSAGSRIEDGVPQHLVLVLGGKSQDDVSRFAQVIRSSGIVSLGVGDRNIDRTELQTITNDPRLVFTVREFRELPNIEERIMNSFGPSAATPAPPGVDTPPPSRPEKKKADIVFLLDGSINFRRDSFQEVLRFVSEIVDTVYEDGDSIQVGLVQYNSDPTDEFFLKDFSTKRQIIDAINKVVYKGGRHANTKVGLEHLRVNHFVPEAGSRLDQRVPQIAFVITGGKSVEDAQDVSLALTQRGVKVFAVGVRNIDSEEVGKIASNSATAFRVGNVQELSELSEQVLETLHDAMHETLCPGVTDAAKACNLDVILGFDGSRDQNVFVAQKGFESKVDAILNRISQMHRVSCSGGRSPTVRVSVVANTPSGPVEAFDFDEYQPEMLEKFRNMRSQHPYVLTEDTLKVYLNKFRQSSPDSVKVVIHFTDGADGDLADLHRASENLRQEGVRALILVGLERVVNLERLMHLEFGRGFMYDRPLRLNLLDLDYELAEQLDNIAEKACCGVPCKCSGQRGDRGPIGSIGPKGIPGEDGYRGYPGDEGGPGERGPPGVNGTQGFQGCPGQRGVKGSRGFPGEKGEVGEIGLDGLDGEDGDKGLPGSSGEKGNPGRRGDKGPRGEKGERGDVGIRGDPGNPGQDSQERGPKGETGDLGPMGVPGRDGVPGGPGETGKNGGFGRRGPPGAKGNKGGPGQPGFEGEQGTRGAQGPAGPAGPPGLIGEQGISGPRGSGGAAGAPGERGRTGPLGRKGEPGEPGPKGGIGNRGPRGETGDDGRDGVGSEGRRGKKGERGFPGYPGPKGNPGEPGLNGTTGPKGIRGRRGNSGPPGIVGQKGDPGYPGPAGPKGNRGDSIDQCALIQSIKDKCPCCYGPLECPVFPTELAFALDTSEGVNQDTFGRMRDVVLSIVNDLTIAESNCPRGARVAVVTYNNEVTTEIRFADSKRKSVLLDKIKNLQVALTSKQQSLETAMSFVARNTFKRVRNGFLMRKVAVFFSNTPTRASPQLREAVLKLSDAGITPLFLTRQEDRQLINALQINNTAVGHALVLPAGRDLTDFLENVLTCHVCLDICNIDPSCGFGSWRPSFRDRRAAGSDVDIDMAFILDSAETTTLFQFNEMKKYIAYLVRQLDMSPDPKASQHFARVAVVQHAPSESVDNASMPPVKVEFSLTDYGSKEKLVDFLSRGMTQLQGTRALGSAIEYTIENVFESAPNPRDLKIVVLMLTGEVPEQQLEEAQRVILQAKCKGYFFVVLGIGRKVNIKEVYTFASEPNDVFFKLVDKSTELNEEPLMRFGRLLPSFVSSENAFYLSPDIRKQCDWFQGDQPTKNLVKFGHKQVNVPNNVTSSPTSNPVTTTKPVTTTKPVTTTTKPVTTTTKPVTIINQPSVKPAAAKPAPAKPVAAKPVATKMATVRPPVAVKPATAAKPVAAKPAAVRPPAAAAAKPVATKPEVPRPQAAKPAATKPATTKPMVKMSREVQVFEITENSAKLHWERAEPPGPYFYDLTVTSAHDQSLVLKQNLTVTDRVIGGLLAGQTYHVAVVCYLRSQVRATYHGSFSTKKSQPPPPQPARSASSSTINLMVSTEPLALTETDICKLPKDEGTCRDFILKWYYDPNTKSCARFWYGGCGGNENKFGSQKECEKVCAPVLAKPGVISVMGT

SEQ ID NO: 10940 - protein, 2971 aa, Homo sapiens
MRKHRHLPLVAVFCLFLSGFPTTHAQQQQAAQDSADIIFLIDGSNNTGSVNFAVILDFLVNLLEKLPIGTQQIRVGVVQFSDEPRTMFSLDTYSTKAQVLGAVKALGFAGGELANIGLALDFVVENHFTRAGGSRVEEGVPQVLVLISAGPSSDEIRYGVVALKQASVFSFGLGAQAASRAELQHIATDDNLVFTVPEFRSFGDLQEKLLPYIVGVAQRHIVLKPPTIVTQVIEVNKRDIVFLVDGSSALGLANFNAIRDFIAKVIQRLEIGQDLIQVAVAQYADTVRPEFYFNTHPTKREVITAVRKMKPLDGSALYTGSALDFVRNNLFTSSAGYRAAEGIPKLLVLITGGKSLDEISQPAQELKRSSIMAFAIGNKGADQAELEEIAFDSSLVFIPAEFRAAPLQGMLPGLLAPLRTLSGTPEVHSNKRDIIFLLDGSANVGKTNFPYVRDFVMNLVNSLDIGNDNIRVGLVQFSDTPVTEFSLNTYQTKSDILGHLRQLQLQGGSGLNTGSALSYVYANHFTEAGGSRIREHVPQLLLLLTAGQSEDSYLQAANALTRAGILTFCVGASQANKAELEQIAFNPSLVYLMDDFSSLPALPQQLIQPLTTYVSGGVEEVPLAQPESKRDILFLFDGSANLVGQFPVVRDFLYKIIDELNVKPEGTRIAVAQYSDDVKVESRFDEHQSKPEILNLVKRMKIKTGKALNLGYALDYAQRYIFVKSAGSRIEDGVLQFLVLLVAGRSSDRVDGPASNLKQSGVVPFIFQAKNADPAELEQIVLSPAFILAAESLPKIGDLHPQIVNLLKSVHNGAPAPVSGEKDVVFLLDGSEGVRSGFPLLKEFVQRVVESLDVGQDRVRVAVVQYSDRTRPEFYLNSYMNKQDVVNAVRQLTLLGGPTPNTGAALEFVLRNILVSSAGSRITEGVPQLLIVLTADRSGDDVRNPSVVVKRGGAVPIGIGIGNADITEMQTISFIPDFAVAIPTFRQLGTVQQVISERVTQLTREELSRLQPVLQPLPSPGVGGKRDVVFLIDGSQSAGPEFQYVRTLIERLVDYLDVGFDTTRVAVIQFSDDPKVEFLLNAHSSKDEVQNAVQRLRPKGGRQINVGNALEYVSRNIFKRPLGSRIEEGVPQFLVLISSGKSDDEVDDPAVELKQFGVAPFTIARNADQEELVKISLSPEYVFSVSTFRELPSLEQKLLTPITTLTSEQIQKLLASTRYPPPAVESDAADIVFLIDSSEGVRPDGFAHIRDFVSRIVRRLNIGPSKVRVGVVQFSNDVFPEFYLKTYRSQAPVLDAIRRLRLRGGSPLNTGKALEFVARNLFVKSAGSRIEDGVPQHLVLVLGGKSQDDVSRFAQVIRSSGIVSLGVGDRNIDRTELQTITNDPRLVFTVREFRELPNIEERIMNSFGPSAATPAPPGVDTPPPSRPEKKKADIVFLLDGSINFRRDSFQEVLRFVSEIVDTVYEDGDSIQVGLVQYNSDPTDEFFLKDFSTKRQIIDAINKVVYKGGRHANTKVGLEHLRVNHFVPEAGSRLDQRVPQIAFVITGGKSVEDAQDVSLALTQRGVKVFAVGVRNIDSEEVGKIASNSATAFRVGNVQELSELSEQVLETLHDAMHETLCPGVTDAAKACNLDVILGFDGSRDQNVFVAQKGFESKVDAILNRISQMHRVSCSGGRSPTVRVSVVANTPSGPVEAFDFDEYQPEMLEKFRNMRSQHPYVLTEDTLKVYLNKFRQSSPDSVKVVIHFTDGADGDLADLHRASENLRQEGVRALILVGLERVVNLERLMHLEFGRGFMYDRPLRLNLLDLDYELAEQLDNIAEKACCGVPCKCSGQRGDRGPIGSIGPKGIPGEDGYRGYPGDEGGPGERGPPGVNGTQGFQGCPGQRGVKGSRGFPGEKGEVGEIGLDGLDGEDGDKGLPGSSGEKGNPGRRGDKGPRGEKGERGDVGIRGDPGNPGQDSQERGPKGETGDLGPMGVPGRDGVPGGPGETGKNGGFGRRGPPGAKGNKGGPGQPGFEGEQGTRGAQGPAGPAGPPGLIGEQGISGPRGSGGAAGAPGERGRTGPLGRKGEPGEPGPKGGIGNRGPRGETGDDGRDGVGSEGRRGKKGERGFPGYPGPKGNPGEPGLNGTTGPKGIRGRRGNSGPPGIVGQKGDPGYPGPAGPKGNRGDSIDQCALIQSIKDKCPCCYGPLECPVFPTELAFALDTSEGVNQDTFGRMRDVVLSIVNDLTIAESNCPRGARVAVVTYNNEVTTEIRFADSKRKSVLLDKIKNLQVALTSKQQSLETAMSFVARNTFKRVRNGFLMRKVAVFFSNTPTRASPQLREAVLKLSDAGITPLFLTRQEDRQLINALQINNTAVGHALVLPAGRDLTDFLENVLTCHVCLDICNIDPSCGFGSWRPSFRDRRAAGSDVDIDMAFILDSAETTTLFQFNEMKKYIAYLVRQLDMSPDPKASQHFARVAVVQHAPSESVDNASMPPVKVEFSLTDYGSKEKLVDFLSRGMTQLQGTRALGSAIEYTIENVFESAPNPRDLKIVVLMLTGEVPEQQLEEAQRVILQAKCKGYFFVVLGIGRKVNIKEVYTFASEPNDVFFKLVDKSTELNEEPLMRFGRLLPSFVSSENAFYLSPDIRKQCDWFQGDQPTKNLVKFGHKQVNVPNNVTSSPTSNPVTTTKPVTTTKPVTTTTKPVTTTTKPVTIINQPSVKPAAAKPAPAKPVAAKPVATKMATVRPPVAVKPATAAKPVAAKPAAVRPPAAAAAKPVATKPEVPRPQAAKPAATKPATTKPMVKMSREVQVFEITENSAKLHWERAEPPGPYFYDLTVTSAHDQSLVLKQNLTVTDRVIGGLLAGQTYHVAVVCYLRSQVRATYHGSFSTKKSQPPPPQPARSASSSTINLMVSTEPLALTETDICKLPKDEGTCRDFILKWYYDPNTKSCARFWYGGCGGNENKFGSQKECEKVCAPVLAKPGVISVMGT

SEQ ID NO: 10941 - protein, 1036 aa, Homo sapiens
MRKHRHLPLVAVFCLFLSGFPTTHAQQQQAVIEVNKRDIVFLVDGSSALGLANFNAIRDFIAKVIQRLEIGQDLIQVAVAQYADTVRPEFYFNTHPTKREVITAVRKMKPLDGSALYTGSALDFVRNNLFTSSAGYRAAEGIPKLLVLITGGKSLDEISQPAQELKRSSIMAFAIGNKGADQAELEEIAFDSSLVFIPAEFRAAPLQGMLPGLLAPLRTLSGTPEVHSNKRDIIFLLDGSANVGKTNFPYVRDFVMNLVNSLDIGNDNIRVGLVQFSDTPVTEFSLNTYQTKSDILGHLRQLQLQGGSGLNTGSALSYVYANHFTEAGGSRIREHVPQLLLLLTAGQSEDSYLQAANALTRAGILTFCVGASQANKAELEQIAFNPSLVYLMDDFSSLPALPQQLIQPLTTYVSGGVEEVPLAQPESKRDILFLFDGSANLVGQFPVVRDFLYKIIDELNVKPEGTRIAVAQYSDDVKVESRFDEHQSKPEILNLVKRMKIKTGKALNLGYALDYAQRYIFVKSAGSRIEDGVLQFLVLLVAGRSSDRVDGPASNLKQSGVVPFIFQAKNADPAELEQIVLSPAFILAAESLPKIGDLHPQIVNLLKSVHNGAPAPVSGEKDVVFLLDGSEGVRSGFPLLKEFVQRVVESLDVGQDRVRVAVVQYSDRTRPEFYLNSYMNKQDVVNAVRQLTLLGGPTPNTGAALEFVLRNILVSSAGSRITEGVPQLLIVLTADRSGDDVRNPSVVVKRGGAVPIGIGIGNADITEMQTISFIPDFAVAIPTFRQLGTVQQVISERVTQLTREELSRLQPVLQPLPSPGVGGKRDVVFLIDGSQSAGPEFQYVRTLIERLVDYLDVGFDTTRVAVIQFSDDPKVEFLLNAHSSKDEVQNAVQRLRPKGGRQINVGNALEYVSRNIFKRPLGSRIEEGVPQFLVLISSGKSDDEVDDPAVELKQFGVAPFTIARNADQEELVKISLSPEYVFSVSTFRELPSLEQKLLTPITTLTSEQIQKLLASTRYPPPGEMGASEVLLGAFSI

SEQ ID NO: 10942 - protein, 2570 aa, Homo sapiens
MRKHRHLPLVAVFCLFLSGFPTTHAQQQQAVIEVNKRDIVFLVDGSSALGLANFNAIRDFIAKVIQRLEIGQDLIQVAVAQYADTVRPEFYFNTHPTKREVITAVRKMKPLDGSALYTGSALDFVRNNLFTSSAGYRAAEGIPKLLVLITGGKSLDEISQPAQELKRSSIMAFAIGNKGADQAELEEIAFDSSLVFIPAEFRAAPLQGMLPGLLAPLRTLSGTPEESKRDILFLFDGSANLVGQFPVVRDFLYKIIDELNVKPEGTRIAVAQYSDDVKVESRFDEHQSKPEILNLVKRMKIKTGKALNLGYALDYAQRYIFVKSAGSRIEDGVLQFLVLLVAGRSSDRVDGPASNLKQSGVVPFIFQAKNADPAELEQIVLSPAFILAAESLPKIGDLHPQIVNLLKSVHNGAPAPVSGEKDVVFLLDGSEGVRSGFPLLKEFVQRVVESLDVGQDRVRVAVVQYSDRTRPEFYLNSYMNKQDVVNAVRQLTLLGGPTPNTGAALEFVLRNILVSSAGSRITEGVPQLLIVLTADRSGDDVRNPSVVVKRGGAVPIGIGIGNADITEMQTISFIPDFAVAIPTFRQLGTVQQVISERVTQLTREELSRLQPVLQPLPSPGVGGKRDVVFLIDGSQSAGPEFQYVRTLIERLVDYLDVGFDTTRVAVIQFSDDPKVEFLLNAHSSKDEVQNAVQRLRPKGGRQINVGNALEYVSRNIFKRPLGSRIEEGVPQFLVLISSGKSDDEVDDPAVELKQFGVAPFTIARNADQEELVKISLSPEYVFSVSTFRELPSLEQKLLTPITTLTSEQIQKLLASTRYPPPAVESDAADIVFLIDSSEGVRPDGFAHIRDFVSRIVRRLNIGPSKVRVGVVQFSNDVFPEFYLKTYRSQAPVLDAIRRLRLRGGSPLNTGKALEFVARNLFVKSAGSRIEDGVPQHLVLVLGGKSQDDVSRFAQVIRSSGIVSLGVGDRNIDRTELQTITNDPRLVFTVREFRELPNIEERIMNSFGPSAATPAPPGVDTPPPSRPEKKKADIVFLLDGSINFRRDSFQEVLRFVSEIVDTVYEDGDSIQVGLVQYNSDPTDEFFLKDFSTKRQIIDAINKVVYKGGRHANTKVGLEHLRVNHFVPEAGSRLDQRVPQIAFVITGGKSVEDAQDVSLALTQRGVKVFAVGVRNIDSEEVGKIASNSATAFRVGNVQELSELSEQVLETLHDAMHETLCPGVTDAAKACNLDVILGFDGSRDQNVFVAQKGFESKVDAILNRISQMHRVSCSGGRSPTVRVSVVANTPSGPVEAFDFDEYQPEMLEKFRNMRSQHPYVLTEDTLKVYLNKFRQSSPDSVKVVIHFTDGADGDLADLHRASENLRQEGVRALILVGLERVVNLERLMHLEFGRGFMYDRPLRLNLLDLDYELAEQLDNIAEKACCGVPCKCSGQRGDRGPIGSIGPKGIPGEDGYRGYPGDEGGPGERGPPGVNGTQGFQGCPGQRGVKGSRGFPGEKGEVGEIGLDGLDGEDGDKGLPGSSGEKGNPGRRGDKGPRGEKGERGDVGIRGDPGNPGQDSQERGPKGETGDLGPMGVPGRDGVPGGPGETGKNGGFGRRGPPGAKGNKGGPGQPGFEGEQGTRGAQGPAGPAGPPGLIGEQGISGPRGSGGAAGAPGERGRTGPLGRKGEPGEPGPKGGIGNRGPRGETGDDGRDGVGSEGRRGKKGERGFPGYPGPKGNPGEPGLNGTTGPKGIRGRRGNSGPPGIVGQKGDPGYPGPAGPKGNRGDSIDQCALIQSIKDKCPCCYGPLECPVFPTELAFALDTSEGVNQDTFGRMRDVVLSIVNDLTIAESNCPRGARVAVVTYNNEVTTEIRFADSKRKSVLLDKIKNLQVALTSKQQSLETAMSFVARNTFKRVRNGFLMRKVAVFFSNTPTRASPQLREAVLKLSDAGITPLFLTRQEDRQLINALQINNTAVGHALVLPAGRDLTDFLENVLTCHVCLDICNIDPSCGFGSWRPSFRDRRAAGSDVDIDMAFILDSAETTTLFQFNEMKKYIAYLVRQLDMSPDPKASQHFARVAVVQHAPSESVDNASMPPVKVEFSLTDYGSKEKLVDFLSRGMTQLQGTRALGSAIEYTIENVFESAPNPRDLKIVVLMLTGEVPEQQLEEAQRVILQAKCKGYFFVVLGIGRKVNIKEVYTFASEPNDVFFKLVDKSTELNEEPLMRFGRLLPSFVSSENAFYLSPDIRKQCDWFQGDQPTKNLVKFGHKQVNVPNNVTSSPTSNPVTTTKPVTTTKPVTTTTKPVTTTTKPVTIINQPSVKPAAAKPAPAKPVAAKPVATKMATVRPPVAVKPATAAKPVAAKPAAVRPPAAAAAKPVATKPEVPRPQAAKPAATKPATTKPMVKMSREVQVFEITENSAKLHWERAEPPGPYFYDLTVTSAHDQSLVLKQNLTVTDRVIGGLLAGQTYHVAVVCYLRSQVRATYHGSFSTKKSQPPPPQPARSASSSTINLMVSTEPLALTETDICKLPKDEGTCRDFILKWYYDPNTKSCARFWYGGCGGNENKFGSQKECEKVCAPVLAKPGVISVMGT

SEQ ID NO: 10943 - protein, 1237 aa, Homo sapiens
MRKHRHLPLVAVFCLFLSGFPTTHAQQQQAAQDSADIIFLIDGSNNTGSVNFAVILDFLVNLLEKLPIGTQQIRVGVVQFSDEPRTMFSLDTYSTKAQVLGAVKALGFAGGELANIGLALDFVVENHFTRAGGSRVEEGVPQVLVLISAGPSSDEIRYGVVALKQASVFSFGLGAQAASRAELQHIATDDNLVFTVPEFRSFGDLQEKLLPYIVGVAQRHIVLKPPTIVTQVIEVNKRDIVFLVDGSSALGLANFNAIRDFIAKVIQRLEIGQDLIQVAVAQYADTVRPEFYFNTHPTKREVITAVRKMKPLDGSALYTGSALDFVRNNLFTSSAGYRAAEGIPKLLVLITGGKSLDEISQPAQELKRSSIMAFAIGNKGADQAELEEIAFDSSLVFIPAEFRAAPLQGMLPGLLAPLRTLSGTPEVHSNKRDIIFLLDGSANVGKTNFPYVRDFVMNLVNSLDIGNDNIRVGLVQFSDTPVTEFSLNTYQTKSDILGHLRQLQLQGGSGLNTGSALSYVYANHFTEAGGSRIREHVPQLLLLLTAGQSEDSYLQAANALTRAGILTFCVGASQANKAELEQIAFNPSLVYLMDDFSSLPALPQQLIQPLTTYVSGGVEEVPLAQPESKRDILFLFDGSANLVGQFPVVRDFLYKIIDELNVKPEGTRIAVAQYSDDVKVESRFDEHQSKPEILNLVKRMKIKTGKALNLGYALDYAQRYIFVKSAGSRIEDGVLQFLVLLVAGRSSDRVDGPASNLKQSGVVPFIFQAKNADPAELEQIVLSPAFILAAESLPKIGDLHPQIVNLLKSVHNGAPAPVSGEKDVVFLLDGSEGVRSGFPLLKEFVQRVVESLDVGQDRVRVAVVQYSDRTRPEFYLNSYMNKQDVVNAVRQLTLLGGPTPNTGAALEFVLRNILVSSAGSRITEGVPQLLIVLTADRSGDDVRNPSVVVKRGGAVPIGIGIGNADITEMQTISFIPDFAVAIPTFRQLGTVQQVISERVTQLTREELSRLQPVLQPLPSPGVGGKRDVVFLIDGSQSAGPEFQYVRTLIERLVDYLDVGFDTTRVAVIQFSDDPKVEFLLNAHSSKDEVQNAVQRLRPKGGRQINVGNALEYVSRNIFKRPLGSRIEEGVPQFLVLISSGKSDDEVDDPAVELKQFGVAPFTIARNADQEELVKISLSPEYVFSVSTFRELPSLEQKLLTPITTLTSEQIQKLLASTRYPPPGEMGASEVLLGAFSI

SEQ ID NO: 10944 - protein, 74 aa, Homo sapiens
MPKYYEDKPQGGACAGLKEDLGACLLQSDCVVQEGKSPRQCLKEGYCNSLKYAFFECKRSVLDNRARFRGRKGY

SEQ ID NO: 10945 - protein, 416 aa, Homo sapiens
MEERPAETNANVDNSASPSVAQLAGRFREQAAAAKETPASKPTRRKPPCSLPLFPPKVDLGQNGEEKSPPNASHPPKFKVKSSPLIEKLQANLTFDPAALLPGASPKSPGLKAMVSPFHSPPSTPSSPGVRSRPSEAEEVPVSFDQPPEGSHLPCYNKVRTRGSIKRRPPSRRFRRSQSDCGELGDFRAVESSQQNGAKEEDGDEVLPSKSKAPGSPLSSEGAAGEGVRTLGPAEKPPLRRSPSRTEKQEEDRATEEAKNGEKARRSSEEVDGQHPAQEEVPESPQTSGPEAENRCGSPREEKPAGEEAEMEKATEVKGERVQNEEVGPEHDSQETKKLEEGAAVKETPHSPPGGVKGGDVPKQEKGKEKQQEGAVLEPGCSPQTGPAQLETSSEVQSEPAVPKPEDDTPVQDTKM

SEQ ID NO: 10946 - protein, 106 aa, Homo sapiens
MEKATEVKGERVQNEEVGPEHDSQETKKLEEGAAVKETPHSPPGGVKGGDVPKQEKGKEKQQEGAVLEPGCSPQTGPAQLETSSEVQSEPAVPKPEDDTPVQDTKM

SEQ ID NO: 10947 - protein, 1075 aa, Homo sapiens
MLKPQPLQQPSQPQQPPPTQQAVARRPPGGTSPPNGGLPGPLATSAAPPGPPAAASPCLGPVAAAGSGLRRGAEGILAPQPPPPQQHQERPGAAAIGSARGQSTGKGPPQSPVFEGVYNNSRMLHFLTAVVGSTCDVKVKNGTTYEGIFKTLSSKFELAVDAVHRKASEPAGGPRREDIVDTMVFKPSDVMLVHFRNVDFNYATKDKFTDSAIAMNSKVNGEHKEKVLQRWEGGDSNSDDYDLESDMSNGWDPNEMFKFNEENYGVKTTYDSSLSSYTVPLEKDNSEEFRQRELRAAQLAREIESSPQYRLRIAMENDDGRTEEEKHSAVQRQGSGRESPSLASREGKYIPLPQRVREGPRGGVRCSSSRGGRPGLSSLPPRGPHHLDNSSPGPGSEARGINGGPSRMSPKAQRPLRGAKTLSSPSNRPSGETSVPPPPAVGRMYPPRSPKSAAPAPISASCPEPPIGSAVPTSSASIPVTSSVSDPGVGSISPASPKISLAPTDVKELSTKEPGRTLEPQELARIAGKVPGLQNEQKRFQLEELRKFGAQFKLQPSSSPENSLDPFPPRILKEEPKGKEKEVDGLLTSEPMGSPVSSKTESVSDKEDKPPLAPSGGTEGPEQPPPPCPSQTGSPPVGLIKGEDKDEGPVAEQVKKSTLNPNAKEFNPTKPLLSVNKSTSTPTSPGPRTHSTPSIPVLTAGQSGLYSPQYISYIPQIHMGPAVQAPQMYPYPVSNSVPGQQGKYRGAKGSLPPQRSDQHQPASAPPMMQAAAAAGPPLVAATPYSSYIPYNPQQFPGQPAMMQPMAHYPSQPVFAPMLQSNPRMLTSGSHPQAIVSSSTPQYPSAEQPTPQALYATVHQSYPHHATQLHAHQPQPATTPTGSQPQSQHAAPSPVQHQAGQAPHLGSGQPQQNLYHPGALTGTPPSLPPGPSAQSPQSSFPQPAAVYAIHHQQLPHGFTNMAHVTQAHVQTGITAAPPPHPGAPHPPQVMLLHPPQSHGGPPQGAVPQSGVPALSASTPSPYPYIGHPQGEQPGQAPGFPGGADDRIREFSLAGGIWHGRAEGLQVGQDARVLGGE

SEQ ID NO: 10948 - protein, 1062 aa, Homo sapiens
MLKPQPLQQPSQPQQPPPTQQAVARRPPGGTSPPNGGLPGPLATSAAPPGPPAAASPCLGPVAAAGSGLRRGAEGILAPQPPPPQQHQERPGAAAIGSARGQSTGKGPPQSPVFEGVYNNSRMLHFLTAVVGSTCDVKVKNGTTYEGIFKTLSSKFELAVDAVHRKASEPAGGPRREDIVDTMVFKPSDVMLVHFRNVDFNYATKDKFTDSAIAMNSKVNGEHKEKVLQRWEGGDSNSDDYDLESDMSNGWDPNEMFKFNEENYGVKTTYDSSLSSYTVPLEKDNSEEFRQRELRAAQLAREIESSPQYRLRIAMENDDGRTEEEKHSAVQRQGSGRESPSLASREGKYIPLPQRVREGPRGGVRCSSSRGGRPGLSSLPPRGPHHLDNSSPGPGSEARGINGGPSRMSPKAQRPLRGAKTLSSPSNRPSGETSVPPPPAVGRMYPPRSPKSAAPAPISASCPEPPIGSAVPTSSASIPVTSSVSDPGVGSISPASPKISLAPTDVKELSTKEPGRTLEPQELARIAGKVPGLQNEQKRFQLEELRKFGAQFKLQPSSSPENSLDPFPPRILKEEPKGKEKEVDGLLTSEPMGSPVSSKTESVSDKEDKPPLAPSGGTEGPEQPPPPCPSQTGSPPVGLIKGEDKDEGPVAEQVKKSTLNPNAKEFNPTKPLLSVNKSTSTPTSPGPRTHSTPSIPVLTAGQSGLYSPQYISYIPQIHMGPAVQAPQMYPYPVSNSVPGQQGKYRGAKGSLPPQRSDQHQPASAPPMMQAAAAAGPPLVAATPYSSYIPYNPQQFPGQPAMMQPMAHYPSQPVFAPMLQSNPRMLTSGSHPQAIVSSSTPQYPSAEQPTPQALYATVHQSYPHHATQLHAHQPQPATTPTGSQPQSQHAAPSPVQHQAGQAPHLGSGQPQQNLYHPGALTGTPPSLPPGPSAQSPQSSFPQPAAVYAIHHQQLPHGFTNMAHVTQAHVQTGITAAPPPHPGAPHPPQVMLLHPPQSHGGPPQGAVPQSGVPALSASTPSPYPYIGHPQGEQPGQAPGFPGGADDRIPPLPPPGELKIVLAAT

SEQ ID NO: 10949 - protein, 1097 aa, Homo sapiens
MLKPQPLQQPSQPQQPPPTQQAVARRPPGGTSPPNGGLPGPLATSAAPPGPPAAASPCLGPVAAAGSGLRRGAEGILAPQPPPPQQHQERPGAAAIGSARGQSTGKGPPQSPVFEGVYNNSRMLHFLTAVVGSTCDVKVKNGTTYEGIFKTLSSKFELAVDAVHRKASEPAGGPRREDIVDTMVFKPSDVMLVHFRNVDFNYATKDKFTDSAIAMNSKVNGEHKEKVLQRWEGGDSNSDDYDLESDMSNGWDPNEMFKFNEENYGVKTTYDSSLSSYTVPLEKDNSEEFRQRELRAAQLAREIESSPQYRLRIAMENDDGRTEEEKHSAVQRQGSGRESPSLASREGKYIPLPQRVREGPRGGVRCSSSRGGRPGLSSLPPRGPHHLDNSSPGPGSEARGINGGPSRMSPKAQRPLRGAKTLSSPSNRPSGETSVPPPPAVGRMYPPRSPKSAAPAPISASCPEPPIGSAVPTSSASIPVTSSVSDPGVGSISPASPKISLAPTDVKELSTKEPGRTLEPQELARIAGKVPGLQNEQKRFQLEELRKFGAQFKLQPSSSPENSLDPFPPRILKEEPKGKEKEVDGLLTSEPMGSPVSSKTESVSDKEDKPPLAPSGGTEGPEQPPPPCPSQTGSPPVGLIKGEDKDEGPVAEQVKKSTLNPNAKEFNPTKPLLSVNKSTSTPTSPGPRTHSTPSIPVLTAGQSGLYSPQYISYIPQIHMGPAVQAPQMYPYPVSNSVPGQQGKYRGAKGSLPPQRSDQHQPASAPPMMQAAAAAGPPLVAATPYSSYIPYNPQQFPGQPAMMQPMAHYPSQPVFAPMLQSNPRMLTSGSHPQAIVSSSTPQYPSAEQPTPQALYATVHQSYPHHATQLHAHQPQPATTPTGSQPQSQHAAPSPVQHQAGQAPHLGSGQPQQNLYHPGALTGTPPSLPPGPSAQSPQSSFPQPAAVYAIHHQQLPHGFTNMAHVTQAHVQTGITAAPPPHPGAPHPPQVMLLHPPQSHGGPPQGAVPQSGVPALSASTPSPYPYIGHPQGEQPGQAPGFPGGADDRILCRVGRSHSRRRQGLAPGSVLCFPPSSLSCDPAAPLPTASPALSDPDCLLT

SEQ ID NO: 10950 - protein, 1044 aa, Homo sapiens
MLKPQPLQQPSQPQQPPPTQQAVARRPPGGTSPPNGGLPGPLATSAAPPGPPAAASPCLGPVAAAGSGLRRGAEGILAPQPPPPQQHQERPGAAAIGSARGQSTGKGPPQSPVFEGVYNNSRMLHFLTAVVGSTCDVKVKNGTTYEGIFKTLSSKFELAVDAVHRKASEPAGGPRREDIVDTMVFKPSDVMLVHFRNVDFNYATKDKFTDSAIAMNSKVNGEHKEKVLQRWEGGDSNSDDYDLESDMSNGWDPNEMFKFNEENYGVKTTYDSSLSSYTVPLEKDNSEEFRQRELRAAQLAREIESSPQYRLRIAMENDDGRTEEEKHSAVQRQGSGRESPSLASREGKYIPLPQRVREGPRGGVRCSSSRGGRPGLSSLPPRGPHHLDNSSPGPGSEARGINGGPSRMSPKAQRPLRGAKTLSSPSNRPSGETSVPPPPAVGRMYPPRSPKSAAPAPISASCPEPPIGSAVPTSSASIPVTSSVSDPGVGSISPASPKISLAPTDVKELSTKEPGRTLEPQELARIAGKVPGLQNEQKRFQLEELRKFGAQFKLQPSSSPENSLDPFPPRILKEEPKGKEKEVDGLLTSEPMGSPVSSKTESVSDKEDKPPLAPSGGTEGPEQPPPPCPSQTGSPPVGLIKGEDKDEGPVAEQVKKSTLNPNAKEFNPTKPLLSVNKSTSTPTSPGPRTHSTPSIPVLTAGQSGLYSPQYISYIPQIHMGPAVQAPQMYPYPVSNSVPGQQGKYRGAKGSLPPQRSDQHQPASAPPMMQAAAAAGPPLVAATPYSSYIPYNPQQFPGQPAMMQPMAHYPSQPVFAPMLQSNPRMLTSGSHPQAIVSSSTPQYPSAEQPTPQALYATVHQSYPHHATQLHAHQPQPATTPTGSQPQSQHAAPSPVQHQAGQAPHLGSGQPQQNLYHPGALTGTPPSLPPGPSAQSPQSSFPQPAAVYAIHHQQLPHGFTNMAHVTQAHVQTGITAAPPPHPGAPHPPQVMLLHPPQSHGGPPQGAVPQSGVPALSASTPSPYPYIGHPQVQSHPSQQLPFHPPGN

SEQ ID NO: 10951 - protein, 1044 aa, Homo sapiens
MLKPQPLQQPSQPQQPPPTQQAVARRPPGGTSPPNGGLPGPLATSAAPPGPPAAASPCLGPVAAAGSGLRRGAEGILAPQPPPPQQHQERPGAAAIGSARGQSTGKGPPQSPVFEGVYNNSRMLHFLTAVVGSTCDVKVKNGTTYEGIFKTLSSKFELAVDAVHRKASEPAGGPRREDIVDTMVFKPSDVMLVHFRNVDFNYATKDKFTDSAIAMNSKVNGEHKEKVLQRWEGGDSNSDDYDLESDMSNGWDPNEMFKFNEENYGVKTTYDSSLSSYTVPLEKDNSEEFRQRELRAAQLAREIESSPQYRLRIAMENDDGRTEEEKHSAVQRQGSGRESPSLASREGKYIPLPQRVREGPRGGVRCSSSRGGRPGLSSLPPRGPHHLDNSSPGPGSEARGINGGPSRMSPKAQRPLRGAKTLSSPSNRPSGETSVPPPPAVGRMYPPRSPKSAAPAPISASCPEPPIGSAVPTSSASIPVTSSVSDPGVGSISPASPKISLAPTDVKELSTKEPGRTLEPQELARIAGKVPGLQNEQKRFQLEELRKFGAQFKLQPSSSPENSLDPFPPRILKEEPKGKEKEVDGLLTSEPMGSPVSSKTESVSDKEDKPPLAPSGGTEGPEQPPPPCPSQTGSPPVGLIKGEDKDEGPVAEQVKKSTLNPNAKEFNPTKPLLSVNKSTSTPTSPGPRTHSTPSIPVLTAGQSGLYSPQYISYIPQIHMGPAVQAPQMYPYPVSNSVPGQQGKYRGAKGSLPPQRSDQHQPASAPPMMQAAAAAGPPLVAATPYSSYIPYNPQQFPGQPAMMQPMAHYPSQPVFAPMLQSNPRMLTSGSHPQAIVSSSTPQYPSAEQPTPQALYATVHQSYPHHATQLHAHQPQPATTPTGSQPQSQHAAPSPVQHQAGQAPHLGSGQPQQNLYHPGALTGTPPSLPPGPSAQSPQSSFPQPAAVYAIHHQQLPHGFTNMAHVTQAHVQTGITAAPPPHPGAPHPPQVMLLHPPQSHGGPPQGAVPQSGVPALSASTPSPYPYIGHPQAPFPPPGELKIVLAAT

SEQ ID NO: 10952 - protein, 968 aa, Homo sapiens
MLKPQPLQQPSQPQQPPPTQQAVARRPPGGTSPPNGGLPGPLATSAAPPGPPAAASPCLGPVAAAGSGLRRGAEGILAPQPPPPQQHQERPGAAAIGSARGQSTGKGPPQSPVFEGVYNNSRMLHFLTAVVGSTCDVKVKNGTTYEGIFKTLSSKFELAVDAVHRKASEPAGGPRREDIVDTMVFKPSDVMLVHFRNVDFNYATKDKFTDSAIAMNSKVNGEHKEKVLQRWEGGDSNSDDYDLESDMSNGWDPNEMFKFNEENYGVKTTYDSSLSSYTVPLEKDNSEEFRQRELRAAQLAREIESSPQYRLRIAMENDDGRTEEEKHSAVQRQGSGRESPSLASREGKYIPLPQRVREGPRGGVRCSSSRGGRPGLSSLPPRGPHHLDNSSPGPGSEARGINGGPSRMSPKAQRPLRGAKTLSSPSNRPSGETSVPPPPAVGRMYPPRSPKSAAPAPISASCPEPPIGSAVPTSSASIPVTSSVSDPGVGSISPASPKISLAPTDVKELSTKEPGRTLEPQELARIAGKVPGLQNEQKRFQLEELRKFGAQFKLQPSSSPENSLDPFPPRILKEEPKGKEKEVDGLLTSEPMGSPVSSKTESVSDKEDKPPLAPSGGTEGPEQPPPPCPSQTGSPPVGLIKGEDKDEGPVAEQVKKSTLNPNAKEFNPTKPLLSVNKSTSTPTSPGPRTHSTPSIPVLTAGQSGLYSPQYISYIPQIHMGPAVQAPQMYPYPVSNSVPGQQGKYRGAKGSLPPQRSDQHQPASAPPMMQAAAAAGPPLVAATPYSSYIPYNPQQFPGQPAMMQPMAHYPSQPVFAPMLQSNPRMLTSGSHPQAIVSSSTPQYPSAEQPTPQALYATVHQSYPHHATQLHAHQPQPATTPTGSQPQSQHAAPSPVQVPAMGGAEWSWCRNGWPEEGIELGVISEWRGLGASELLACVALNLPLPSSIRRGRPHTWAVDSHSRICTTQGP

SEQ ID NO: 10953 - protein, 399 aa, Homo sapiens
MLKPQPLQQPSQPQQPPPTQQAVARRPPGGTSPPNGGLPGPLATSAAPPGPPAAASPCLGPVAAAGSGLRRGAEGILAPQPPPPQQHQERPGAAAIGSARGQSTGKGPPQSPVFEGVYNNSRMLHFLTAVVGSTCDVKVKNGTTYEGIFKTLSSKFELAVDAVHRKASEPAGGPRREDIVDTMVFKPSDVMLVHFRNVDFNYATKDKFTDSAIAMNSKVNGEHKEKVLQRWEGGDSNSDDYDLESDMSNGWDPNEMFKFNEENYGVKTTYDSSLSSYTVPLEKDNSEEFRQRELRAAQLAREIESSPQYRLRIAMENDDGRTEEEKHSAVQRQGSGRESPSLASREGKYIPLPHRGQGQGPAGVGGSCSAPARPHPVLPSHPLIYSPAGDGRSFIFYYL

SEQ ID NO: 10954 - protein, 1044 aa, Homo sapiens
MLKPQPLQQPSQPQQPPPTQQAVARRPPGGTSPPNGGLPGPLATSAAPPGPPAAASPCLGPVAAAGSGLRRGAEGILAPQPPPPQQHQERPGAAAIGSARGQSTGKGPPQSPVFEGVYNNSRMLHFLTAVVGSTCDVKVKNGTTYEGIFKTLSSKFELAVDAVHRKASEPAGGPRREDIVDTMVFKPSDVMLVHFRNVDFNYATKDKFTDSAIAMNSKVNGEHKEKVLQRWEGGDSNSDDYDLESDMSNGWDPNEMFKFNEENYGVKTTYDSSLSSYTVPLEKDNSEEFRQRELRAAQLAREIESSPQYRLRIAMENDDGRTEEEKHSAVQRQGSGRESPSLASREGKYIPLPQRVREGPRGGVRCSSSRGGRPGLSSLPPRGPHHLDNSSPGPGSEARGINGGPSRMSPKAQRPLRGAKTLSSPSNRPSGETSVPPPPAVGRMYPPRSPKSAAPAPISASCPEPPIGSAVPTSSASIPVTSSVSDPGVGSISPASPKISLAPTDVKELSTKEPGRTLEPQELARIAGKVPGLQNEQKRFQLEELRKFGAQFKLQPSSSPENSLDPFPPRILKEEPKGKEKEVDGLLTSEPMGSPVSSKTESVSDKEDKPPLAPSGGTEGPEQPPPPCPSQTGSPPVGLIKGEDKDEGPVAEQVKKSTLNPNAKEFNPTKPLLSVNKSTSTPTSPGPRTHSTPSIPVLTAGQSGLYSPQYISYIPQIHMGPAVQAPQMYPYPVSNSVPGQQGKYRGAKGSLPPQRSDQHQPASAPPMMQAAAAAGPPLVAATPYSSYIPYNPQQFPGQPAMMQPMAHYPSQPVFAPMLQSNPRMLTSGSHPQAIVSSSTPQYPSAEQPTPQALYATVHQSYPHHATQLHAHQPQPATTPTGSQPQSQHAAPSPVQHQAGQAPHLGSGQPQQNLYHPGALTGTPPSLPPGPSAQSPQSSFPQPAAVYAIHHQQLPHGFTNMAHVTQAHVQTGITAAPPPHPGAPHPPQVMLLHPPQSHGGPPQGAVPQSGVPALSASTPSPYPYIGHPQAPLPPPGELKIVLAAT

SEQ ID NO: 10955 - protein, 1062 aa, Homo sapiens
MLKPQPLQQPSQPQQPPPTQQAVARRPPGGTSPPNGGLPGPLATSAAPPGPPAAASPCLGPVAAAGSGLRRGAEGILAPQPPPPQQHQERPGAAAIGSARGQSTGKGPPQSPVFEGVYNNSRMLHFLTAVVGSTCDVKVKNGTTYEGIFKTLSSKFELAVDAVHRKASEPAGGPRREDIVDTMVFKPSDVMLVHFRNVDFNYATKDKFTDSAIAMNSKVNGEHKEKVLQRWEGGDSNSDDYDLESDMSNGWDPNEMFKFNEENYGVKTTYDSSLSSYTVPLEKDNSEEFRQRELRAAQLAREIESSPQYRLRIAMENDDGRTEEEKHSAVQRQGSGRESPSLASREGKYIPLPQRVREGPRGGVRCSSSRGGRPGLSSLPPRGPHHLDNSSPGPGSEARGINGGPSRMSPKAQRPLRGAKTLSSPSNRPSGETSVPPPPAVGRMYPPRSPKSAAPAPISASCPEPPIGSAVPTSSASIPVTSSVSDPGVGSISPASPKISLAPTDVKELSTKEPGRTLEPQELARIAGKVPGLQNEQKRFQLEELRKFGAQFKLQPSSSPENSLDPFPPRILKEEPKGKEKEVDGLLTSEPMGSPVSSKTESVSDKEDKPPLAPSGGTEGPEQPPPPCPSQTGSPPVGLIKGEDKDEGPVAEQVKKSTLNPNAKEFNPTKPLLSVNKSTSTPTSPGPRTHSTPSIPVLTAGQSGLYSPQYISYIPQIHMGPAVQAPQMYPYPVSNSVPGQQGKYRGAKGSLPPQRSDQHQPASAPPMMQAAAAAGPPLVAATPYSSYIPYNPQQFPGQPAMMQPMAHYPSQPVFAPMLQSNPRMLTSGSHPQAIVSSSTPQYPSAEQPTPQALYATVHQSYPHHATQLHAHQPQPATTPTGSQPQSQHAAPSPVQHQAGQAPHLGSGQPQQNLYHPGALTGTPPSLPPGPSAQSPQSSFPQPAAVYAIHHQQLPHGFTNMAHVTQAHVQTGITAAPPPHPGAPHPPQVMLLHPPQSHGGPPQGAVPQSGVPALSASTPSPYPYIGHPQGEQPGQAPGFPGGADDRILQSHPSQQLPFHPPGN

SEQ ID NO: 10956 - protein, 190 aa, Homo sapiens
MKGTPSSLDTLMWIYHFHSSTEVALQPPLLSSLELSVAAAHEYLEQRFRELKSLEPPEPKMQGMLPAPKPTLGLVLREATASLVSFGTTLLEISALWLQQEARRLDGSAGPAPDGRDPGAALSRVAQAAGQGVRQAGAAVGASARLLVQGAWLCLCGRGLQGSASFLRQSQQQLGLGIPGEPVSSGHGVS

SEQ ID NO: 10957 - protein, 247 aa, Homo sapiens
MAWAGSRRVPAGTRAAAERCCRLSLSPGAQPAPPPGPLPPPRPMRFLTSCSLLLPRAAQILAAEAGLPSSRSFMGFAAPFTNKRKAYSERRIMGYSMQEMYEVVSNVQEYREFVPWCKKSLVVSSRKGHLKAQLEVGFPPVMERYTSAVSMVKPHMVKAVCTDGKLFNHLETIWRFSPGIPAYPRTCTVDFSISFEFRSLLHSQLATMFFDEVVKQNVAAFERRAATKFGPETAIPRELMFHEVHQT

SEQ ID NO: 10958 - protein, 230 aa, Homo sapiens
MHSSSPSPTNDRGLRRTIRLAPLSFGLRFLTSCSLLLPRAAQILAAEAGLPSSRSFMGFAAPFTNKRKAYSERRIMGYSMQEMYEVVSNVQEYREFVPWCKKSLVVSSRKGHLKAQLEVGFPPVMERYTSAVSMVKPHMVKAVCTDGKLFNHLETIWRFSPGIPAYPRTCTVDFSISFEFRSLLHSQLATMFFDEVVKQNVAAFERRAATKFGPETAIPRELMFHEVHQT

SEQ ID NO: 10959 - protein, 215 aa, Homo sapiens
MLLQVVREGKFSGFLTSCSLLLPRAAQILAAEAGLPSSRSFMGFAAPFTNKRKAYSERRIMGYSMQEMYEVVSNVQEYREFVPWCKKSLVVSSRKGHLKAQLEVGFPPVMERYTSAVSMVKPHMVKAVCTDGKLFNHLETIWRFSPGIPAYPRTCTVDFSISFEFRSLLHSQLATMFFDEVVKQNVAAFERRAATKFGPETAIPRELMFHEVHQT

SEQ ID NO: 10960 - protein, 277 aa, Homo sapiens
MNGFASLLRRNQFILLVLFLLQIQSLGLDIDSRPTAEVCATHTISPGPKGDDGEKGDPGEEGKHGKVGRMGPKGIKGELGDMGDQGNIGKTGPIGKKGDKGEKGLLGIPGEKGKAGTVCDCGRYRKFVGQLDISIARLKTSMKFVKNVIAGIRETEEKFYYIVQEEKNYRESLTHCRIRGGMLAMPKDEAANTLIADYVAKSGFFRVFIGVNDLEREGQYMFTDNTPLQNYSNWNEGEPSDPYGHEDCVEMLSSGRWNDTECHLTMYFVCEFIKKKK

SEQ ID NO: 10961 - protein, 490 aa, Homo sapiens [sequence omitted]

SEQ ID NO: 10962 - protein, 162 aa, Homo sapiens
MDSLVVLVLCLSCLLLLSLWRQSSGRGKLPPGPTPLPVIGNILQIGIKDISKSLTNLSKVYGPVFTLYFGLKPIVVLHGYEAVKEALIDLGEEFSGRGIFPLAERANRGFGIVFSNGKKWKEIRRFSLMTLRNFGMGKRSIEDRVQEEARCLVEELRKTKGG

SEQ ID NO: 10963 - protein, 86 aa, Homo sapiens
MVRHPYSVQTQLSTEAKAIWRSMQQQETNLLANLTTNDARDNSKDFQNSKVGAAATSRDEGCNCPIIGEIVISCYWLFEIPPLISE

SEQ ID NO: 10964 - protein, 64 aa, Homo sapiens
MQQQETNLLANLTTNDARDNSKDFQNSKVGAAATSRDEGCNCPIIGEIVISCYWLFEIPPLISE

SEQ ID NO: 10965 - protein, 82 aa, Homo sapiens
MQCLYFILILKGYFHQQHHTLLITIALCFLQQQQETNLLANLTTNDARDNSKDFQNSKVGAAATSRDEGETQKCIQKPLHEK

SEQ ID NO: 10966 - protein, 181 aa, Homo sapiens
MQGQGALKESHIHLPTEQPEASLVLQGQLAESSALGPKGALRPQAQSPDVPVSWWQGSGKRLSHRLPHICSQPPLGPFLPLTWPSCGFFGLGGAASASLGLEVLQDSVSTWARGPCCPVHPQSLTVVCMCACMCVCVHVCACVYVCMCVLVCMCACACMRAHRYFLMDCAGICSPHGPGTQ

SEQ ID NO: 10967 - protein, 271 aa, Homo sapiens
MRGNLALVGVLISLAFLSLLPSGHPQPAGDDACSVQILVPGLKGDAGEKGDKGAPGRPGRVGPTGEKGDMGDKGQKGSVGRHGKIGPIGSKGEKGDSGDIGPPGPNGEPGLPCECSQLRKAIGEMDNQVSQLTSELKFIKNAVAGVRETESKIYLLVKEEKRYADAQLSCQGRGGTLSMPKDEAANGLMAAYLAQAGLARVFIGINDLEKEGAFVYSDHSPMRTFNKWRSGEPNNAYDEEDCVEMVASGGWNDVACHTTMYFMCEFDKENM

SEQ ID NO: 10968 - protein, 247 aa, Homo sapiens
MRGNLALVGVLISLAFLSLLPSGHPQPAGDDACSVQILVPGLKGDMGDKGQKGSVGRHGKIGPIGSKGEKGDSGDIGPPGPNGEPGLPCECSQLRKAIGEMDNQVSQLTSELKFIKNAVAGVRETESKIYLLVKEEKRYADAQLSCQGRGGTLSMPKDEAANGLMAAYLAQAGLARVFIGINDLEKEGAFVYSDHSPMRTFNKWRSGEPNNAYDEEDCVEMVASGGWNDVACHTTMYFMCEFDKENM

SEQ ID NO: 10969 - protein, 247 aa, Homo sapiens
MRGNLALVGVLISLAFLSLLPSGHPQPAGDDACSVQILVPGLKGDAGEKGDKGAPGRPGRVGPTGEKGEKGDSGDIGPPGPNGEPGLPCECSQLRKAIGEMDNQVSQLTSELKFIKNAVAGVRETESKIYLLVKEEKRYADAQLSCQGRGGTLSMPKDEAANGLMAAYLAQAGLARVFIGINDLEKEGAFVYSDHSPMRTFNKWRSGEPNNAYDEEDCVEMVASGGWNDVACHTTMYFMCEFDKENM

SEQ ID NO: 10970 - protein, 245 aa, Homo sapiens
MWWVPPSPYGCLPCALPGDAGEKGDKGAPGRPGRVGPTGEKGDMGDKGQKGSVGRHGKIGPIGSKGEKGDSGDIGPPGPNGEPGLPCECSQLRKAIGEMDNQVSQLTSELKFIKNAVAGVRETESKIYLLVKEEKRYADAQLSCQGRGGTLSMPKDEAANGLMAAYLAQAGLARVFIGINDLEKEGAFVYSDHSPMRTFNKWRSGEPNNAYDEEDCVEMVASGGWNDVACHTTMYFMCEFDKENM

SEQ ID NO: 10971 - protein, 223 aa, Homo sapiens
MRGNLALVGVLISLAFLSLLPSGHPQPAGDDACSVQILVPGLKGEKGDSGDIGPPGPNGEPGLPCECSQLRKAIGEMDNQVSQLTSELKFIKNAVAGVRETESKIYLLVKEEKRYADAQLSCQGRGGTLSMPKDEAANGLMAAYLAQAGLARVFIGINDLEKEGAFVYSDHSPMRTFNKWRSGEPNNAYDEEDCVEMVASGGWNDVACHTTMYFMCEFDKENM

SEQ ID NO: 10972 - protein, 221 aa, Homo sapiens
MWWVPPSPYGCLPCALPGDMGDKGQKGSVGRHGKIGPIGSKGEKGDSGDIGPPGPNGEPGLPCECSQLRKAIGEMDNQVSQLTSELKFIKNAVAGVRETESKIYLLVKEEKRYADAQLSCQGRGGTLSMPKDEAANGLMAAYLAQAGLARVFIGINDLEKEGAFVYSDHSPMRTFNKWRSGEPNNAYDEEDCVEMVASGGWNDVACHTTMYFMCEFDKENM

SEQ ID NO: 10973 - protein, 221 aa, Homo sapiens
MWWVPPSPYGCLPCALPGDAGEKGDKGAPGRPGRVGPTGEKGEKGDSGDIGPPGPNGEPGLPCECSQLRKAIGEMDNQVSQLTSELKFIKNAVAGVRETESKIYLLVKEEKRYADAQLSCQGRGGTLSMPKDEAANGLMAAYLAQAGLARVFIGINDLEKEGAFVYSDHSPMRTFNKWRSGEPNNAYDEEDCVEMVASGGWNDVACHTTMYFMCEFDKENM

SEQ ID NO: 10974 - protein, 197 aa, Homo sapiens
MWWVPPSPYGCLPCALPGEKGDSGDIGPPGPNGEPGLPCECSQLRKAIGEMDNQVSQLTSELKFIKNAVAGVRETESKIYLLVKEEKRYADAQLSCQGRGGTLSMPKDEAANGLMAAYLAQAGLARVFIGINDLEKEGAFVYSDHSPMRTFNKWRSGEPNNAYDEEDCVEMVASGGWNDVACHTTMYFMCEFDKENM

SEQ ID NO: 10975 - protein, 268 aa, Homo sapiens
MTPALCRSSSLASKGMRERRETKAPPDGLEESAPREKKQSQPVVTASDISKRKCTSSFVEMGSQGDMGDKGQKGSVGRHGKIGPIGSKGEKGDSGDIGPPGPNGEPGLPCECSQLRKAIGEMDNQVSQLTSELKFIKNAVAGVRETESKIYLLVKEEKRYADAQLSCQGRGGTLSMPKDEAANGLMAAYLAQAGLARVFIGINDLEKEGAFVYSDHSPMRTFNKWRSGEPNNAYDEEDCVEMVASGGWNDVACHTTMYFMCEFDKENM

SEQ ID NO: 10976 - protein, 285 aa, Homo sapiens
MKKQRGVGVLPALRMRGNLALVGVLISLAFLSLLPSGHPQPAGDDACSVQILVPGLKGDAGEKGDKGAPGRPGRVGPTGEKGDMGDKGQKGSVGRHGKIGPIGSKGEKGDSGDIGPPGPNGEPGLPCECSQLRKAIGEMDNQVSQLTSELKFIKNAVAGVRETESKIYLLVKEEKRYADAQLSCQGRGGTLSMPKDEAANGLMAAYLAQAGLARVFIGINDLEKEGAFVYSDHSPMRTFNKWRSGEPNNAYDEEDCVEMVASGGWNDVACHTTMYFMCEFDKENM

SEQ ID NO: 10977 - protein, 410 aa, Homo sapiens
MQRLLFPPLRALKGRQYLPLLAPRAAPRAQCDCIRRPLRPGQYSTISEVALQSGRGTVSLPSKAAERVVGRWLLVCSGTVAGAVILGGVTRLTESGLSMVDWHLIKEMKPPTSQEEWEAEFQRYQQFPEFKILNHDMTLTEFKFIWYMEYSHRMWGRLVGLVYILPAAYFWRKGWLSRGMKGRVLALCGLVCFQGLLGWYMVKSGLEEKSDSHDIPRVSQYRLAAHLGSALVLYCASLWTSLSLLLPPHKLPETHQLLQLRRFAHGTAGLVFLTALSGAFVAGLDAGLVYNSFPKMGESWIPEDLFTFSPILRNVFENPTMVQFDHRILGITSVTAITVLYFLSRRIPLPRRTKMAAVTLLALAYTQVGLGISTLLMYVPTPLAATHQSGSLALLTGALWLMNELRRVPK

SEQ ID NO: 10978 - protein, 388 aa, Homo sapiens
MQRLLFPPLRALKGRQYLPLLAPRAAPRAQCDCIRRPLRPGQYSTISEVALQSGRGTVSLPSKAAERVVGRWLLVCSGTVAGAVILGGVTRLTESGLSMVDWHLIKEMKPPTSQEEWEAEFQRYQQFPEFKILNHDMTLTEFKFIWYMEYSHRMWGRLVGLVYILPAAYFWRKGWLSRGMKGRVLALCGLVCFQGLLGWYMVKSGLEEKSDSHDIPRVSQYRLAAHLGSALVLYCASLWTSLSLLLPPHKLPETHQLLQLRRFAHGTAGLVFLTALSGAFVAGLDAGLVYNSFPKMGESWIPEDLFTFSPILRNVFENPTMVQFDHRILGITSVTAITVLYFLSRRIPLPRRTKMAAVTLLALAYTQGPVLFNFTFKISDLDEGIRNI

SEQ ID NO: 10979 - protein, 807 aa, Homo sapiens
MMDSPFLELWQSKAVSIREQLGLGDRPNDSYCYNSAKNSTVLQGVTFGGIPTVLLIDVSCFLFLILVFSIIRRRFWDYGRIALVSEADSESRFQRLSSTSSSGQQDFENELGCCPWLTAIFRLHDDQILEWCGEDAIHYLSFQRHIIFLLVVVSFLSLCVILPVNLSGDLLDKDPYSFGRTTIANLQTDNDLLWLHTIFAVIYLFLTVGFMRHHTQSIKYKEENLVRRTLFITGLPRDARKETVESHFRDAYPTCEVVDVQLCYNVAKLIYLCKEKKKTEKSLTYYTNLQVKTGQRTLINPKPCGQFCCCEVLGCEWEDAISYYTRMKDRLLERITEEERHVQDQPLGMAFVTFQEKSMATYILKDFNACKCQSLQCKGEPQPSSHSRELYTSKWTVTFAADPEDICWKNLSIQGLRWWLQWLGINFTLFLGLFFLTTPSIILSTMDKFNVTKPIHALNNPIISQFFPTLLLWSFSALLPSIVYYSTLLESHWTKSGENQIMMTKVYIFLIFMVLILPSLGLTSLDFFFRWLFDKTSSEASIRLECVFLPDQGAFFVNYVIASAFIGNGMELLRLPGLILYTFRMIMAKTAADRRNVKQNQAFQYEFGAMYAWMLCVFTVIVAYSITCPIIAPFGLIYILLKHMVDRHNLYFVYLPAKLEKGIHFAAVNQALAAPILCLFWLYFFSFLRLGMKAPATLFTFLVLLLTILVCLAHTCFGCFKHLSPLNYKTEEPASDKGSEAEAHMPPPFTPYVPRILNGLASERTALSPQQQQQQTYGAIHNISGTIPGQCLAQSATGSVAAAPQEA

SEQ ID NO: 10980 - protein, 124 aa, Homo sapiens
MESCSVAQAGVLTSPFMWRWTGMAGALSALDNTIEDDADDQLPCGEGRPGWVRGELLGSQGVCKDSKDLFVPTSSSLYGCFCVGLVSGMAISVLLLASDFRKLDFSRPEPCFEKEASLWFVAQH

SEQ ID NO: 10981 - protein, 131 aa, Homo sapiens
MLLLNQTLATTEKQTALQAAEKFVDELCISYSAKKGRGYARKRQKNLLATLQAYKPQNPKDAPVNCDKCGKPGNVKNDCPGSMRKPARPCPICGGDHWRVDCPQRCRSLGPKPVSQVSNRIDGPQGSCPWL

SEQ ID NO: 10982 - protein, 491 aa, Homo sapiens
MDSISTAILLLLLALVCLLLTLSSRDKGKLPPGPRPLSILGNLLLLCSQDMLTSLTKLSKEYGSMYTVHLGPRRVVVLSGYQAVKEALVDQGEEFSGRGDYPAFFNFTKGNGIAFSSGDRWKVLRQFSIQILRNFGMGKRSIEERILEEGSFLLAELRKTEGEPFDPTFVLSRSVSNIICSVLFGSRFDYDDERLLTIIRLINDNFQIMSSPWGELYDIFPSLLDWVPGPHQRIFQNFKCLRDLIAHSVHDHQASLDPRSPRDFIQCFLTKMAEEKEDPLSHFHMDTLLMTTHNLLFGGTKTVSTTLHHAFLALMKYPKVQARVQEEIDLVVGRARLPALKDRAAMPYTDAVIHEVQRFADIIPMNLPHRVTRDTAFRGFLIPKGTDVITLLNTVHYDPSQFLTPQEFNPEHFLDANQSFKKSPAFMPFSAGRRLCLGESLARMELFLYLTAILQSFSLQPLGAPEDIDLTPLSSGLGNLPRPFQLCLRPR

SEQ ID NO: 10983 - protein, 320 aa, Homo sapiens
MDSISTAILLLLLALVCLLLTLSSRDKGKLPPGPRPLSILGNLLLLCSQDMLTSLTKLSKEYGSMYTVHLGPRRVVVLSGYQAVKEALVDQGEEFSGRGDYPAFFNFTKGNGIAFSSGDRWKVLRQFSIQILRNFGMGKRSIEERILEEGSFLLAELRKTEGEPFDPTFVLSRSVSNIICSVLFGSRFDYDDERLLTIIRLINDNFQIMSSPWGELYDIFPSLLDWVPGPHQRIFQNFKCLRDLIAHSVHDHQASLDPRSPRDFIQCFLTKMAEEKEDPLSHFHMDTLLMTTHNLLFGGTKTPACRRRSTSWWDARGCRR

SEQ ID NO: 10984 - protein, 267 aa, Homo sapiens
MPRSCCSRSGALLLALLLQASMEVRGWCLESSQCQDLTTESNLLECIRACKPDLSAETPMFPGNGDEQPLTENPRKYVMGHFRWDRFGRRNSSSSGSSGAGQKREDVSAGEDCGPLPEGGPEPRSDGAKPGPREGKRSYSMEHFRWGKPVGKKRRPVKVYPNGAEDESAEAFPLEFKRELTGQRLREGDGPDGPADDGAGAQADLEHSLLVAAEKKDEGPYRMEHFRWGSPPKDKRYGGFMTSEKSQTPLVTLFKNAIIKNAYKKGE

SEQ ID NO: 10985 - protein, 544 aa, Homo sapiens
MSSPGPSQPPAEDPPWPARLLRAPLGLLRLDPSGGALLLCGLVALLGWSWLRRRRARGIPPGPTPWPLVGNFGHVLLPPFLRRRSWLSSRTRAAGIDPSVIGPQVLLAHLARVYGSIFSFFIGHYLVVVLSDFHSVREALVQQAEVFSDRPRVPLISIVTKEKGVVFAHYGPVWRQQRKFSHSTLRHFGLGKLSLEPKIIEEFKYVKAEMQKHGEDPFCPFSIISNAVSNIICSLCFGQRFDYTNSEFKKMLGFMSRGLEICLNSQVLLVNICPWLYYLPFGPFKELRQIEKDITSFLKKIIKDHQESLDRENPQDFIDMYLLHMEEERKNNSNSSFDEEYLFYIIGDLFIAGTDTTTNSLLWCLLYMSLNPDVQEKVHEEIERVIGANRAPSLTDKAQMPYTEATIMEVQRLTVVVPLAIPHMTSENTVLQGYTIPKGTLILPNLWSVHRDPAIWEKPEDFYPNRFLDDQGQLIKKETFIPFGIGKRVCMGEQLAKMELFLMFVSLMQSFAFALPEDSKKPLLTGRFGLTLAPHPFNITISRR

SEQ ID NO: 10986 - protein, 168 aa, Homo sapiens
MSSPGPSQPPAEDPPWPARLLRAPLGLLRLDPSGGALLLCGLVALLGWSWLRRRRARGIPPGPTPWPLVGNFGHVLLPPFLRRRSWLSSRTRAAGIDPSVIGPQVLLAHLARVYGSIFSFFIGHYLVVVLSDFHSVREALVQQAEVFSDRPRVPLISIVTKEKELFQE

SEQ ID NO: 10987 - protein, 550 aa, Homo sapiens
MSAAWIPALGLGVCLLLLPGPAGSEGAAPIAITCFTRGLDIRKEKADVLCPGGCPLEEFSVYGNIVYASVSSICGAAVHRGVISNSGGPVRVYSLPGRENYSSVDANGIQSQMLSRWSASFTVTKGKSSTQEATGQAVSTAHPPTGKRLKKTPEKKTGNKDCKADIAFLIDGSFNIGQRRFNLQKNFVGKVALMLGIGTEGPHVGLVQASEHPKIEFYLKNFTSAKDVLFAIKEVGFRGGNSNTGKALKHTAQKFFTVDAGVRKGIPKVVVVFIDGWPSDDIEEAGIVAREFGVNVFIVSVAKPIPEELGMVQDVTFVDKAVCRNNGFFSYHMPNWFGTTKYVKPLVQKLCTHEQMMCSKTCYNSVNIAFLIDGSSSVGDSNFRLMLEFVSNIAKTFEISDIGAKIAAVQFTYDQRTEFSFTDYSTKENVLAVIRNIRYMSGGTATGDAISFTVRNVFGPIRESPNKNFLVIVTDGQSYDDVQGPAAAAHDAGITIFSVGVAWAPLDDLKDMASKPKESHAFFTREFTGLEPIVSDVIRGICRDFLESQQ

SEQ ID NO: 10988 - protein, 494 aa, Homo sapiens
MSAAWIPALGLGVCLLLLPGPAGSEGAAPIAITCFTRGLDIRKEKADVLCPGGCPLEEFSVYGNIVYASVSSICGAAVHRGVISNSGGPVRVYSLPGRENYSSVDANGIQSQMLSRWSASFTVTKGKSSTQEATGQAVSTAHPPTGKRLKKTPEKKTGNKDCKADIAFLIDGSFNIGQRRFNLQKNFVGKVALMLGIGTEGPHVGLVQASEHPKIEFYLKNFTSAKDVLFAIKEVGFRGGNSNTGKALKHTAQKFFTVDAGVRKGIPKVVVVFIDGWPSDDIEEAGIVAREFGVNVFIVSVAKPIPEELGMVQDVTFVDKAVCRNNGFFSYHMPNWFGTTKYVKPLVQKLCTHEQMMCSKTCYNSVNIAFLIDGSSSVGDSNFRLMLEFVSNIAKTFEISDIGAKIAAVQFTYDQRTEFSFTDYSTKENVLAVIRNIRYMSGGTATGDAISFTVRNVFGPIRESPNKNFLVIVTDGQSYDDVQGPAAAAHDAAK

SEQ ID NO: 10989 - protein, 519 aa, Homo sapiens
MDAVLEPFPADRLFPGSSFLDLGDLNESDFLNNAHFPEHLDHFTENMEDFSNDLFSSFFDDPVLDEKSPLLDMELDSPTPGIQAEHSYSLSGDSAPQSPLVPIKMEDTTQDAEHGAWALGHKLCSIMVKQEQSPELPVDPLAAPSAMAAAAAMATTPLLGLSPLSRLPIPHQAPGEMTQLPVIKAEPLEVNQFLKVTPEDLVQMPPTPPSSHGSDSDGSQSPRSLPPSSPVRPMARSSTAISTSPLLTAPHKLQGTSGPLLLTEEEKRTLIAEGYPIPTKLPLTKAEEKALKRVRRKIKNKISAQESRRKKKEYVECLEKKVETFTSENNELWKKVETLENANRTLLQQLQKLQTLVTNKISRPYKMAATQTGTCLMVAALCFVLVLGSLVPCLPEFSSGSQTVKEDPLAADGVYTASQMPSRSLLFYDDGAGLWEDGRSTLLPMEPPDGWEINPGGPAEQRPRDHLQHDHLDSTHETTKYLSEAWPKDGGNGTSPDFSHSKEWFHDRDLGPNTTIKLS

SEQ ID NO: 10990 - protein, 431 aa, Homo sapiens
MDAVLEPFPADRLFPGSSFLDLGDLNESDFLNNAHFPEHLDHFTENMEDFSNDLFSSFFDDPVLDEKSPLLDMELDSPTPGIQAEHSYSLSGDSAPQSPLVPIKMEDTTQEDLVQMPPTPPSSHGSDSDGSQSPRSLPPSSPVRPMARSSTAISTSPLLTAPHKLQGTSGPLLLTEEEKRTLIAEGYPIPTKLPLTKAEEKALKRVRRKIKNKISAQESRRKKKEYVECLEKKVETFTSENNELWKKVETLENANRTLLQQLQKLQTLVTNKISRPYKMAATQTGTCLMVAALCFVLVLGSLVPCLPEFSSGSQTVKEDPLAADGVYTASQMPSRSLLFYDDGAGLWEDGRSTLLPMEPPDGWEINPGGPAEQRPRDHLQHDHLDSTHETTKYLSEAWPKDGGNGTSPDFSHSKEWFHDRDLGPNTTIKLS

SEQ ID NO: 10991 - protein, 566 aa, Homo sapiens
MALSLEEEAGRIKDCWDNQEAPALSTCSNANIFRRINAILDNSLDFSRVCTTPINRGIHDHLPDFQDSEETVTSRMLFPTSAQESSRGLPDANDLCLGLQSLSLTGWDRPWSTQDSDSSAQSSTHSVLSMLHNPLGNVLGKPPLSFLPLDPLGSDLVDKFPAPSVRGSRLDTRPILDSRSSSPSDSDTSGFSSGSDHLSDLISSLRISPPLPFLSLSGGGPRDPLKMGVGSRMDQEQAALAAVTPSPTSASKRWPGASVWPSWDLLEAPKDPFSIEREARLHRQAAAVNEATCTWSGQLPPRNYKNPIYSCKVFLGGVPWDITEAGLVNTFRVFGSLSVEWPGKDGKHPRCPPKGNMPKGYVYLVFELEKSVRSLLQACSHDPLSPDGLSEYYFKMSSRRMRCKEVQVIPWVLADSNFVRSPSQRLDPSRTVFVGALHGMLNAEALAAILNDLFGGVVYAGIDTDKHKYPIGSGRVTFNNQRSYLKAVSAAFVEIKTTKFTKKVQIDPYLEDSLCHICSSQPGPFFCRDQVCFKYFCRSCWHWRHSMEGLRHHSPLMRNQKNRDSS

SEQ ID NO: 10992 - protein, 491 aa, Homo sapiens
MLFPTSAQESSRGLPDANDLCLGLQSLSLTGWDRPWSTQDSDSSAQSSTHSVLSMLHNPLGNVLGKPPLSFLPLDPLGSDLVDKFPAPSVRGSRLDTRPILDSRSSSPSDSDTSGFSSGSDHLSDLISSLRISPPLPFLSLSGGGPRDPLKMGVGSRMDQEQAALAAVTPSPTSASKRWPGASVWPSWDLLEAPKDPFSIEREARLHRQAAAVNEATCTWSGQLPPRNYKNPIYSCKVFLGGVPWDITEAGLVNTFRVFGSLSVEWPGKDGKHPRCPPKGNMPKGYVYLVFELEKSVRSLLQACSHDPLSPDGLSEYYFKMSSRRMRCKEVQVIPWVLADSNFVRSPSQRLDPSRTVFVGALHGMLNAEALAAILNDLFGGVVYAGIDTDKHKYPIGSGRVTFNNQRSYLKAVSAAFVEIKTTKFTKKVQIDPYLEDSLCHICSSQPGPFFCRDQVCFKYFCRSCWHWRHSMEGLRHHSPLMRNQKNRDSS

SEQ ID NO: 10993 - protein, 561 aa, Homo sapiens
MAFPLEEEAGRIKDCWDNQEAPALSTCSNANIFRRINAILDNSLDFSRVCTTPINRGIHDHLPDFQDSEETVTSRMLFPTSAQESSRGLPDANDLCLGLQSLSLTGWDRPWSTQDSDSSAQSSTHSVLSMLHNPLGNVLGKPPLSFLPLDPLGSDLVDKFPAPSVRGSRLDTRPILDSRSSSPSDSDTSGFSSGSDHLSDLISSLRISPPLPFLSLSGGGPRDPLKMGVGSRMDQEQAALAAVTPSPTSASKRWPGASVWPSWDLLEAPKDPFSIEREARLHRQAAAVNEATCTWSGQLPPRNYKNPIYSCKVFLGGVPWDITEAGLVNTFRVFGSLSVEWPGKDGKHPRCPPKGYVYLVFELEKSVRSLLQACSHDPLSPDGLSEYYFKMSSRRMRCKEVQVIPWVLADSNFVRSPSQRLDPSRTVFVGALHGMLNAEALAAILNDLFGGVVYAGIDTDKHKYPIGSGRVTFNNQRSYLKAVSAAFVEIKTTKFTKKVQIDPYLEDSLCHICSSQPGPFFCRDQVCFKYFCRSCWHWRHSMEGLRHHSPLMRNQKNRDSS

SEQ ID NO: 10994 - protein, 486 aa, Homo sapiens
MLFPTSAQESSRGLPDANDLCLGLQSLSLTGWDRPWSTQDSDSSAQSSTHSVLSMLHNPLGNVLGKPPLSFLPLDPLGSDLVDKFPAPSVRGSRLDTRPILDSRSSSPSDSDTSGFSSGSDHLSDLISSLRISPPLPFLSLSGGGPRDPLKMGVGSRMDQEQAALAAVTPSPTSASKRWPGASVWPSWDLLEAPKDPFSIEREARLHRQAAAVNEATCTWSGQLPPRNYKNPIYSCKVFLGGVPWDITEAGLVNTFRVFGSLSVEWPGKDGKHPRCPPKGYVYLVFELEKSVRSLLQACSHDPLSPDGLSEYYFKMSSRRMRCKEVQVIPWVLADSNFVRSPSQRLDPSRTVFVGALHGMLNAEALAAILNDLFGGVVYAGIDTDKHKYPIGSGRVTFNNQRSYLKAVSAAFVEIKTTKFTKKVQIDPYLEDSLCHICSSQPGPFFCRDQVCFKYFCRSCWHWRHSMEGLRHHSPLMRNQKNRDSS

SEQ ID NO: 10995 - protein, 196 aa, Homo sapiens
MTLQCTKSAGPWKMVVWDEDGFQGRRHEFTAECPSVLELGFETVRSLKVLSGAWVGFEHAGFQGQQYILERGEYPSWDAWGGNTAYPAERLTSFRPAACANHRDSRLTIFEQENFLGKKGELSDDYPSLQAMGWEGNEVGSFHVHSGAWVCSQFPGYRGFQYVLECDHHSGDYKHFREWGSHAPTFQVQSIRRIQQ

SEQ ID NO: 10996 - protein, 455 aa, Homo sapiens
MVVLNPMTLGIYLQLFFLSIVSQPTFINSVLPISAALPSLDQKKRGGHKACCLLTPPPPPLFPPPFFRGGRSPLLSPDMKNLMLELETSQSPCMQGSLGSPGPPGPQGPPGLPGKTGPKGEKGELGRPGRKGRPGPPGVPGMPGPIGWPGPEGPRGEKGDLGMMGLPGSRGPMGSKGYPGSRGEKGSRGEKGDLGPKGEKGFPGFPGMLGQKGEMGPKGEPGIAGHRGPTGRPGKRGKQGQKGDSGVMGPPGKPGPSGQPGRPGPPGPPPAGQLIMGPKGERGFPGPPGRCLCGPTMNVNNPSYGESVYGPSSPRVPVIFVVNNQEELERLNTQNAIAFRRDQRSLYFKDSLGWLPIQLTPFYPVDYTADQHGTCGDGLLQPGEECDDGNSDVGDDCIRCHRAYCGDGHRHEGVEDCDGSDFGYLTCETYLPGSYGDLQCTQYCYIDSTPCRYFT

SEQ ID NO: 10997 - protein, 445 aa, Homo sapiens
MTGSSFSLAHLLIISGLLCYSAGCLALPSLDQKKRGGHKACCLLTPPPPPLFPPPFFRGGRSPLLSPDMKNLMLELETSQSPCMQGSLGSPGPPGPQGPPGLPGKTGPKGEKGELGRPGRKGRPGPPGVPGMPGPIGWPGPEGPRGEKGDLGMMGLPGSRGPMGSKGYPGSRGEKGSRGEKGDLGPKGEKGFPGFPGMLGQKGEMGPKGEPGIAGHRGPTGRPGKRGKQGQKGDSGVMGPPGKPGPSGQPGRPGPPGPPPAGQLIMGPKGERGFPGPPGRCLCGPTMNVNNPSYGESVYGPSSPRVPVIFVVNNQEELERLNTQNAIAFRRDQRSLYFKDSLGWLPIQLTPFYPVDYTADQHGTCGDGLLQPGEECDDGNSDVGDDCIRCHRAYCGDGHRHEGVEDCDGSDFGYLTCETYLPGSYGDLQCTQYCYIDSTPCRYFT

SEQ ID NO: 10998 - protein, 421 aa, Homo sapiens
MVVLNPMTLGIYLQLFFLSIVSQPTFINSVLPISAALPSLDQKKRGGHKACCLLTPPPPPLFPPPFFRGGRSPGPPGLPGKTGPKGEKGELGRPGRKGRPGPPGVPGMPGPIGWPGPEGPRGEKGDLGMMGLPGSRGPMGSKGYPGSRGEKGSRGEKGDLGPKGEKGFPGFPGMLGQKGEMGPKGEPGIAGHRGPTGRPGKRGKQGQKGDSGVMGPPGKPGPSGQPGRPGPPGPPPAGQLIMGPKGERGFPGPPGRCLCGPTMNVNNPSYGESVYGPSSPRVPVIFVVNNQEELERLNTQNAIAFRRDQRSLYFKDSLGWLPIQLTPFYPVDYTADQHGTCGDGLLQPGEECDDGNSDVGDDCIRCHRAYCGDGHRHEGVEDCDGSDFGYLTCETYLPGSYGDLQCTQYCYIDSTPCRYFT

SEQ ID NO: 10999 - protein, 451 aa, Homo sapiens
MVVLNPMTLGIYLQLFFLSIVSQPTFINSVLPISAALPSLDQKKRGGHKACCLLTPPPPPLFPPPFFRGGRSPDMKNLMLELETSQSPCMQGSLGSPGPPGPQGPPGLPGKTGPKGEKGELGRPGRKGRPGPPGVPGMPGPIGWPGPEGPRGEKGDLGMMGLPGSRGPMGSKGYPGSRGEKGSRGEKGDLGPKGEKGFPGFPGMLGQKGEMGPKGEPGIAGHRGPTGRPGKRGKQGQKGDSGVMGPPGKPGPSGQPGRPGPPGPPPAGQLIMGPKGERGFPGPPGRCLCGPTMNVNNPSYGESVYGPSSPRVPVIFVVNNQEELERLNTQNAIAFRRDQRSLYFKDSLGWLPIQLTPFYPVDYTADQHGTCGDGLLQPGEECDDGNSDVGDDCIRCHRAYCGDGHRHEGVEDCDGSDFGYLTCETYLPGSYGDLQCTQYCYIDSTPCRYFT

SEQ ID NO: 11000 - protein, 446 aa, Homo sapiens
MVVLNPMTLGIYLQLFFLSIVSQPTFINSVLPISAALPSLDQKKRGGHKACCLLTPPPPPLFPPPFFRGGRSPLLSPDMKNLMLELETSQSPCMQGSLGSPGPPGPQGPPGLPGKTGPKGEKGRPGPPGVPGMPGPIGWPGPEGPRGEKGDLGMMGLPGSRGPMGSKGYPGSRGEKGSRGEKGDLGPKGEKGFPGFPGMLGQKGEMGPKGEPGIAGHRGPTGRPGKRGKQGQKGDSGVMGPPGKPGPSGQPGRPGPPGPPPAGQLIMGPKGERGFPGPPGRCLCGPTMNVNNPSYGESVYGPSSPRVPVIFVVNNQEELERLNTQNAIAFRRDQRSLYFKDSLGWLPIQLTPFYPVDYTADQHGTCGDGLLQPGEECDDGNSDVGDDCIRCHRAYCGDGHRHEGVEDCDGSDFGYLTCETYLPGSYGDLQCTQYCYIDSTPCRYFT

SEQ ID NO: 11001 - protein, 291 aa, Homo sapiens
MVVLNPMTLGIYLQLFFLSIVSQPTFINSVLPISAALPSLDQKKRGGHKACCLLTPPPPPLFPPPFFRGGRSPLLSPDMKNLMLELETSQSPCMQGSLGSPGPPGPQGPPGLPGKTGPKGEKGELGRPGRKGRPGPPGVPGMPGPIGWPGPEGPRGEKGDLGMMGLPGSRGPMGSKGYPGSRGEKGSRGEKGDLGPKGEKGFPGFPGMLGQKGEMGPKGEPGIAGHRGPTGRPGKRGKQSSRTPCTLPRRPPVPCGQGSRSPVTVVAGNESQACLLPRFEEDYISSGTERG

SEQ ID NO: 11002 - protein, 281 aa, Homo sapiens
MVVLNPMTLGIYLQLFFLSIVSQPTFINSVLPISAALPSLDQKKRGGHKACCLLTPPPPPLFPPPFFRGGRSPLLSPDMKNLMLELETSQSPCMQGSLGSPGPPGPQGPPGLPGKTGPKGEKGELGRPGRKGRPGPPGVPGMPGPIGWPGPEGPRGEKGDLGMMGLPGSRGPMGSKGYPGSRGEKGSRGEKGDLGPKGEKGFPGFPGMLGQKGEMGPKGEPGIAGHRGPTGRPGKRGKQGQKGDSGVMGPPGKPGPSGQPGRPGPPGPPPADFCGQQPGGA

SEQ ID NO: 11003 - protein, 329 aa, Homo sapiens
MVVLNPMTLGIYLQLFFLSIVSQPTFINSVLPISAALPSLDQKKRGGHKACCLLTPPPPPLFPPPFFRGGRSPLLSPDMKNLMLELETSQSPCMQGSLGSPGPPGPQGPPGLPGKTGPKGEKGELGRPGRKGRPGPPGVPGMPGPIGWPGPEGPRGEKGDLGMMGLPGSRGPMGSKGYPGSRGEKGSRGEKGDLGPKGEKGFPGFPGMLGQKGEMGPKGEPGIAGHRGPTGRPGKRGKQGQKGDSGVMGPPGKPGPSGQPGRPGPPGPPPAGHMETCNAPSTATSTPRPAATSPEGREEKVGCAPQNWQQLLHCHQTGHVLAPSPPTFV

SEQ ID NO: 11004 - protein, 717 aa, Homo sapiens
MVAERTHKAAATGARGPGELGAPGTVALVAARAERGARLPSPGSCGLLTLALCSLALSLLAHFRTAELQARVLRLEAERGEQQMETAILGRVNQLLDEKWKLHSRRRREAPKTSPGCNCPPGPPGPTGRPGLPGDKGAIGMPGRVGSPGDAGLSIIGPRGPPGQPGTRGFPGFPGPIGLDGKPGHPGPKGDMGLTGPPGQPGPQGQKGEKGQCGEYPHRECLSSMPAALRSSQIIALKLLPLLNSVRLAPPPVIKRRTFQGEQSQASIQGPPGPPGPPGPSGPLGHPGLPGPMGPPGLPGPPGPKGDPGIQGYHGRKGERGMPGMPGKHGAKGAPGIAVAGMKGEPGIPGTKGEKGAEGSPGLPGLLGQKGEKGDAGNSIGGGRGEPGPPGLPGPPGPKGEAGVDGQVGPPGQPGDKGERGAAGEQGPDGPKGSKGEPGKGEMVDYNGNINEALQEIRTLALMGPPGLPGQIGPPGAPGIPGQKGEIGLPGPPGHDGEKGPRGKPGDMGPPGPQGPPGKDGPPGVKGENGHPGSPGEKGEKGETGQAGSPGEKGEAGEKGNPGAEVPGLPGPEGPPGPPGLQGVPGPKGEAGLDGAKGEKGFQGEKGDRGPLGLPGASGLDGRPGPPGTPGPIGVPGPAGPKGERGSKGDPGMTGPTGAAGLPGLHGPPGDKGNRGERGKKGSRGPKGDKGDQGAPGLDAPCPLGEDGLPVQGCWNK

SEQ ID NO: 11005 - protein, 695 aa, Homo sapiens
MVAERTHKAAATGARGPGELGAPGTVALVAARAERGARLPSPGSCGLLTLALCSLALSLLAHFRTAELQARVLRLEAERGEQQMETAILGRVNQLLDEKWKLHSRRRREAPKTSPGCNCPPGPPGPTGRPGLPGDKGAIGMPGRVGSPGDAGLSIIGPRGPPGQPGTRGFPGFPGPIGLDGKPGHPGPKGDMGLTGPPGQPGPQGQKGEKGQCGEYPHRECLSSMPAALRSSQIIALKGEQSQASIQGPPGPPGPPGPSGPLGHPGLPGPMGPPGLPGPPGPKGDPGIQGYHGRKGERGMPGMPGKHGAKGAPGIAVAGMKGEPGIPGTKGEKGAEGSPGLPGLLGQKGEKGDAGNSIGGGRGEPGPPGLPGPPGPKGEAGVDGQVGPPGQPGDKGERGAAGEQGPDGPKGSKGEPGKGEMVDYNGNINEALQEIRTLALMGPPGLPGQIGPPGAPGIPGQKGEIGLPGPPGHDGEKGPRGKPGDMGPPGPQGPPGKDGPPGVKGENGHPGSPGEKGEKGETGQAGSPGEKGEAGEKGNPGAEVPGLPGPEGPPGPPGLQGVPGPKGEAGLDGAKGEKGFQGEKGDRGPLGLPGASGLDGRPGPPGTPGPIGVPGPAGPKGERGSKGDPGMTGPTGAAGLPGLHGPPGDKGNRGERGKKGSRGPKGDKGDQGAPGLDAPCPLGEDGLPVQGCWNK

SEQ ID NO: 11006 - protein, 683 aa, Homo sapiens
MVAERTHKAAATGARGPGELGAPGTVALVAARAERGARLPSPGSCGLLTLALCSLALSLLAHFRTAELQARVLRLEAERGEQQMETAILGRVNQLLDEKWKLHSRRRREAPKTSPGCNCPPGPPGPTGRPGLPGDKGAIGMPGRVGSPGDAGLSIIGPRGPPGQPGTRGFPGFPGPIGLDGKPGHPGPKGDMGLTGPPGQPGPQGQKGEKGQCGEYPHRECLSSMPAALRSSQIIALKGEQSQASIQGPPGPPGPPGPSGPLGHPGLPGPMGPPGLPGPPGPKGDPGIQGYHGRKGERGMPGMPGKHGAKGAPGIAVAGMKGEPGIPGTKGEKGAEGSPGLPGLLGQKGEKGDAGNSIGGGRGEPGPPGLPGPPGPKGEAGVDGQVGPPGQPGDKGERGAAGEQGPDGPKGSKGEPGKGEMVDYNGNINEALQEIRTLALMGPPGLPGQIGPPGAPGIPGQKGEIGLPGPPGHDGEKGPRGKPGDMGPPGPQGPPGKDGPPGVKGENGHPGSPGEKGEKGETGQAGSPGEKGEAGEKGNPGAEVPGLPGPEGPPGPPGLQGVPGPKGEAGLDGAKGEKGFQGEKGDRGPLGLPGTPGPIGVPGPAGPKGERGSKGDPGMTGPTGAAGLPGLHGPPGDKGNRGERGKKGSRGPKGDKGDQGAPGLDAPCPLGEDGLPVQGCWNK

SEQ ID NO: 11007 - protein, 668 aa, Homo sapiens
MVAERTHKAAATGARGPGELGAPGTVALVAARAERGARLPSPGSCGLLTLALCSLALSLLAHFRTAELQARVLRLEAERGEQQMETAILGRVNQLLDEKWKLHSRRRREAPKTSPGCNCPPGPPGPTGRPGLPGDKGAIGMPGRVGSPGDAGLSIIGPRGPPGQPGTRGFPGFPGPIGLDGKPGHPGPKGDMGLTGPPGQPGPQGQKGEKGQCGEYPHRECLSSMPAALRSSQIIALKGEQSQASIQGPPGPPGPPGPSGPLGHPGLPGPMGPPGLPGPPGPKGDPGIQGYHGRKGERGMPGMPGKHGAKGAPGIAVAGMKGEPGIPGTKGEKGAEGSPGLPGLLGQKGEKGDAGNSIGGGRGEPGPPGLPGPPGPKGEAGVDGQVGPPGQPGDKGERGAAGEQGPDGPKGSKGEPGKGEMVDYNGNINEALQEIRTLALMGPPGLPGQIGPPGAPGIPGQKGEIGLPGPPGHDGEKGPRGKPGDMGPPGPQGPPGKDGPPGVKGENGHPGSPGEKGEKGETGQAGSPVPGLPGPEGPPGPPGLQGVPGPKGEAGLDGAKGEKGFQGEKGDRGPLGLPGTPGPIGVPGPAGPKGERGSKGDPGMTGPTGAAGLPGLHGPPGDKGNRGERGKKGSRGPKGDKGDQGAPGLDAPCPLGEDGLPVQGCWNK

SEQ ID NO: 11008 - protein, 702 aa, Homo sapiens
MVAERTHKAAATGARGPGELGAPGTVALVAARAERGARLPSPGSCGLLTLALCSLALSLLAHFRTAELQARVLRLEAERGEQQMETAILGRVNQLLDEKWKLHSRRRREAPKTSPGCNCPPGPPGPTGRPGLPGDKGAIGMPGRVGSPGDAGLSIIGPRGPPGQPGTRGFPGFPGPIGLDGKPGHPGPKGDMGLTGPPGQPGPQGQKGEKGQCGEYPHRECLSSMPAALRSSQIIALKLLPLLNSVRLAPPPVIKRRTFQGEQSQASIQGPPGPPGPPGPSGPLGHPGLPGPMGPPGLPGPPGPKGDPGIQGYHGRKGERGMPGMPGKHGAKGAPGIAVAGMKGEPGIPGTKGEKGAEGSPGLPGLLGQKGEKGDAGNSIGGGRGEPGPPGLPGPPGPKGEAGVDGQVGPPGQPGDKGERGAAGEQGPDGPKGSKGEPGKGEMVDYNGNINEALQEIRTLALMGPPGLPGQIGPPGAPGIPGQKGEIGLPGPPGHDGEKGPRGKPGDMGPPGPQGPPGKDGPPGVKGENGHPGSPGEKGEKGETGQAGSPVPGLPGPEGPPGPPGLQGVPGPKGEAGLDGAKGEKGFQGEKGDRGPLGLPGASGLDGRPGPPGTPGPIGVPGPAGPKGERGSKGDPGMTGPTGAAGLPGLHGPPGDKGNRGERGKKGSRGPKGDKGDQGAPGLDAPCPLGEDGLPVQGCWNK

SEQ ID NO: 11009 - protein, 703 aa, Homo sapiens
MVAERTHKAAATGARGPGELGAPGTVALVAARAERGARLPSPGSCGLLTLALCSLALSLLAHFRTAELQARVLRLEAERGEQQMETAILGRVNQLLDEKWKLHSRRRREAPKTSPGCNCPPGPPGPTGRPGLPGDKGAIGMPGRVGSPGDAGLSIIGPRGPPGQPGTRGFPGFPGPIGLDGKPGHPGPKGDMGLTGPPGQPGPQGQKGEKGQCGEYPHRECLSSMPAALRSSQIIALKLLPLLNSVRLAPPPVIKRRTFQGEQSQASIQGPPGPPGPPGPSGPLGHPGLPGPMGPPGLPGPPGPKGDPGIQGYHGRKGERGMPGMPGKHGAKGAPGIAVAGMKGEPGIPGTKGEKGAEGSPGLPGLLGQKGEKGDAGNSIGGGRGEPGPPGLPGPPGPKGEAGVDGQVGPPGQPGDKGERGAAGEQGPDGPKGSKGEPGKGEMVDYNGNINEALQEIRTLALMGPPGLPGQIGPPGAPGIPGQKGEIGLPGPPGHDGEKGPRGKPGDMGPPGPQGPPGKDGPPGVKGENGHPGSPGEKGEKGETGQAGSPGEKGEAGEKGNPGAEGLQGVPGPKGEAGLDGAKGEKGFQGEKGDRGPLGLPGASGLDGRPGPPGTPGPIGVPGPAGPKGERGSKGDPGMTGPTGAAGLPGLHGPPGDKGNRGERGKKGSRGPKGDKGDQGAPGLDAPCPLGEDGLPVQGCWNK

SEQ ID NO: 11010 - protein, 691 aa, Homo sapiens
MVAERTHKAAATGARGPGELGAPGTVALVAARAERGARLPSPGSCGLLTLALCSLALSLLAHFRTAELQARVLRLEAERGEQQMETAILGRVNQLLDEKWKLHSRRRREAPKTSPGCNCPPGPPGPTGRPGLPGDKGAIGMPGRVGSPGDAGLSIIGPRGPPGQPGTRGFPGFPGPIGLDGKPGHPGPKGDMGLTGPPGQPGPQGQKGEKGQCGEYPHRECLSSMPAALRSSQIIALKLLPLLNSVRLAPPPVIKRRTFQGEQSQASIQGPPGPPGPPGPSGPLGHPGLPGPMGPPGLPGPPGPKGDPGIQGYHGRKGERGMPGMPGKHGAKGAPGIAVAGMKGEPGIPGTKGEKGAEGSPGLPGLLGQKGEKGDAGNSIGGGRGEPGPPGLPGPPGPKGEAGVDGQVGPPGQPGDKGERGAAGEQGPDGPKGSKGEPGKGEMVDYNGNINEALQEIRTLALMGPPGLPGQIGPPGAPGIPGQKGEIGLPGPPGHDGEKGPRGKPGDMGPPGPQGPPGKDGPPGVKGENGHPGSPGEKGEKGETGQAGSPGEKGEAGEKGNPGAEGLQGVPGPKGEAGLDGAKGEKGFQGEKGDRGPLGLPGTPGPIGVPGPAGPKGERGSKGDPGMTGPTGAAGLPGLHGPPGDKGNRGERGKKGSRGPKGDKGDQGAPGLDAPCPLGEDGLPVQGCWNK

SEQ ID NO: 11011 - protein, 686 aa, Homo sapiens
MVAERTHKAAATGARGPGELGAPGTVALVAARAERGARLPSPGSCGLLTLALCSLALSLLAHFRTAELQARVLRLEAERGEQQMETAILGRVNQLLDEKWKLHSRRRREAPKTSPGCNCPPGPPGPTGRPGLPGDKGAIGMPGRVGSPGDAGLSIIGPRGPPGQPGTRGFPGFPGPIGLDGKPGHPGPKGDMGLTGPPGQPGPQGQKGEKGQCGEYPHRLLPLLNSVRLAPPPVIKRRTFQGEQSQASIQGPPGPPGPPGPSGPLGHPGLPGPMGPPGLPGPPGPKGDPGIQGYHGRKGERGMPGMPGKHGAKGAPGIAVAGMKGEPGIPGTKGEKGAEGSPGLPGLLGQKGEKGDAGNSIGGGRGEPGPPGLPGPPGPKGEAGVDGQVGPPGQPGDKGERGAAGEQGPDGPKGSKGEPGKGEMVDYNGNINEALQEIRTLALMGPPGLPGQIGPPGAPGIPGQKGEIGLPGPPGHDGEKGPRGKPGDMGPPGPQGPPGKDGPPGVKGENGHPGSPGEKGEKGETGQAGSPGEKGEAGEKGNPGAEVPGLPGPEGPPGPPGLQGVPGPKGEAGLDGAKGEKGFQGEKGDRGPLGLPGTPGPIGVPGPAGPKGERGSKGDPGMTGPTGAAGLPGLHGPPGDKGNRGERGKKGSRGPKGDKGDQGAPGLDAPCPLGEDGLPVQGCWNK

SEQ ID NO: 11012 - protein, 638 aa, Homo sapiens
MVAERTHKAAATGARGPGELGAPGTVALVAARAERGARLPSPGSCGLLTLALCSLALSLLAHFRTAELQARVLRLEAERGEQQMETAILGRVNQLLDEKWKLHSRRRREAPKTSPGCNCPPGPPGPTGRPGLPGDKGAIGMPGRVGSPGDAGLSIIGPRGPPGQPGTRGFPGFPGPIGLDGKPGHPGPKGDMGLTGPPGQPGPQGQKGEKGQCGEYPHRECLSSMPAALRSSQIIALKGEQSQASIQGPPGPPGPPGPSGPLGHPGLPGPMGPPGLPGPPGPKGDPGIQGYHGRKGERGMPGMPGKHGAKGAPGIAVAGMKGEPGIPGTKGEKGAEGSPGLPGLLGQKGEKGDAGNSIGGGRGEPGPPGLPGPPGPKGEAGVDGQVGPPGQPGDKGERGAAGEQGPDGPKGSKGEPGKGEMVDYNGNINEALQEIRTLALMGPPGLPGQIGPPGAPGIPGQKGEIGLPGPPGHDGEKGPRGKPGDMGPPGPQGPPGKDGPPGVKGENGHPGSPGEKGEKGETGQAGSPVPGLPGPEGPPGPPGLQGVPGPKGEAGLDGAKGEKGFQGEKGDRGPLGLPGTPGPIGVPGPAGPKGERGSKGDPGMTGPTGAAGLPGLHGPPGDKGNREDGLPVQGCWNK

SEQ ID NO: 11013 - protein, 645 aa, Homo sapiens
MVAERTHKAAATGARGPGELGAPGTVALVAARAERGARLPSPGSCGLLTLALCSLALSLLAHFRTAELQARVLRLEAERGEQQMETAILGRVNQLLDEKWKLHSRRRREAPKTSPGCNCPPGPPGQPGTRGFPGFPGPIGLDGKPGHPGPKGDMGLTGPPGQPGPQGQKGEKGQCGEYPHRLLPLLNSVRLAPPPVIKRRTFQGEQSQASIQGPPGPPGPPGPSGPLGHPGLPGPMGPPGLPGPPGPKGDPGIQGYHGRKGERGMPGMPGKHGAKGAPGIAVAGMKGEPGIPGTKGEKGAEGSPGLPGLLGQKGEKGDAGNSIGGGRGEPGPPGLPGPPGPKGEAGVDGQVGPPGQPGDKGERGAAGEQGPDGPKGSKGEPGKGEMVDYNGNINEALQEIRTLALMGPPGLPGQIGPPGAPGIPGQKGEIGLPGPPGHDGEKGPRGKPGDMGPPGPQGPPGKDGPPGVKGENGHPGSPGEKGEKGETGQAGSPVPGLPGPEGPPGPPGLQGVPGPKGEAGLDGAKGEKGFQGEKGDRGPLGLPGASGLDGRPGPPGTPGPIGVPGPAGPKGERGSKGDPGMTGPTGAAGLPGLHGPPGDKGNRGERGKKGSRGPKGDKGDQGAPGLDAPCPLGEDGLPVQGCWNK

SEQ ID NO: 11014 - protein, 610 aa, Homo sapiens
MVAERTHKAAATGARGPGELGAPGTVALVAARAERGARLPSPGSCGLLTLALCSLALSLLAHFRTAELQARVLRLEAERGEQQMETAILGRVNQLLDEKWKLHSRRRREAPKTSPGCNCPPGPPGPTGRPGLPGQPGTRGFPGFPGPIGLDGKPGHPGPKGDMGLTGPPGQPGPQGQKGEKGQCGEYPHRECLSSMPAALRSSQIIALKGEQSQASIQGPPGPPGPPGPSGPLGHPGLPGPMGPPGLPGPPGPKGDPGIQGYHGRKGERGMPGMPGKHGAKGAPGIAVAGMKGEPGIPGTKGEKGAEGSPGLPGLLGQKGEKGDAGNSIGGGRGEPGPPGLPGPPGPKGEAGVDGQVGPPGQPGDKGERGAAGEQGPDGPKGSKGEPGKGEMVDYNGNINEALQEIRTLALMGPPGLPGQIGPPGAPGIPGQKGEIGLPGPPGHDGEKGPRGKPGDMGPPGPQGPPGKDGPPGVKGENGHPGSPGEKGEKGETGQAGSPVPGLPGPEGPPGPPGLQGVPGPKGEAGLDGAKGEKGFQGEKGDRGPLGLPGTPGPIGVPGPAGPKGERGSKGDPGMTGPTGAAGLPGLHGPPGDKGNRGEDGLPVQGCWNK

SEQ ID NO: 11015 - protein, 589 aa, Homo sapiens
MPPPSPDSENGFYPGLPSSMNPAFFPSFSPVSPHGCTGLSVPTSGGGGGGFGGPFSATAVPPPPPPAMNIPQQQPPPPAAPQQPQSRRSPVSPQLQQQHQAAAAAFLQQRNSYNHHQPLLKQSPWSNHQSSGWGTGSMSWGAMHGRDHRRTGNMGIPGTMNQISPLKKPFSGNVIAPPKFTRSTPSLTPKSWIEDNVFRTDNNSNTLLPLQVRSSLQLPAWGSDSLQDSWCTAAGTSRIDQDRSRMYDSLNMHSLENSLIDIMRAEHDPLKGRLSYPHPGTDNLLMLNGRSSLFPIDDGLLDDGHSDQVGVLNSPTCYSAHQNGERIERFSRKVFVGGLPPDIDEDEITASFRRFGPLVVDWPHKAESKSYFPPKGYAFLLFQEESSVQALIDACIEEDGKLYLCVSSPTIKDKPVQIRPWNLSDSDFVMDGSQPLDPRKTIFVGGVPRPLRAVELAMIMDRLYGGVCYAGIDTDPELKYPKGAGRVAFSNQQSYIAAISARFVQLQHGDIDKRVEVKPYVLDDQMCDECQGARCGGKFAPFFCANVTCLQYYCEFCWANIHSRAGREFHKPLVKEGADRPRQIHFRWN

SEQ ID NO: 11016 - protein, 575 aa, Homo sapiens
MPPPSPDSENGFYPGLPSSMNPAFFPSFSPVSPHGCTGLSVPPPAMNIPQQQPPPPAAPQQPQSRRSPVSPQLQQQHQAAAAAFLQQRNSYNHHQPLLKQSPWSNHQSSGWGTGSMSWGAMHGRDHRRTGNMGIPGTMNQISPLKKPFSGNVIAPPKFTRSTPSLTPKSWIEDNVFRTDNNSNTLLPLQVRSSLQLPAWGSDSLQDSWCTAAGTSRIDQDRSRMYDSLNMHSLENSLIDIMRAEHDPLKGRLSYPHPGTDNLLMLNARSYGRRRGRSSLFPIDDGLLDDGHSDQVGVLNSPTCYSAHQNGERIERFSRKVFVGGLPPDIDEDEITASFRRFGPLVVDWPHKAESKSYFPPKGYAFLLFQEESSVQALIDACIEEDGKLYLCVSSPTIKDKPVQIRPWNLSDSDFVMDGSQPLDPRKTIFVGGVPRPLRAVELAMIMDRLYGGVCYAGIDTDPELKYPKGAGRVAFSNQQSYIAAISARFVQLQHGDIDKRVEVKPYVLDDQMCDECQGARCGGKFAPFFCANVTCLQYYCEFCWANIHSRAGREFHKPLVKEGADRPRQIHFRWN

SEQ ID NO: 11017 - protein, 562 aa, Homo sapiens
MPPPSPDSENGFYPGLPSSMNPAFFPSFSPVSPHGCTGLSVPTSGGGGGGFGGPFSATAVPPPPPPAMNIPQQQPPPPAAPQQPQSRRSPVSPQLQQQHQAAAAAFLQQRNSYNHHQPLLKQSPWSNHQSSGWGTGSMSWGAMHGRDHRRTGNMGIPGTMNQISPLKKPFSGNVIAPPKFTRSTPSLTPKSWIEDNVFRTDNNSNTLLPLQVRMDRSRMYDSLNMHSLENSLIDIMRAEHDPLKGRLSYPHPGTDNLLMLNGRSSLFPIDDGLLDDGHSDQVGVLNSPTCYSAHQNGERIERFSRKVFVGGLPPDIDEDEITASFRRFGPLVVDWPHKAESKSYFPPKGYAFLLFQEESSVQALIDACIEEDGKLYLCVSSPTIKDKPVQIRPWNLSDSDFVMDGSQPLDPRKTIFVGGVPRPLRAVELAMIMDRLYGGVCYAGIDTDPELKYPKGAGRVAFSNQQSYIAAISARFVQLQHGDIDKRVEVKPYVLDDQMCDECQGARCGGKFAPFFCANVTCLQYYCEFCWANIHSRAGREFHKPLVKEGADRPRQIHFRWN

SEQ ID NO: 11018 - protein, 559 aa, Homo sapiens
MPPPSPDSENGFYPGLPSSMNPAFFPSFSPVSPHGCTGLSVPTSGGGGGGFGGPFSATAVPPPPPPAMNIPQQQPPPPAAPQQPQSRRSPVSPQLQQQHQAAAAAFLQQRNSYNHHQPLLKQSPWSNHQSSGWGTGSMSWGAMHGRDHRRTGNMGIPGTMNQISPLKKPFSGNVIAPPKFTRSTPSLTPKSWIEDNVFRTDNNSNTLLPLQDRSRMYDSLNMHSLENSLIDIMRAEHDPLKGRLSYPHPGTDNLLMLNGRSSLFPIDDGLLDDGHSDQVGVLNSPTCYSAHQNGERIERFSRKVFVGGLPPDIDEDEITASFRRFGPLVVDWPHKAESKSYFPPKGYAFLLFQEESSVQALIDACIEEDGKLYLCVSSPTIKDKPVQIRPWNLSDSDFVMDGSQPLDPRKTIFVGGVPRPLRAVELAMIMDRLYGGVCYAGIDTDPELKYPKGAGRVAFSNQQSYIAAISARFVQLQHGDIDKRVEVKPYVLDDQMCDECQGARCGGKFAPFFCANVTCLQYYCEFCWANIHSRAGREFHKPLVKEGADRPRQIHFRWN

SEQ ID NO: 11019 - protein, 567 aa, Homo sapiens
MPPPSPDSENGFYPGLPSSMNPAFFPSFSPVSPHGCTGLSVPTSGGGGGGFGGPFSATAVPPPPPPAMNIPQQQPPPPAAPQQPQSRRSPVSPQLQQQHQAAAAAFLQQRNSYNHHQPLLKQSPWSNHQSSGWGTGSMSWGAMHGRDHRRTGNMGIPGTMNQISPLKKPFSGNVIAPPKFTRSTPSLTPKSWIEDNVFRTDNNSNTLLPLQDRSRMYDSLNMHSLENSLIDIMRAEHDPLKGRLSYPHPGTDNLLMLNARSYGRRRGRSSLFPIDDGLLDDGHSDQVGVLNSPTCYSAHQNGERIERFSRKVFVGGLPPDIDEDEITASFRRFGPLVVDWPHKAESKSYFPPKGYAFLLFQEESSVQALIDACIEEDGKLYLCVSSPTIKDKPVQIRPWNLSDSDFVMDGSQPLDPRKTIFVGGVPRPLRAVELAMIMDRLYGGVCYAGIDTDPELKYPKGAGRVAFSNQQSYIAAISARFVQLQHGDIDKRVEVKPYVLDDQMCDECQGARCGGKFAPFFCANVTCLQYYCEFCWANIHSRAGREFHKPLVKEGADRPRQIHFRWN

SEQ ID NO: 11020 - protein, 548 aa, Homo sapiens
MPPPSPDSENGFYPGLPSSMNPAFFPSFSPVSPHGCTGLSVPPPAMNIPQQQPPPPAAPQQPQSRRSPVSPQLQQQHQAAAAAFLQQRNSYNHHQPLLKQSPWSNHQSSGWGTGSMSWGAMHGRDHRRTGNMGIPGTMNQISPLKKPFSGNVIAPPKFTRSTPSLTPKSWIEDNVFRTDNNSNTLLPLQVRMDRSRMYDSLNMHSLENSLIDIMRAEHDPLKGRLSYPHPGTDNLLMLNARSYGRRRGRSSLFPIDDGLLDDGHSDQVGVLNSPTCYSAHQNGERIERFSRKVFVGGLPPDIDEDEITASFRRFGPLVVDWPHKAESKSYFPPKGYAFLLFQEESSVQALIDACIEEDGKLYLCVSSPTIKDKPVQIRPWNLSDSDFVMDGSQPLDPRKTIFVGGVPRPLRAVELAMIMDRLYGGVCYAGIDTDPELKYPKGAGRVAFSNQQSYIAAISARFVQLQHGDIDKRVEVKPYVLDDQMCDECQGARCGGKFAPFFCANVTCLQYYCEFCWANIHSRAGREFHKPLVKEGADRPRQIHFRWN

SEQ ID NO: 11021 - protein, 1007 aa, Homo sapiens
MRDFGFGVLQTAPLRSSSPGPLFCGEAYGPYAVGSVNPLPSATPFGPLSPPPLPVTGFLEAASPFSVPLGGGAGSPAAAASSSSPFLAHQQTMQDELLLGLTQQPARPLSGAAATEKLPDHHPGGGTIAGVTHLLPSQDFKPSLHHPSSSSASSCCCCRTSSPQDFSKRQQQQLSSQKRKEFSPPHLPHPPDSKPPPPPPPLHCPGRFSPPPPPAGPLLQPAQLAQRQQQQPPQQFSLLHQQHLSPQDFAPRQRPADLPPLPQLPPSPPAAPRRRHGGAGSPRKTPAAGEGSAAESPNAGLASSTPVNPAPGSMESPNHPLLNSPSNLLPGGALGAGAFSSLQSPDLPHPGGGGGGGGGGPPGGGGGGGSASPPPLPGFGTPWSVQTASPPPQPQQPPPTQPQQQPPPPQQPPQPQPQPPGSSATTPGGGSGGSLSAMPPPSPDSENGFYPGLPSSMNPAFFPSFSPVSPHGCTGLSVPTSGGGGGGFGGPFSATAVPPPPPPAMNIPQQQPPPPAAPQQPQSRRSPVSPQLQQQHQAAAAAFLQQRNSYNHHQPLLKQSPWSNHQSSGWGTGSMSWGAMHGRDHRRTGNMGIPGTMNQISPLKKPFSGNVIAPPKFTRSTPSLTPKSWIEDNVFRTDNNSNTLLPLQVRMDRSRMYDSLNMHSLENSLIDIMRAEHDPLKGRLSYPHPGTDNLLMLNARSYGRRRGRSSLFPIDDGLLDDGHSDQVGVLNSPTCYSAHQNGERIERFSRKVFVGGLPPDIDEDEITASFRRFGPLVVDWPHKAESKSYFPPKGYAFLLFQEESSVQALIDACIEEDGKLYLCVSSPTIKDKPVQIRPWNLSDSDFVMDGSQPLDPRKTIFVGGVPRPLRAVELAMIMDRLYGGVCYAGIDTDPELKYPKGAGRVAFSNQQSYIAAISARFVQLQHGDIDKRVEVKPYVLDDQMCDECQGARCGGKFAPFFCANVTCLQYYCEFCWANIHSRAGREFHKPLVKEGADRPRQIHFRWN

SEQ ID NO: 11022 - protein, 1034 aa, Homo sapiens
MRDFGFGVLQTAPLRSSSPGPLFCGEAYGPYAVGSVNPLPSATPFGPLSPPPLPVTGFLEAASPFSVPLGGGAGSPAAAASSSSPFLAHQQTMQDELLLGLTQQPARPLSGAAATEKLPDHHPGGGTIAGVTHLLPSQDFKPSLHHPSSSSASSCCCCRTSSPQDFSKRQQQQLSSQKRKEFSPPHLPHPPDSKPPPPPPPLHCPGRFSPPPPPAGPLLQPAQLAQRQQQQPPQQFSLLHQQHLSPQDFAPRQRPADLPPLPQLPPSPPAAPRRRHGGAGSPRKTPAAGEGSAAESPNAGLASSTPVNPAPGSMESPNHPLLNSPSNLLPGGALGAGAFSSLQSPDLPHPGGGGGGGGGGPPGGGGGGGSASPPPLPGFGTPWSVQTASPPPQPQQPPPTQPQQQPPPPQQPPQPQPQPPGSSATTPGGGSGGSLSAMPPPSPDSENGFYPGLPSSMNPAFFPSFSPVSPHGCTGLSVPTSGGGGGGFGGPFSATAVPPPPPPAMNIPQQQPPPPAAPQQPQSRRSPVSPQLQQQHQAAAAAFLQQRNSYNHHQPLLKQSPWSNHQSSGWGTGSMSWGAMHGRDHRRTGNMGIPGTMNQISPLKKPFSGNVIAPPKFTRSTPSLTPKSWIEDNVFRTDNNSNTLLPLQVRSSLQLPAWGSDSLQDSWCTAAGTSRIDQDRSRMYDSLNMHSLENSLIDIMRAEHDPLKGRLSYPHPGTDNLLMLNARSYGRRRGRSSLFPIDDGLLDDGHSDQVGVLNSPTCYSAHQNGERIERFSRKVFVGGLPPDIDEDEITASFRRFGPLVVDWPHKAESKSYFPPKGYAFLLFQEESSVQALIDACIEEDGKLYLCVSSPTIKDKPVQIRPWNLSDSDFVMDGSQPLDPRKTIFVGGVPRPLRAVELAMIMDRLYGGVCYAGIDTDPELKYPKGAGRVAFSNQQSYIAAISARFVQLQHGDIDKRVEVKPYVLDDQMCDECQGARCGGKFAPFFCANVTCLQYYCEFCWANIHSRAGREFHKPLVKEGADRPRQIHFRWN

SEQ ID NO: 11023 - protein, 252 aa, Homo sapiens
MSQAAKASASATVAVNPGPDTKGKGAPPAGTSPSPGTTLAPTTVPITSAKAAELPPGNYRLVVFELENFQGRRAEFSGECSNLADRGFDRVRSIIVSAGPWVAFEQSNFRGEMFILEKGEYPRWNTWSSSYRSDRLMSFRPIKMDAQEHKISLFEGANFKGNTIEIQGDDAPSLWVYGFSDRVGSVKVSSGTWVGYQYPGYRGYQYLLEPGDFRHWNEWGAFQPQMQSLRRLRDKQWHLEGSFPVLATEPPK

SEQ ID NO: 11024 - protein, 520 aa, Homo sapiens
MEVLESGEQGVLQWDRKLSELSEPGDGEALMYHTHFSELLDEFSQNVLGQLLNDPFLSEKSVSMEVEPSPTSPAPLIQAEHSYSLCEEPRAQSPFTHITTSDSFNDDEVESEKWYLSTDFPSTSIKTEPVTDEPPPGLVPSVTLTITAISTPLEKEEPPLEMNTGVDSSCQTIIPKIKLEPHEVDQFLNFSPKEAPVDHLHLPPTPPSSHGSDSEGSLSPNPRLHPFSLPQTHSPSRAAPRAPSALSSSPLLTAPHKLQGSGPLVLTEEEKRTLIAEGYPIPTKLPLSKSEEKALKKIRRKIKNKISAQESRRKKKEYMDSLEKKVESCSTENLELRKKVEVLENTNRTLLQQLQKLQTLVMGKVSRTCKLAGTQTGTCLMVVVLCFAVAFGSFFQGYGPYPSATKMALPSQHSLQEPYTASVVRSRNLLIYEEHSPPEESSSPGSAGELGGWDRGSSLLRVSGLESRPDVDLPHFIISNETSLEKSVLLELQQHLVSAKLEGNETLKVVELDRRVNTTF

SEQ ID NO: 11025 - protein, 460 aa, Homo sapiens
MEVLESGEQGVLQWDRKLSELSEPGDGEALMYHTHFSELLDEFSQNVLGQLLNDPFLSEKSVSMEVEPSPTSPAPLIQAEHSYSLCEEPRAQSPFTHITTSDSFNDDEVESEKWYLSTDFPSTSIKTEPVTDEPPPGLVPSVTLTITAISTPLEKEEPPLEMNTGVDSSCQTIIPKIKLEPHEVDQFLNFSPKEAPVDHLHLPPTPPSSHGSDSEGSLSPNPRLHPFSLPQTHSPSRAAPRAPSALSSSPLLTAPHKLQGSGPLVLTEEEKRTLIAEGYPIPTKLPLSKSEEKALKKIRRKIKNKISAQESRRKKKEYMDSLEKKVESCSTENLELRKKVEVLENTNRTLLQQLQKLQTLVMGKVSRTCKLAGTQTGTCLMVVVLCFAVAFGSFFQGYGPYPSATKMALPSQHSLQEPYTASVGKTACGKLGRVLFYFPRAGFLSLPKGIFCESPMFKKW

SEQ ID NO: 11026 - protein, 248 aa, Homo sapiens
MEVLESGEQGVLQWDRKLSELSEPGDGEALMYHTHFSELLDEFSQNVLGQLLNDPFLSEKSVSMEVEPSPTSPAPLIQAEHSYSLCEEPRAQSPFTHITTSDSFNDDEVESEKWYLSTDFPSTSIKTEPVTDEPPPGLVPSVTLTITAISTPLEKEEPPLEMNTGVDSSCQTIIPKIKLEPHEVDQFLNFSPKEGLSALPVSLWVMDMVSGSTEREYGERAGMSLYHRCCSWLYEIALFLKNKNFASK

SEQ ID NO: 11027 - protein, 698 aa, Homo sapiens
MQDDLLMDKSKTQPQPQQQQRQQQQPQPESSVSEAPSTPLSSETPKPEENSAVPALSPAAAPPAPNGPDKMQMESPLLPGLSFHQPPQQPPPPQEPAAPGASLSPSFGSTWSTGTTNAVEDSFFQGITPVNGTMLFQNFPHHVNPVFGGTFSPQIGLAQTQHHQQPPPPAPAPQPAQPAQPPQAQPPQQRRSPASPSQAPYAQRSAAAAYGHQPIMTSKPSSSSAVAAAAAAAAASSASSSWNTHQSVNAAWSAPSNPWGGLQAGRDPRRAVGVGVGVGVGVPSPLNPISPLKKPFSSNVIAPPKFPRAAPLTSKSWMEDNAFRTDNGNNLLPFQDRSRPYDTFNLHSLENSLMDMIRTDHEPLKGKHYPPSGPPMSFADIMWRNHFAGRMGINFHHPGTDNIMALNNAFLDDSHGDQALSSGLSSPTRCQNGERVERYSRKVFVGGLPPDIDEDEITASFRRFGPLVVDWPHKAESKSYFPPKGYAFLLFQEESSVQALIDACLEEDGKLYLCVSSPTIKDKPVQIRPWNLSDSDFVMDGSQPLDPRKTIFVGGVPRPLRAVELAMIMDRLYGGVCYAGIDTDPELKYPKGAGRVAFSNQQSYIAAISARFVQLQHNDIDKRVEVKPYVLDDQMCDECQGTRCGGKFAPFFCANVTCLQYYCEYCWASIHSRAGREFHKPLVKEGGDRPRHVPFRWS

SEQ ID NO: 11028 - protein, 684 aa, Homo sapiens
MQDDLLMDKSKTQPQPQQQQRQQQQPQPESSVSEAPSTPLSSETPKPEENSAVPALSPAAAPPAPNGPDKMQMESPLLPGLSFHQPPQQPPPPQEPAAPGASLSPSFGSTWSTGTTNAVEDSFFQGITPVNGTMLFQNFPHHVNPVFGGTFSPQIGLAQTQHHQQPPPPAPAPQPAQPAQPPQAQPPQQRRSPASPSQAPYAQRSAAAAYGHQPIMTSKPSSSSAVAAAAAAAAASSASSSWNTHQSVNAAWSAPSNPWGGLQAGRDPRRAVGVGVGVGVGVPSPLNPISPLKKPFSSNVIAPPKFPRAAPLTSKSWMEDNAFRTDNGNNLLPFQDRSRPYDTFNLHSLENSLMDMIRTDHEPLKGRMGINFHHPGTDNIMALNSRSSLFPFEDAFLDDSHGDQALSSGLSSPTRCQNGERVERYSRKVFVGGLPPDIDEDEITASFRRFGPLVVDWPHKAESKSYFPPKGYAFLLFQEESSVQALIDACLEEDGKLYLCVSSPTIKDKPVQIRPWNLSDSDFVMDGSQPLDPRKTIFVGGVPRPLRAVELAMIMDRLYGGVCYAGIDTDPELKYPKGAGRVAFSNQQSYIAAISARFVQLQHNDIDKRVEVKPYVLDDQMCDECQGTRCGGKFAPFFCANVTCLQYYCEYCWASIHSRAGREFHKPLVKEGGDRPRHVPFRWS

SEQ ID NO: 11029 - protein, 205 aa, Homo sapiens
MASDHQTQAGKPQSLNPKIIIFEQENFQGHSHELNGPCPNLKETGVEKAGSVLVQAGPWVGYEQANCKGEQFVFEKGEYPRWDSWTSSRRTDSLSSLRPIKVDSQEHKIILYENPNFTGKKMEIIDDDVPSFHAHGYQEKVSSVRVQSGTWVGYQYPGYRGLQYLLEKGDYKDSSDFGAPHPQVQSVRRIRDMQWHQRGAFHPSN

SEQ ID NO: 11030 - protein, 729 aa, Homo sapiens
MGDYGFGVLVQSNTGNKSAFPVRFHPHLQPPHHHQNATPSPAAFINNNTAANGSSAGSAWLFPAPATHNIQDEILGSEKAKSQQQEQQDPLEKQQLSPSPGQEAGILPETEKAKSEENQGDNSSENGNGKEKIRIESPVLTGFDYQEATGLGTSTQPLTSSASSLTGFSNWSAAIAPSSSTIINEDASFFHQGGVPAASANNGALLFQNFPHHVSPGFGGSFSPQIGPLSQHHPHHPHFQHHHSQHQQQRRSPASPHPPPFTHRNAAFNQLPHLANNLNKPPSPWSSYQSPSPTPSSSWSPGGGGYGGWGGSQGRDHRRGLNGGITPLNSISPLKKNFASNHIQLQKYARPSSAFAPKSWMEDSLNRADNIFPFPDRPRTFDMHSLESSLIDIMRAENDTIKGRLNYSYPGSDSSLLINARTYGRRRGQSSLFPMEDGFLDDGRGDQPLHSGLGSPHCFSHQNGERVERYSRKVFVGGLPPDIDEDEITASFRRFGPLIVDWPHKAESKSYFPPKGYAFLLFQDESSVQALIDACIEEDGKLYLCVSSPTIKDKPVQIRPWNLSDSDFVMDGSQPLDPRKTIFVGGVPRPLRAVELAMIMDRLYGGVCYAGIDTDPELKYPKGAGRVAFSNQQSYIAAISARFVQLQHGEIDKRVEVKPYVLDDQLCDECQGARCGGKFAPFFCANVTCLQYYCEYCWAAIHSRAGREFHKPLVKEGGDRPRHISFRWN

SEQ ID NO: 11031 - protein, 712 aa, Homo sapiens
MGDYGFGVLVQSNTGNKSAFPVRFHPHLQPPHHHQNATPSPAAFINNNTAANGSSAGSAWLFPAPATHNIQDEILGSEKAKSQQQEQQDPLEKQQLSPSPGQEAGILPETEKAKSEENQGDNSSENGNGKEKIRIESPVLTGFDYQEATGLGTSTQPLTSSASSLTGFSNWSAAIAPSSSTIINEDASFFHQGGVPAASANNGALLFQNFPHHVSPGFGGSFSPQIGPLSQHHPHHPHFQHHHSQHQQQRRSPASPHPPPFTHRNAAFNQLPHLANNLNKPPSPWSSYQSPSPTPSSSWSPGGGGYGGWGGSQGRDHRRGLNGGITPLNSISPLKKNFASNHIQLQKYARPSSAFAPKSWMEDSLNRADNIFPFPDRPRTFDMHSLESSLIDIMRAENDTIKARTYGRRRGQSSLFPMEDGFLDDGRGDQPLHSGLGSPHCFSHQNGERVERYSRKVFVGGLPPDIDEDEITASFRRFGPLIVDWPHKAESKSYFPPKGYAFLLFQDESSVQALIDACIEEDGKLYLCVSSPTIKDKPVQIRPWNLSDSDFVMDGSQPLDPRKTIFVGGVPRPLRAVELAMIMDRLYGGVCYAGIDTDPELKYPKGAGRVAFSNQQSYIAAISARFVQLQHGEIDKRVEVKPYVLDDQLCDECQGARCGGKFAPFFCANVTCLQYYCEYCWAAIHSRAGREFHKPLVKEGGDRPRHISFRWN

SEQ ID NO: 11032 - protein, 322 aa, Homo sapiens
MHSLESSLIDIMRAENDTIKGQSSLFPMEDGFLDDGRGDQPLHSGLGSPHCFSHQNGERVERYSRKVFVGGLPPDIDEDEITASFRRFGPLIVDWPHKAESKSYFPPKGYAFLLFQDESSVQALIDACIEEDGKLYLCVSSPTIKDKPVQIRPWNLSDSDFVMDGSQPLDPRKTIFVGGVPRPLRAVELAMIMDRLYGGVCYAGIDTDPELKYPKGAGRVAFSNQQSYIAAISARFVQLQHGEIDKRVEVKPYVLDDQLCDECQGARCGGKFAPFFCANVTCLQYYCEYCWAAIHSRAGREFHKPLVKEGGDRPRHISFRWN

SEQ ID NO: 11033 - protein, 461 aa, Homo sapiens
MNTDLAAGKMASAACSMDPIDSFELLDLLFDRQDGILRHVELGEGWGHVKDQQVLPNPDSDDFLSSILGSGDSLPSSPLWSPEGSDSGISEDLPSDPQDTPPRSGPATSPAGCHPAQPGKGPCLSYHPGNSCSTTTPGPVIQVPEASVTIDLEMWSPGGRICAEKPADPVDLSPRCNLTVKDLLLSGSSGDLQQHHLGASYLLRPGAGHCQELVLTEDEKKLLAKEGITLPTQLPLTKYEERVLKKIRRKIRNKQSAQESRKKKKEYIDGLETRMSACTAQNQELQRKVLHLEKQNLSLLEQLKKLQAIVVQSTSKSAQTGTCVAVLLLSFALIILPSISPFGPNKTESPGDFAPVRVFSRTLHNDAASRVAADAVPGSEAPGPRPEADTTREESPGSPGADWGFQDTANLTNSTEELDNATLVLRNATEGLGQVALLDWVAPGPSTGSGRAGLEAAGDEL

SEQ ID NO: 11034 - protein, 460 aa, Homo sapiens
MNTDLAAGKMASAACSMDPIDSFELLDLLFDRQDGILRHVELGEGWGHVKDQVLPNPDSDDFLSSILGSGDSLPSSPLWSPEGSDSGISEDLPSDPQDTPPRSGPATSPAGCHPAQPGKGPCLSYHPGNSCSTTTPGPVIQVPEASVTIDLEMWSPGGRICAEKPADPVDLSPRCNLTVKDLLLSGSSGDLQQHHLGASYLLRPGAGHCQELVLTEDEKKLLAKEGITLPTQLPLTKYEERVLKKIRRKIRNKQSAQESRKKKKEYIDGLETRMSACTAQNQELQRKVLHLEKQNLSLLEQLKKLQAIVVQSTSKSAQTGTCVAVLLLSFALIILPSISPFGPNKTESPGDFAPVRVFSRTLHNDAASRVAADAVPGSEAPGPRPEADTTREESPGSPGADWGFQDTANLTNSTEELDNATLVLRNATEGLGQVALLDWVAPGPSTGSGRAGLEAAGDEL

SEQ ID NO: 11035 - protein, 459 aa, Homo sapiens
MNTDLAAGKMASAACSMDPIDSFELLDLLFDRQDGILRHVELGEGWGHVKDQQVLPNPDSDDFLSSILGSGDSLPSSPLWSPEGSDSGISEDLPSDPQDTPPRSGPATSPAGCHPAQPGKGPCLSYHPGNSCSTTTPGPVIQVPEASVTIDLEMWSPGGRICAEKPADPVDLSPRCNLTVKDLLLSGSSGDLHHLGASYLLRPGAGHCQELVLTEDEKKLLAKEGITLPTQLPLTKYEERVLKKIRRKIRNKQSAQESRKKKKEYIDGLETRMSACTAQNQELQRKVLHLEKQNLSLLEQLKKLQAIVVQSTSKSAQTGTCVAVLLLSFALIILPSISPFGPNKTESPGDFAPVRVFSRTLHNDAASRVAADAVPGSEAPGPRPEADTTREESPGSPGADWGFQDTANLTNSTEELDNATLVLRNATEGLGQVALLDWVAPGPSTGSGRAGLEAAGDEL

SEQ ID NO: 11036 - protein, 337 aa, Homo sapiens
MNTDLAAGKMASAACSMDPIDSFELLDLLFDRQDGILRHVELGEGWGHVKDQQVLPNPDSDDFLSSILGSGDSLPSSPLWSPEGSDSGISEDLPSDPQDTPPRSGPATSPAGCHPAQPGKGPCLSYHPGNSCSTTTPGPVIQVPEASVTIDLEMWSPGGRICAEKPADPVDLSPRCNLTVKDLLLSGSSGDLQQHHLGASYLLRPGAGHCQELVLTEDEKKLLAKEGITLPTQLPLTKDVSLHCSESGVTEESLASREAKPVPLGATEETPGHCGAVHQQVSPDRHLCRSPVAVLCPHHPPLHQPFWPQQNREPWGLCACTSVLQNFAQRCCLPRGC

SEQ ID NO: 11037 - protein, 469 aa, Homo sapiens
MELISPTVIIILGCLALFLLLQRKNLRRPPCIKGWIPWIGVGFEFGKAPLEFIEKARIKYGPIFTVFAMGNRMTFVTEEEGINVFLKSKKVDFELAVQNIVYRTASIPKNVFLALHEKLYIMLKGKMGTVNLHQFTGQLTEELHEQLENLGTHGTMDLNNLVRHLLYPVTVNMLFNKSLFSTNKKKIKEFHQYFQVYDEDFEYGSQLPECLLRNWSKSKKWFLELFEKNIPDIKACKSAKDNSMTLLQATLDIVETETSKENSPNYGLLLLWASLSNAVPVAFWTLAYVLSHPDIHKAIMEGISSVFGKAGKDKIKVSEDDLENLLLIKWCVLETIRLKAPGVITRKVVKPVEILNYIIPSGDLLMLSPFWLHRNPKYFPEPELFKPERWKKANLEKHSFLDCFMAFGSGKFQCPARWFALLEVQMCIILILYKYDCSLLDPLPKQSYLHLVGVPQPEGQCRIEYKQRI

SEQ ID NO: 11038 - protein, 513 aa, Homo sapiens
MFADRWLFSTNHKDIGTLYLLFGAWAGVLGTALSLLIRAELGQPGNLLGNDHIYNVIVTAHAFVMIFFMVMPIMIGGFGNWLVPLMIGAPDMAFPRMNNMSFWLLPPSLLLLLASAMVEAGAGTGWTVYPPLAGNYSHPGASVDLTIFSLHLAGVSSILGAINFITTIINMKPPAMTQYQTPLFVWSVLITAVLLLLSLPVLAAGITMLLTDRNLNTTFFDPAGGGDPILYQHLFWFFGHPEVYILILPGFGMISHIVTYYSGKKEPFGYMGMVWAMMSIGFLGFIVWAHHMFTVGMDVDTRAYFTSATMIIAIPTGVKVFSWLATLHGSNMKWSAAVLWALGFIFLFTVGGLTGIVLANSSLDIVLHDTYYVVAHFHYVLSMGAVFAIMGGFIHWFPLFSGYTLDQTYAKIHFTIMFIGVNLTFFPQHFLGLSGMPRRYSDYPDAYTTWNILSSVGSFISLTAVMLMIFMIWEAFASKRKVLMVEEPSMNLEWLYGCPPPYHTFEEPVYMKS

SEQ ID NO: 11039 - protein, 972 aa, Homo sapiens
MGPGVLLLLLVATAWHGQGIPVIEPSVPELVVKPGATVTLRCVGNGSVEWDGPPSPHWTLYSDGSSSILSTNNATFQNTGTYRCTEPGDPLGGSAAIHLYVKDPARPWNVLAQEVVVFEDQDALLPCLLTDPVLEAGVSLVRVRGRPLMRHTNYSFSPWHGFTIHRAKFIQSQDYQCSALMGGRKVMSISIRLKVQKVIPGPPALTLVPAELVRIRGEAAQIVCSASSVDVNFDVFLQHNNTKLAIPQQSDFHNNRYQKVLTLNLDQVDFQHAGNYSCVASNVQGKHSTSMFFRVVESAYLNLSSEQNLIQEVTVGEGLNLKVMVEAYPGLQGFNWTYLGPFSDHQPEPKLANATTKDTYRHTFTLSLPRLKPSEAGRYSFLARNPGGWRALTFELTLRYPPEVSVIWTFINGSGTLLCAASGYPQPNVTWLQCSGHTDRCDEAQVLQVWDDPYPEVLSQEPFHKVTVQSLLTVETLEHNQTYECRAHNSVGSGSWAFIPISAGAHTHPPDEFLFTPVVVACMSIMALLLLLLLLLLYKYKQKPKYQVRWKIIESYEGNSYTFIDPTQLPYNEKWEFPRNNLQFGKTLGAGAFGKVVEATAFGLGKEDAVLKVAVKMLKSTAHADEKEALMSELKIMSHLGQHENIVNLLGACTHGGPVLVITEYCCYGDLLNFLRRKAEAMLGPSLSPGQDPEGGVDYKNIHLEKKYVRRDSGFSSQGVDTYVEMRPVSTSSNDSFSEQDLDKEDGRPLELRDLLHFSSQVAQGMAFLASKNCIHRDVAARNVLLTNGHVAKIGDFGLARDIMNDSNYIVKGNARLPVKWMAPESIFDCVYTVQSDVWSYGILLWEIFSLGLNPYPGILVNSKFYKLVKDGYQMAQPAFAPKNIYSIMQACWALEPTHRPTFQQICSFLQEQAQEDRRERDYTNLPSSSRSGGSGSSSSELEEESSSEHLTCCEQGDIAQPLLQPNNYQFC

SEQ ID NO: 11040 - protein, 306 aa, Homo sapiens
MGPGVLLLLLVATAWHGQGIPVIEPSVPELVVKPGATVTLRCVGNGSVEWDGPPSPHWTLYSDGSSSILSTNNATFQNTGTYRCTEPGDPLGGSAAIHLYVKDPARPWNVLAQEVVVFEDQDALLPCLLTDPVLEAGVSLVRVRGRPLMRHTNYSFSPWHGFTIHRAKFIQSQDYQCSALMGGRKVMSISIRLKVQKVIPGPPALTLVPAELVRIRGEAAQIVCSASSVDVNFDVFLQHNNTKLAIPQQSDFHNNRYQKVLTLNLDQVDFQHAGNYSCVASNVQGKHSTSMFFRVVGTPSPSLCPA

SEQ ID NO: 11041 - protein, 661 aa, Homo sapiens
MAPSADPGMSRMLPFLLLLWFLPITEGSQRAEPMFTAVTNSVLPPDYDSNPTQLNYGVAVTDVDHDGDFEIVVAGYNGPNLVLKYDRAQKRLVNIAVDERSSPYYALRDRQGNAIGVTACDIDGDGREEIYFLNTNNAFSGVATYTDKLFKFRNNRWEDILSDEVNVARGVASLFAGRSVACVDRKGSGRYSIYIANYAYGNVGPDALIEMDPEASDLSRGILALRDVAAEAGVSKYTGGRGVSVGPILSSSASDIFCDNENGPNFLFHNRGDGTFVDAAASAGVDDPHQHGRGVALADFNRDGKVDIVYGNWNGPHRLYLQMSTHGKVRFRDIASPKFSMPSPVRTVITADFDNDQELEIFFNNIAYRSSSANRLFRVIRREHGDPLIEELNPGDALEPEGRGTGGVVTDFDGDGMLDLILSHGESMAQPLSVFRGNQGFNNNWLRVVPRTRFGAFARGAKVVLYTKKSGAHLRIIDGGSGYLCEMEPVAHFGLGKDEASSVEVTWPDGKMVSRNVASGEMNSVLEILYPRDEDTLQDPAPLECGQGFSQQENGHCMDTNECIQFPFVCPRDKPVCVNTYGSYRCRTNKKCSRGYEPNEDGTACVGTLGQSPGPRPTTPTAAAATAAAAAAAGAATAAPVLVDGDLNLGSVVKESCEPSC

SEQ ID NO: 11042 - protein, 645 aa, Homo sapiens
MAPSADPGMSRMLPFLLLLWFLPITEGSQRAEPMFTAVTNSVLPPDYDSNPTQLNYGVAVTDVDHDGDFEIVVAGYNGPNLVLKYDRAQKRLVNIAVDERSSPYYALRDRQGNAIGVTACDIDGDGREEIYFLNTNNAFSGVATYTDKLFKFRNNRWEDILSDEVNVARGVASLFAGRSVACVDRKGSGRYSIYIANYAYGNVGPDALIEMDPEASDLSRGILALRDVAAEAGVSKYTGGRGVSVGPILSSSASDIFCDNENGPNFLFHNRGDGTFVDAAASAGVDDPHQHGRGVALADFNRDGKVDIVYGNWNGPHRLYLQMSTHGKVRFRDIASPKFSMPSPVRTVITADFDNDQELEIFFNNIAYRSSSANRLFRVIRREHGDPLIEELNPGDALEPEGRGTGGVVTDFDGDGMLDLILSHGESMAQPLSVFRGNQGFNNNWLRVVPRTRFGAFARGAKVVLYTKKSGAHLRIIDGGSGYLCEMEPVAHFGLGKDEASSVEVTWPDGKMVSRNVASGEMNSVLEILYPRDEDTLQDPAPLECGQGFSQQENGHCMDTNECIQFPFVCPRDKPVCVNTYGSYRCRTNKKCSRGYEPNEDGTACVAQVAFLGGYSSAASRISEPLSRASYLSLGLGLCLQLYAL

SEQ ID NO: 11043 - protein, 628 aa, Homo sapiens
MAPSADPGMSRMLPFLLLLWFLPITEGSQRAEPMFTAVTNSVLPPDYDSNPTQLNYGVAVTDVDHDGDFEIVVAGYNGPNLVLKYDRAQKRLVNIAVDERSSPYYALRDRQGNAIGVTACDIDGDGREEIYFLNTNNAFSGVATYTDKLFKFRNNRWEDILSDEVNVARGVASLFAGRSVACVDRKGSGRYSIYIANYAYGNVGPDALIEMDPEASDLSRGILALRDVAAEAGVSKYTGGRGVSVGPILSSSASDIFCDNENGPNFLFHNRGDGTFVDAAASAGVDDPHQHGRGVALADFNRDGKVDIVYGNWNGPHRLYLQMSTHGKVRFRDIASPKFSMPSPVRTVITADFDNDQELEIFFNNIAYRSSSANRLFRVIRREHGDPLIEELNPGDALEPEGRGTGGVVTDFDGDGMLDLILSHGESMAQPLSVFRGNQGFNNNWLRVVPRTRFGAFARGAKVVLYTKKSGAHLRIIDGGSGYLCEMEPVAHFGLGKDEASSVEVTWPDGKMVSRNVASGEMNSVLEILYPRDEDTLQDPAPLETPMNASSSHSCALETSPYVSTPMEATGAGPTRSAVGATSPTRMAQPAWGLSASHRAPAPPPPPLLLPLPLLLPLLELPLLHRSS

SEQ ID NO: 11044 - protein, 144 aa, Homo sapiens
MWLQSLLLLGTVACSISAPARSPSPSTQPWEHVNAIQEARRLLNLSRDTAAEMNETVEVISEMFDLQEPTCLQTRLELYKQGLRGSLTKLKGPLTMMASHYKQHCPPTPETSCATQIITFESFKENLKDFLLVIPFDCWEPVQE

SEQ ID NO: 11045 - protein, 819 aa, Homo sapiens
MPLTSAFRAVDNDPGIIVWRIEKMELALVPVSAHGNFYEGDCYVILSTRRVASLLSQDIHFWIGKDSSQDEQSCAAIYTTQLDDYLGGSPVQHREVQYHESDTFRGYFKQGIIYKQGGVASGMKHVETNTYDVKRLLHVKGKRNIRATEVEMSWDSFNRGDVFLLDLGKVIIQWNGPESNSGERLKAMLLAKDIRDRERGGRAKIGVIEGDKEAASPELMKVLQDTLGRRSIIKPTVPDEIIDQKQKSTIMLYHISDSAGQLAVTEVATRPLVQDLLNHDDCYILDQSGTKIYVWKGKGATKAEKQAAMSKALGFIKMKSYPSSTNVETVNDGAESAMFKQLFQKWSVKDQTMGLGKTFSIGKIAKVFQDKFDVTLLHTKPEVAAQERMVDDGNGKVEVWRIENLELVPVEYQWYGFFYGGDCYLVLYTYEVNGKPHHILYIWQGRHASQDELAASAYQAVEVDRQFDGAAVQVRVRMGTEPRHFMAIFKGKLVIFEGGTSRKGNAEPDPPVRLFQIHGNDKSNTKAVEVPAFASSLNSNDVFLLRTQAEHYLWYGKGSSGDERAMAKELASLLCDGSENTVAEGQEPAEFWDLLGGKTPYANDKRLQQEILDVQSRLFECSNKTGQFVVTEITDFTQDDLNPTDVMLLDTWDQVFLWIGAEANATEKESALATAQQYLHTHPSGRDPDTPILIIKQGFEPPIFTGWFLAWDPNIWSAGKTYEQLKEELGDAAAIMRITADMKNATLSLNSNDSEPKYYPIAVLLKNQNQELPEDVNPAKKENYLSEQDFVSVFGITRGQFAALPGWKQLQMKKEKGLF

SEQ ID NO: 11046 - protein, 812 aa, Homo sapiens
MSSTGHPGSYKIWGEKMELALVPVSAHGNFYEGDCYVILSTRRVASLLSQDIHFWIGKDSSQDEQSCAAIYTTQLDDYLGGSPVQHREVQYHESDTFRGYFKQGIIYKQGGVASGMKHVETNTYDVKRLLHVKGKRNIRATEVEMSWDSFNRGDVFLLDLGKVIIQWNGPESNSGERLKAMLLAKDIRDRERGGRAKIGVIEGDKEAASPELMKVLQDTLGRRSIIKPTVPDEIIDQKQKSTIMLYHISDSAGQLAVTEVATRPLVQDLLNHDDCYILDQSGTKIYVWKGKGATKAEKQAAMSKALGFIKMKSYPSSTNVETVNDGAESAMFKQLFQKWSVKDQTMGLGKTFSIGKIAKVFQDKFDVTLLHTKPEVAAQERMVDDGNGKVEVWRIENLELVPVEYQWYGFFYGGDCYLVLYTYEVNGKPHHILYIWQGRHASQDELAASAYQAVEVDRQFDGAAVQVRVRMGTEPRHFMAIFKGKLVIFEGGTSRKGNAEPDPPVRLFQIHGNDKSNTKAVEVPAFASSLNSNDVFLLRTQAEHYLWYGKGSSGDERAMAKELASLLCDGSENTVAEGQEPAEFWDLLGGKTPYANDKRLQQEILDVQSRLFECSNKTGQFVVTEITDFTQDDLNPTDVMLLDTWDQVFLWIGAEANATEKESALATAQQYLHTHPSGRDPDTPILIIKQGFEPPIFTGWFLAWDPNIWSAGKTYEQLKEELGDAAAIMRITADMKNATLSLNSNDSEPKYYPIAVLLKNQNQELPEDVNPAKKENYLSEQDFVSVFGITRGQFAALPGWKQLQMKKEKGLF

SEQ ID NO: 11047 - protein, 213 aa, Homo sapiens
MAAPAVSGLSRQVRCFSTSVVRPFAKLVRPPVQVYGIEGRYATALYSAASKQNKLEQVEKELLRVAQILKEPKVAASVLNPYVKRSIKVKSLNDITAKERFSPLTTNLINLLAENGRLSNTQGVVSAFSTMMSVHRGEVPCTVTSASPLEEATLSELKTVLKSFLSQGQVLKLEAKTDPSILGGMIVRIGEKYVDMSVKTKIQKLGRAMREIV

SEQ ID NO: 11048 - protein, 512 aa, Homo sapiens
MTAPWVALALLWGSLCAGSGRGEAETRECIYYNANWELERTNQSGLERCEGEQDKRLHCYASWRNSSGTIELVKKGCWLDDFNCYDRQECVATEENPQVYFCCCEGNFCNERFTHLPEAGGPEVTYEPPPTAPTLLTVLAYSLLPIGGLSLIVLLAFWMYRHRKPPYGHVDIHEDPGPPPPSPLVGLKPLQLLEIKARGRFGCVWKAQLMNDFVAVKIFPLQDKQSWQSEREIFSTPGMKHENLLQFIAAEKRGSNLEVELWLITAFHDKGSLTDYLKGNIITWNELCHVAETMSRGLSYLHEDVPWCRGEGHKPSIAHRDFKSKNVLLKSDLTAVLADFGLAVRFEPGKPPGDTHGQVGTRRYMAPEVLEGAINFQRDAFLRIDMYAMGLVLWELVSRCKAADGPVDEYMLPFEEEIGQHPSLEELQEVVVHKKMRPTIKDHWLKHPGLAQLCVTIEECWDHDAEARLSAGCVEERVSLIRRSVNGTTSDCLVSLVTSVTNVDLPPKESSI

SEQ ID NO: 11049 - protein, 410 aa, Homo sapiens
MELPSGPGPERLFDSHRLPGDCFLLLVLLLYAPVGFCLLVLRLFLGIHVFLVSCALPDSVLRRFVVRTMCAVLGLVARQEDSGLRDHSVRVLISNHVTPFDHNIVNLLTTCSTPLLNSPPSFVCWSRGFMEMNGRGELVESLKRFCASTRLPPTPLLLFPEEEATNGREGLLRFSSWPFSIQDVVQPLTLQVQRPLVSVTVSDASWVSELLWSLFVPFTVYQVRWLRPVHRQLGEANEEFALRVQQLVAKELGQTGTRLTPADKAEHMKRQRHPRLRPQSAQSSFPPSPGPSPDVQLATLAQRVKEVLPHVPLGVIQRDLAKTGCVDLTITNLLEGAVAFMPEDITKGTQSLPTASASKFPSSGPVTPQPTALTFAKSSWARQESLQERKQALYEYARRRFTERRAQEAD

SEQ ID NO: 11050 - protein, 373 aa, Homo sapiens
MELPSGPGPERLFDSHRLPGDCFLLLVLLLYAPVGFCLLVLRLFLGIHVFLVSCALPDSVLRRFVVRTMCAVLGLVARQEDSGLRDHSVRVLISNHVTPFDHNIVNLLTTCSTPLLNSPPSFVCWSRGFMEMNGRGELVESLKRFCASTRLPPTPLLLFPEEEATNGREGLLRFSSWPFSIQDVVQPLTLQVQRPLVSVTVSDASWVSELLWSLFVPFTVYQVRWLRPVHRQLGEANEEFALRVQQLVAKELGQTGTRLTPADKAEHMKRQRHPRLRPQSAQSSFPPSPGPSPDVQLATLAQRVKEVLPHVPLGVIQRDLAKTGCVDLTITNLLEGAVAFMPEDITKGTQSLPTASASKAFDACLMMMTPQAL

SEQ ID NO: 11051 - protein, 69 aa, Homo sapiens
MVPPVQVSPLIKLGRYSALFLGVAYGATRYNYLKPRAEEERRIAAEEKKKQDELKRIARELAEDDSILK

SEQ ID NO: 11052 - protein, 215 aa, Homo sapiens
MCCAVSEQRLTCADQMMPFGKISQQLCGVKKLPWSCDSRYFWGWLNAVFNKVDYDRIRDVGPDRAASEWLLRCGAMVRYHGQERWQKDYNHLPTGPLDKYKIQAIDATDSCIMSIGFDHMEGLEHVEKIRLCKCHYIEDDCLLRLSQLENLQKTILEMEIISCGNITDKGIIALRHLRNLKYLLLSDLPGVREKENLVQAFKTALPSLELKLQLK

SEQ ID NO: 11053 - protein, 136 aa, Homo sapiens
MCCAVSEQRLTCADQMMPFGKISQQLCGVKKLPWSCDSRYFWGWLNAVFNKVDYDRIRDVGPDRAASEWLLRCGAMVRYHGQERWQKDYNHLPTGPLDKYKIQAIDATDSCIMSIGFDHMGNYPIVLLIENADDLQ

SEQ ID NO: 11054 - protein, 127 aa, Homo sapiens
MCCAVSEQRLTCADQMMPFGKISQQLCGVKKLPWSCDSRYFWGWLNAVFNKVDYDRIRDVGPDRAASEWLLRCGAMVRYHGQERWQKDYNHLPTGPLDKYKIQAIDATDSCIMSIGFDHMETSNICC

SEQ ID NO: 11055 - protein, 497 aa, Homo sapiens
MGLPALLASALCTFVLPLLLFLAAIKLWDLYCVSGRDRSCALPLPPGTMGFPFFGETLQMVLQRRKFLQMKRRKYGFIYKTHLFGRPTVRVMGADNVRRILLGEHRLVSVHWPASVRTILGSGCLSNLHDSSHKQRKKVIMRAFSREALECYVPVITEEVGSSLEQWLSCGERGLLVYPEVKRLMFRIAMRILLGCEPQLAGDGDSEQQLVEAFEEMTRNLFSLPIDVPFSGLYRGMKARNLIHARIEQNIRAKICGLRASEAGQGCKDALQLLIEHSWERGERLDMQALKQSSTELLFGGHETTASAATSLITYLGLYPHVLQKVREELKSKGLLCKSNQDNKLDMEILEQLKYIGCVIKETLRLNPPVPGGFRVALKTFELNGYQIPKGWNVIYSICDTHDVAEIFTNKEEFNPDRFMLPHPEDASRFSFIPFGGGLRSCVGKEFAKILLKIFTVELARHCDWQLLNGPPTMKTSPTVYPVDNLPARFTHFHGEI

SEQ ID NO: 11056 - protein, 428 aa, Homo sapiens
MKRRKYGFIYKTHLFGRPTVRVMGADNVRRILLGEHRLVSVHWPASVRTILGSGCLSNLHDSSHKQRKKVIMRAFSREALECYVPVITEEVGSSLEQWLSCGERGLLVYPEVKRLMFRIAMRILLGCEPQLAGDGDSEQQLVEAFEEMTRNLFSLPIDVPFSGLYRGMKARNLIHARIEQNIRAKICGLRASEAGQGCKDALQLLIEHSWERGERLDMQALKQSSTELLFGGHETTASAATSLITYLGLYPHVLQKVREELKSKGLLCKSNQDNKLDMEILEQLKYIGCVIKETLRLNPPVPGGFRVALKTFELNGYQIPKGWNVIYSICDTHDVAEIFTNKEEFNPDRFMLPHPEDASRFSFIPFGGGLRSCVGKEFAKILLKIFTVELARHCDWQLLNGPPTMKTSPTVYPVDNLPARFTHFHGEI

SEQ ID NO: 11057 - protein, 209 aa, Homo sapiens
MQTLRQEAARPCIPSGTLEASFPAPLYSDDYLSLEGSRWPPAIRQATRWKYTPMGRDAAGQLWYTGLTNSDAWEAWYNLPRAPASPFREAYNRWHSCYQHRECSMPSAYTQHLRETAWHDPIVPAQYQAPSTRWGSALWKDRPIRGKEYVLNRNRYGVEPLWRASDYVPSLSAPQRPPGTTQNYREWVLEPYCPSTCQRSPPSLTPTPR

SEQ ID NO: 11058 - protein, 171 aa, Homo sapiens
MLPRAAWSLVLRKGGGGRRGMHSSEGTTRGGGKMSPYTNCYAQRYYPMPEEPFCTELNAEEQALKEKEKGSWTQLTHAEKVALYRLQFNETFAEMNRRSNEWKTVMGCVFFFIGFAALVIWWQRVYVFPPKPITLTDERKAQQLQRMLDMKVNPVQGLASRWDYEKKQWKK

SEQ ID NO: 11059 - protein, 142 aa, Homo sapiens
MAAAAEGVLATRSDEPARDDAAVETAEEAKEPAEADITELCRDMFSKMATYLTGELTATSEDYKLLENMNKLTSLKYLEMKDIAINISRNLKDLNQKYAGLQPYLDQINVIEEQVAALEQAAYKLDAYSKKLEAKYKKLEKR

SEQ ID NO: 11060 - protein, 99 aa, Homo sapiens
MFSKMATYLTGELTATSEDYKLLENMNKLTSLKYLEMKDIAINISRNLKDLNQKYAGLQPYLDQINVIEEQVAALEQAAYKLDAYSKKLEAKYKKLEKR

SEQ ID NO: 11061 - protein, 1202 aa, Homo sapiens
MGREQDLILAVKNGDVTGVQKLVAKVKATKTKLLGSTKRLNVNYQDADGFSALHHAALGGSLELIALLLEAQATVDIKDSNGMRPLHYAAWQGRLEPVRLLLRASAAVNAASLDGQIPLHLAAQYGHYEVSEMLLQHQSNPCLVNKAKKTPLDLACEFGRLKVAQLLLNSHLCVALLEGEAKDPCDPNYTTPLHLAAKNGHREVIRQLLRAGIEINRQTKTGTALHEAALYGKTEVVRLLLEGGVDVNIRNTYNQTALDIVNQFTTSQASREIKQLLREASGILKVRALKDFWNLHDPTALNVRAGDVITVLEQHPDGRWKGHIHESQRGTDRIGYFPPGIVEVVSKRVGIPAARLPSAPTPLRPGFSRTPQPPAEEPPHPLTYSQLPRVGLSPDSPAGDRNSVGSEGSVGSIRSAGSGQSSEGTNGHGPGLLIENAQPLPSAGEDQVLPGLHPPSLADNLSHRPLANCRSGEQIFTQDVRPEQLLEGKDAQAIHNWLSEFQLEGYTAHFLQAGYDVPTISRMTPEDLTAIGVTKPGHRKKIASEIAQLSIAEWLPSYIPTDLLEWLCALGLPQYHKQLVSSGYDSMGLVADLTWEELQEIGVNKLGHQKKLMLGVKRLAELRRGLLQGEALSEGGRRLAKGPELMAIEGLENGEGPATAGPRLLTFQGSELSPELQAAMAGGGPEPLPLPPARSPSQESIGARSRGSGHSQEQPAPQPSGGDPSPPQERNLPEGTERPPKLCSSLPGQGPPPYVFMYPQGSPSSPAPGPPPGAPWAFSYLAGPPATPPDPPRPKRRSHSLSRPGPTEGDAEGEAEGPVGSTLGSYATLTRRPGRSALVRTSPSVTPTPARGTPRSQSFALRARRKGPPPPPPKRLSSVSGPSPEPPPLDESPGPKEGATGPRRRTLSEPAGPSEPPGPPAPAGPASDTEEEEPGPEGTPPSRGSSGEGLPFAEEGNLTIKQRPKPAGPPPRETPVPPGLDFNLTESDTVKRRPKCREREPLQTALLAFGVASATPGPAAPLPSPTPGESPPASSLPQPEPSSLPAQGVPTPLAPSPAMQPPVPPCPGPGLESSAASRWNGETEPPAAPAALLKVPGAGTAPKPVSVACTQLAFSGPKLAPRLGPRPVPPPRPESTGTVGPGQAQQRLEQTSSSLAAALRAAEKSIGTKEQEGTPSASTKHILDDISTMFDALADQLDAMLD

SEQ ID NO: 11062 - protein, 1120 aa, Homo sapiens
MRPLHYAAWQGRLEPVRLLLRASAAVNAASLDGQIPLHLAAQYGHYEVSEMLLQHQSNPCLVNKAKKTPLDLACEFGRLKVAQLLLNSHLCVALLEGEAKDPCDPNYTTPLHLAAKNGHREVIRQLLRAGIEINRQTKTGTALHEAALYGKTEVVRLLLEGGVDVNIRNTYNQTALDIVNQFTTSQASREIKQLLREASGILKVRALKDFWNLHDPTALNVRAGDVITVLEQHPDGRWKGHIHESQRGTDRIGYFPPGIVEVVSKRVGIPAARLPSAPTPLRPGFSRTPQPPAEEPPHPLTYSQLPRVGLSPDSPAGDRNSVGSEGSVGSIRSAGSGQSSEGTNGHGPGLLIENAQPLPSAGEDQVLPGLHPPSLADNLSHRPLANCRSGEQIFTQDVRPEQLLEGKDAQAIHNWLSEFQLEGYTAHFLQAGYDVPTISRMTPEDLTAIGVTKPGHRKKIASEIAQLSIAEWLPSYIPTDLLEWLCALGLPQYHKQLVSSGYDSMGLVADLTWEELQEIGVNKLGHQKKLMLGVKRLAELRRGLLQGEALSEGGRRLAKGPELMAIEGLENGEGPATAGPRLLTFQGSELSPELQAAMAGGGPEPLPLPPARSPSQESIGARSRGSGHSQEQPAPQPSGGDPSPPQERNLPEGTERPPKLCSSLPGQGPPPYVFMYPQGSPSSPAPGPPPGAPWAFSYLAGPPATPPDPPRPKRRSHSLSRPGPTEGDAEGEAEGPVGSTLGSYATLTRRPGRSALVRTSPSVTPTPARGTPRSQSFALRARRKGPPPPPPKRLSSVSGPSPEPPPLDESPGPKEGATGPRRRTLSEPAGPSEPPGPPAPAGPASDTEEEEPGPEGTPPSRGSSGEGLPFAEEGNLTIKQRPKPAGPPPRETPVPPGLDFNLTESDTVKRRPKCREREPLQTALLAFGVASATPGPAAPLPSPTPGESPPASSLPQPEPSSLPAQGVPTPLAPSPAMQPPVPPCPGPGLESSAASRWNGETEPPAAPAALLKVPGAGTAPKPVSVACTQLAFSGPKLAPRLGPRPVPPPRPESTGTVGPGQAQQRLEQTSSSLAAALRAAEKSIGTKEQEGTPSASTKHILDDISTMFDALADQLDAMLD

SEQ ID NO: 11063 - protein, 119 aa, Homo sapiens
MSRSVALAVLALLSLSGLEAIQRTPKIQVYSRHPAENGKSNFLNCYVSGFHPSDIEVDLLKNGERIEKVEHSDLSFSKDWSFYLLYYTEFTPTEKDEYACRVNHVTLSQPKIVKWDRDM

SEQ ID NO: 11064 - protein, 461 aa, Homo sapiens
MSRQVVRSSKFRHVFGQPAKADQCYEDVRVSQTTWDSGFCAVNPKFVALICEASGGGAFLVLPLGKTGRVDKNAPTVCGHTAPVLDIAWCPHNDNVIASGSEDCTVMVWEIPDGGLMLPLREPVVTLEGHTKRVGIVAWHTTAQNVLLSAGCDNVIMVWDVGTGAAMLTLGPEVHPDTIYSVDWSRDGGLICTSCRDKRVRIIEPRKGTVVAEKDRPHEGTRPVRAVFVSEGKILTTGFSRMSERQVALWDTKHLEEPLSLQELDTSSGVLLPFFDPDTNIVYLCGKGDSSIRYFEITSEAPFLHYLSMFSSKESQRGMGYMPKRGLEVNKCEIARFYKLHERRCEPIAMTVPRKSDLFQEDLYPPTAGPDPALTAEEWLGGRDAGPLLISLKDGYVPPKSRELRVNRGLDTGRRRAAPEASGTPSSDAVSRLEEEMRKLQATVQELQKRLDRLEETVQAK

SEQ ID NO: 11065 - protein, 182 aa, Homo sapiens
MAQRSGKITLYEGKHFTGQKLEVFGDCDNFQDRGFMNRVNSIHVESGAWVCFNHPDFRGQQFILEHGDYPDFFRWNSHSDHMGSCRPVGMHGEHFRLEIFEGCNFTGQCLEFLEDSPFLQSRGWVKNCVNTIKVYGDGAAWSPRSFGAEDFQLSSSLQSDQGPEEATTKPATTQPPFLTANL

SEQ ID NO: 11066 - protein, 125 aa, Homo sapiens
MAQRSGKITLYEGKHFTGQKLEVFGDCDNFQDRGFMNRVNSIHVESGAWVCFNHPDFRGQQFILEHGDYPDFFRWNSHSDHMGSCRPVGMVSGPVHRRLSLPAGGTEGQPWQTVARNRGAWSSRL

SEQ ID NO: 11067 - protein, 474 aa, Homo sapiens
MRRVVRQSKFRHVFGQAVKNDQCYDDIRVSRVTWDSSFCAVNPRFVAIIIEASGGGAFLVLPLHKTGRIDKSYPTVCGHTGPVLDIDWCPHNDQVIASGSEDCTVMVWQIPENGLTLSLTEPVVILEGHSKRVGIVAWHPTARNVLLSAGCDNAIIIWNVGTGEALINLDDMHSDMIYNVSWNRNGSLICTASKDKKVRVIDPRKQEIVAEKEKAHEGARPMRAIFLADGNVFTTGFSRMSERQLALWNPKNMQEPIALHEMDTSNGVLLPFYDPDTSIIYLCGKGDSSIRYFEITDESPYVHYLNTFSSKEPQRGMGYMPKRGLDVNKCEIARFFKLHERKCEPIIMTVPRKSDLFQDDLYPDTAGPEAALEAEEWFEGKNADPILISLKHGYIPGKNRDLKVVKKNILDSKPTANKKCDLISIPKKTTDTASVQNEAKLDEILKEIKSIKDTICNQDERISKLEQQMAKIAA

SEQ ID NO: 11068 - protein, 480 aa, Homo sapiens
MRWKDTMRRVVRQSKFRHVFGQAVKNDQCYDDIRVSRVTWDSSFCAVNPRFVAIIIEASGGGAFLVLPLHKTGRIDKSYPTVCGHTGPVLDIDWCPHNDQVIASGSEDCTVMVWQIPENGLTLSLTEPVVILEGHSKRVGIVAWHPTARNVLLSAGCDNAIIIWNVGTGEALINLDDMHSDMIYNVSWNRNGSLICTASKDKKVRVIDPRKQEIVAEKEKAHEGARPMRAIFLADGNVFTTGFSRMSERQLALWNPKNMQEPIALHEMDTSNGVLLPFYDPDTSIIYLCGKGDSSIRYFEITDESPYVHYLNTFSSKEPQRGMGYMPKRGLDVNKCEIARFFKLHERKCEPIIMTVPRKSDLFQDDLYPDTAGPEAALEAEEWFEGKNADPILISLKHGYIPGKNRDLKVVKKNILDSKPTANKKCDLISIPKKTTDTASVQNEAKLDEILKEIKSIKDTICNQDERISKLEQQMAKIAA

SEQ ID NO: 11069 - protein, 527 aa, Homo sapiens
MYGPGSQLGKSGNNSWAKERGCSIACQGSLTSARLHAPSIGERPLSHMRWKDTMRRVVRQSKFRHVFGQAVKNDQCYDDIRVSRVTWDSSFCAVNPRFVAIIIEASGGGAFLVLPLHKTGRIDKSYPTVCGHTGPVLDIDWCPHNDQVIASGSEDCTVMVWQIPENGLTLSLTEPVVILEGHSKRVGIVAWHPTARNVLLSAGCDNAIIIWNVGTGEALINLDDMHSDMIYNVSWNRNGSLICTASKDKKVRVIDPRKQEIVAEKEKAHEGARPMRAIFLADGNVFTTGFSRMSERQLALWNPKNMQEPIALHEMDTSNGVLLPFYDPDTSIIYLCGKGDSSIRYFEITDESPYVHYLNTFSSKEPQRGMGYMPKRGLDVNKCEIARFFKLHERKCEPIIMTVPRKSDLFQDDLYPDTAGPEAALEAEEWFEGKNADPILISLKHGYIPGKNRDLKVVKKNILDSKPTANKKCDLISIPKKTTDTASVQNEAKLDEILKEIKSIKDTICNQDERISKLEQQMAKIAA

SEQ ID NO: 11070 - protein, 962 aa, Homo sapiens
MISTRVMDIKLREAAEGLGEDSTGKKKSKFKTFKKFFGKKKRKESPSSTGSSTWKQSQTRNEVIAIESGPVGYDSEDELEESRGTLGSRALSHDSIFIPESGQDATRPVRVFSQENVCDRIKALQLKIQCNVKMGPPPPPGGLPAKRGEDAGMSSEDDGLPRSPPEMSLLHDVGPGTTIKVSVVSPDHVSDSTVSARISDNSLAPVADFSYPAESSSCLDNSAAKHKLQVKPRNQRSSKMRRLSSRAQSESLSDLTCTPEEEENEEKPLLEVSPEERPSSGQQDVAPDRGPEPGPPAPLPPPGGARARRARLQHSSALTASVEEGGVPGEDPSSRPATPELAEPESAPTLRVEPPSPPEGPPNPGPDGGKQDGEAPPAGPCAPATDKAEEVVCAPEDVASPFPTAIPEGDTTPPETDPAATSEAPSARDGPERSVPKEAEPTPPVLPDEEKGPPGPAPEPEREAETEPERGAGTEPERIGTEPSTAPAPSPPAPKSCLKHRPAAASEGPAASPPLAAAESPPVEPGPGSLDAEAAAPERPKAERAEAPPAGAERAAPERKAERGGAELRGAKKFSVSSCRARPRPGVSRPLERASGRLPLARSGPVWRSEAALDDLQGLPEPQHAKPGPRKLAERGPQDSGDRAASPAGPRKSPQEAAAAPGTREPCPAAQEPAPSEDRNPFPVKLRSTSLSLKYRDGASQEVKGVKRYSAEVRLERSLTVLPKEEKCPLGTAPALRGTRAPSDQGKGKARPPEPLSSKPPLPRKPLLQSFTLPHQPAPPDAGPGEREPRKEPRTAEKRPLRRGAEKSLPPAATGPGADGQPAPPWITVTRQKRRGTLDQPPNQEDKPGARTLKSEPGKQAKVPERGQEPVKQADFVRSKSFLITPVKPAVDRKQGAKLNFKEGLQRGISLSHQNLAQSAVMMEKELHQLKRASYASTDQPSWMELARKKSQAWSDMPQIIK

SEQ ID NO: 11071 - protein, 69 aa, Homo sapiens
MSVLTPLLLRGLTGSARRLPVPRAKIHSLPPEGKLGIMELAVGLTSCFVTFLLPAGWILSHLETYRRPE

SEQ ID NO: 11072 - protein, 378 aa, Homo sapiens
MLPPQPSAAHQGRGGRSGLLPKGPAMLCRLCWLVSYSLAVLLLGCLLFLRKAAKPAGDPTAHQPFWAPPTPRHSRCPPNHTVSSASLSLPSRHRLFLTYRHCRNFSILLEPSGCSKDTFLLLAIKSQPGHVERRAAIRSTWGRVGGWARGRQLKLVFLLGVAGSAPPAQLLAYESREFDDILQWDFTEDFFNLTLKELHLQRWVVAACPQAHFMLKGDDDVFVHVPNVLEFLDGWDPAQDLLVGDVIRQALPNRNTKVKYFIPPSMYRATHYPPYAGGGGYVMSRATVRRLQAIMEDAELFPIDDVFVGMCLRRLGLSPMHHAGFKTFGIRRPLDPLDPCLYRGLLLVHRLSPLEMWTMWALVTDEGLKCAAGPIPQR

SEQ ID NO: 11073 - protein, 353 aa, Homo sapiens
MLCRLCWLVSYSLAVLLLGCLLFLRKAAKPAGDPTAHQPFWAPPTPRHSRCPPNHTVSSASLSLPSRHRLFLTYRHCRNFSILLEPSGCSKDTFLLLAIKSQPGHVERRAAIRSTWGRVGGWARGRQLKLVFLLGVAGSAPPAQLLAYESREFDDILQWDFTEDFFNLTLKELHLQRWVVAACPQAHFMLKGDDDVFVHVPNVLEFLDGWDPAQDLLVGDVIRQALPNRNTKVKYFIPPSMYRATHYPPYAGGGGYVMSRATVRRLQAIMEDAELFPIDDVFVGMCLRRLGLSPMHHAGFKTFGIRRPLDPLDPCLYRGLLLVHRLSPLEMWTMWALVTDEGLKCAAGPIPQR

SEQ ID NO: 11074 - protein, 378 aa, Homo sapiens
MARCGEGSAAPMVLLGSAGVCSKGLQRKGPCERRRLKATVSEQLSQDLLRLLREEFHTDVTFSVGCTLFKAHKAVLLARVPDFYFHTIGQTSNSLTNQEPIAVENVEALEFRTFLQIIYSSNRNIKNYEEEILRKKIMEIGISQKQLDISFPKCENSSDCSLQKHEIPEDISDRDDDFISNDNYDLEPASELGEDLLKLYVKPCCPDIDIFVDGKRFKAHRAILSARSSYFAAMLSGCWAESSQEYVTLQGISHVELNVMMHFIYGGTLDIPDKTNVGQILNMADMYGLEGLKEVAIYILRRDYCNFFQKPVPRTLTSILECLIIAHSVGVESLFADCMKWIVKHFARFWSERSFANIPPEIQKSCLNMLIQSLVSIT

SEQ ID NO: 11075 - protein, 305 aa, Homo sapiens
MARCGEGSAAPMVLLGSAGVCSKGLQRKGPCERRRLKATVSEQLSQDLLRLLREEFHTDVTFSVGCTLFKAHKAVLLARVPDFYFHTIGQTSNSLTNQEPIAVENVEALEFRTFLQIIYSSNRNIKNYEEEILRKKIMEIGISQKQLDISFPKCENSSDCSLQKHEIPEDISDRDDDFISNDNYDLEPASELGEDLLKLYVKPCCPDIDIFVDGKRFKAHRAILSARSSYFAAMLSGCWAESSQEYVTLQGISHVELNVMMHFIYGGTLDIPDKTNVGYVFLFNNLKYKRVRFCFVELCCKVLMK

SEQ ID NO: 11076 - protein, 522 aa, Homo sapiens
MVDDKEKNMKCLTFFLMLPETVKNRSKKSSKKANTSSSSSNSSKLPPVCYEIITLKTKKKKMAADIFPRKKPANSSSTSVQQYHQQNLSNNNLIPAPNWQGLYPTIRERNAMMFNNDLMADVHFVVGPPGGTQRLPGHKYVLAVGSSVFHAMFYGELAEDKDEIRIPDVEPAAFLAMLKYIYCDEIDLAADTVLATLYAAKKYIVPHLARACVNFLETSLSAKNACVLLSQSCLFEEPDLTQRCWEVIDAQAELALKSEGFCDIDFQTLESILRRETLNAKEIVVFEAALNWAEVECQRQDLALSIENKRKVLGKALYLIRIPTMALDDFANGAAQSGVLTLNETNDIFLWYTAAKKPELQFVSKARKGLVPQRCHRFQSCAYRSNQWRYRGRCDSIQFAVDKRVFIAGFGLYGSSCGSAEYSAKIELKRQGVVLGQNLSKYFSDGSSNTFPVWFEYPVQIEPDTFYTASVILDGNELSYFGQEGMTEVQCGKVTVQFQCSSDSTNGTGVQGGQIPELIFYA

SEQ ID NO: 11077 - protein, 461 aa, Homo sapiens
MAADIFPRKKPANSSSTSVQQYHQQNLSNNNLIPAPNWQGLYPTIRERNAMMFNNDLMADVHFVVGPPGGTQRLPGHKYVLAVGSSVFHAMFYGELAEDKDEIRIPDVEPAAFLAMLKYIYCDEIDLAADTVLATLYAAKKYIVPHLARACVNFLETSLSAKNACVLLSQSCLFEEPDLTQRCWEVIDAQAELALKSEGFCDIDFQTLESILRRETLNAKEIVVFEAALNWAEVECQRQDLALSIENKRKVLGKALYLIRIPTMALDDFANGAAQSGVLTLNETNDIFLWYTAAKKPELQFVSKARKGLVPQRCHRFQSCAYRSNQWRYRGRCDSIQFAVDKRVFIAGFGLYGSSCGSAEYSAKIELKRQGVVLGQNLSKYFSDGSSNTFPVWFEYPVQIEPDTFYTASVILDGNELSYFGQEGMTEVQCGKVTVQFQCSSDSTNGTGVQGGQIPELIFYA

SEQ ID NO: 11078 - protein, 310 aa, Homo sapiens
MAFPKMRLMYICLLVLGALCLYFSMYSLNPFKEQSFVYKKDGNFLKLPDTDCRQTPPFLVLLVTSSHKQLAERMAIRQTWGKERMVKGKQLKTFFLLGTTSSAAETKEVDQESQRHGDIIQKDFLDVYYNLTLKTMMGIEWVHRFCPQAAFVMKTDSDMFINVDYLTELLLKKNRTTRFFTGFLKLNEFPIRQPFSKWFVSKSEYPWDRYPPFCSGTGYVFSGDVASQVYNVSKSVPYIKLEDVFVGLCLERLNIRLEELHSQPTFFPGGLRFSVCLFRRIVACHFIKPRTLLDYWQALENSRGEDCPPV

SEQ ID NO: 11079 - protein, 206 aa, Homo sapiens
MRRTGAPAQADSRGRGRARGGCPGGEATLSQPPPRGGTRGQEPQMKETIMNQEKLAKLQAQVRIGGKGTARRKKKVVHRTATADDKKLQFSLKKLGVNNISGIEEVNMFTNQGTVIHFNNPKVQASLAANTFTITGHAETKQLTEMLPSILNQLGADSLTSLRRLAEALPKQSVDGKAPLATGEDDDDEVPDLVENFDEASKNEAN

SEQ ID NO: 11080 - protein, 162 aa, Homo sapiens
MKETIMNQEKLAKLQAQVRIGGKGTARRKKKVVHRTATADDKKLQFSLKKLGVNNISGIEEVNMFTNQGTVIHFNNPKVQASLAANTFTITGHAETKQLTEMLPSILNQLGADSLTSLRRLAEALPKQSVDGKAPLATGEDDDDEVPDLVENFDEASKNEAN

SEQ ID NO: 11081 - protein, 125 aa, Homo sapiens; identical to SEQ ID NO: 197

SEQ ID NO: 11082 - protein, 111 aa, Homo sapiens
MENVPKENKVVEKAPVQNEAPALGGGEYQEPGGNVKGVWAPPAPGFGEDVPNRLVDNIDMIDGDGDDMERFMEEMRELRRKIRELQLRYSLRILIGDPPHHDHHDEFCLMP

SEQ ID NO: 11083 - protein, 897 aa, Homo sapiens
MNISGSSCGSPNSADTSSDFKDLWTKLKECHDREVQGLQVKVTKLKQERILDAQRLEEFFTKNQQLREQQKVLHETIKVLEDRLRAGLCDRCAVTEEHMRKKQQEFENIRQQNLKLITELMNERNTLQEENKKLSEQLQQKIENDQQHQAAELECEEDVIPDSPITAFSFSGVNRLRRKENPHVRYIEQTHTKLEHSVCANEMRKVSKSSTHPQHNPNENEILVADTYDQSQSPMAKAHGTSSYTPDKSSFNLATVVAETLGLGVQEESETQGPMSPLGDELYHCLEGNHKKQPFEESTRNTEDSLRFSDSTSKTPPQEELPTRVSSPVFGATSSIKSGLDLNTSLSPSLLQPGKKKHLKTLPFSNTCISRLEKTRSKSEDSALFTHHSLGSEVNKIIIQSSNKQILINKNISESLGEQNRTEYGKDSNTDKHLEPLKSLGGRTSKRKKTEEESEHEVSCPQASFDKENAFPFPMDNQFSMNGDCVMDKPLDLSDRFSAIQRQEKSQGSETSKNKFRQVTLYEALKTIPKGFSSSRKASDGNCTLPKDSPGEPCSQECIILQPLNKCSPDNKPSLQIKEENAVFKIPLRPRESLETENVLDDIKSAGSHEPIKIQTRSDHGGCELASVLQLNPCRTGKIKSLQNNQDVSFENIQWSIDPGADLSQYKMDVTVIDTKDGSQSKLGGETVDMDCTLVSETVLLKMKKQEQKGEKSSNEERKMNDSLEDMFDRTTHEEYESCLADSFSQAADEEEELSTATKKLHTHGDKQDKVKQKAFVEPYFKGDERETSLQNFPHIEVVRKKEERRKLLGHTCKECEIYYADMPAEEREKKLASCSRHRFRYIPPNTPENFWEVGFPSTQTCMERGYIKEDLDPCPRPKRRQPYNAIFSPKGKEQKT

SEQ ID NO: 11084 - protein, 902 aa, Homo sapiens
MNISGSSCGSPNSADTSSDFKDLWTKLKECHDREVQGLQVKVTKLKQERILDAQRLEEFFTKNQQLREQQKVLHETIKVLEDRLRAGLCDRCAVTEEHMRKKQQEFENIRQQNLKLITELMNERNTLQEENKKLSEQLQQKIENDQQHQAAELECEEDVIPDSPITAFSFSGVNRLRRKENPHVRYIEQTHTKLEHSVCANEMRKVSKSSTHPQHNPNENEILVADTYDQSQSPMAKAHGTSSYTPDKSSFNLATVVAETLGLGVQEESETQGPMSPLGDELYHCLEGNHKKQPFEESTRNTEDSLRFSDSTSKTPPQEELPTRVSSPVFGATSSIKSGLDLNTSLSPSLLQPGKKKHLKTLPFSNTCISRLEKTRSKSEDSALFTHHSLGSEVNKIIIQSSNKQILINKNISESLGEQNRTEYGKDSNTDKHLEPLKSLGGRTSKRKKTEEESEHEVSCPQASFDKENAFPFPMDNQFSMNGDCVMDKPLDLSDRFSAIQRQEKSQGSETSKNKFRQVTLYEALKTIPKGFSSSRKASDGNCTLPKDSPGEPCSQECIILQPLNKCSPDNKPSLQIKEENAVFKIPLRPRESLETENVLDDIKSAGSHEPIKIQTRSDHGGCELASVLQLNPCRTGKIKSLQNNQDVSFENIQWSIDPGADLSQYKMDVTVIDTKDGSQSKLGGETVDMDCTLVSETVLLKMKKQEQKGEKSSMLFYINEERKMNDSLEDMFDRTTHEEYESCLADSFSQAADEEEELSTATKKLHTHGDKQDKVKQKAFVEPYFKGDERETSLQNFPHIEVVRKKEERRKLLGHTCKECEIYYADMPAEEREKKLASCSRHRFRYIPPNTPENFWEVGFPSTQTCMERGYIKEDLDPCPRPKRRQPYNAIFSPKGKEQKT

SEQ ID NO: 11085 - protein, 867 aa, Homo sapiens
MNISGSSCGSPNSADTSSDFKDLWTKLKECHDREVQGLQVKVTKLKQERILDAQRLEEFFTKNQQLREQQKVLHETIKVLEDRLRAGLCDRCAVTEEHMRKKQQEFENIRQQNLKLITELMNERNTLQEENKKLSEQLQQKIENDQQHQAAELECEEDVIPDSPITAFSFSGVNRLRRKENPHVRYIEQTHTKLEHSVCANEMRKVSKSSTHPQHNPNENEILVADTYDQSQSPMAKAHGTSSYTPDKSSFNLATVVAETLGLGVQEESETQGPMSPLGDELYHCLEGNHKKQPFEESTRNTEDSLRFSDSTSKTPPQEELPTRVSSPVFGATSSIKSGLDLNTSLSPSLLQPGKKKHLKTLPFSNTCISRLEKTRSKSEDSALFTHHSLGSEVNKIIIQSSNKQILINKNISESLGEQNRTEYGKDSNTDKHLEPLKSLGGRTSKRKKTEEESEHEVSCPQASFDKENAFPFPMDNQFSMNGDCVMDKPLDLSDRFSAIQRQEKSQGSETSKNKFRQVTLYEALKTIPKGFSSSRKASDGNCTLPKDSPGEPCSQECIILQPLNKCSPDNKPSLQIKEENAVFKIPLRPRESLETENVLDDIKSAGSHEPIKIQTRSDHGGCELASVLQLNPCRTGKIKSLQNNQDVSFENIQWSIDPGADLSQYKMDVTVIDTKDGSQSKLGGETVDMDCTLVSETVLLKMKKQEQKGEKSSNEERKMNDSLEDMFDRTTHEEYESCLADSFSQAADEEEELSTATKKLHTHGDKQDKVKQKAFVEPYFKGDESIMQICQQKKEKRNWLPAQDTDSATFHPTHQRIFGKLVFLPLRLVWKEVILRKILILVLVQKDVSLTTQYFLQKARSRRHRR

SEQ ID NO: 11086 - protein, 1483 aa, Homo sapiens
MAPLLGRKPFPLVKPLPGEEPLFTIPHTQEAFRTREEYEARLERYSERIWTCKSTGSSQLTHKEAWEEEQEVAELLKEEFPAWYEKLVLEMVHHNTASLEKLVDTAWLEIMTKYAVGEECDFEVGKEKMLKVKIVKIHPLEKVDEEATEKKSDGACDSPSSDKENSSQIAQDHQKKETVVKEDEGRRESINDRARRSPRKLPTSLKKGERKWAPPKFLPHKYDVKLQNEDKIISNVPADSLIRTERPPNKEIVRYFIRHNALRAGTGENAPWVVEDELVKKYSLPSKFSDFLLDPYKYMTLNPSTKRKNTGSPDRKPSKKSKTDNSSLSSPLNPKLWCHVHLKKSLSGSPLKVKNSKNSKSPEEHLEEMMKMMSPNKLHTNFHIPKKGPPAKKPGKHSDKPLKAKGRSKGILNGQKSTGNSKSPKKGLKTPKTKMKQMTLLDMAKGTQKMTRAPRNSGGTPRTSSKPHKHLPPAALHLIAYYKENKDREDKRSALSCVISKTARLLSSEDRARLPEELRSLVQKRYELLEHKKRWASMSEEQRKEYLKKKREELKKKLKEKAKERREKEMLERLEKQKRYEDQELTGKNLPAFRLVDTPEGLPNTLFGDVAMVVEFLSCYSGLLLPDAQYPITAVSLMEALSADKGGFLYLNRVLVILLQTLLQDEIAEDYGELGMKLSEIPLTLHSVSELVRLCLRRSDVQEESEGSDTDDNKDSAAFEDNEVQDEFLEKLETSEFFELTSEEKLQILTALCHRILMTYSVQDHMETRQQMSAELWKERLAVLKEENDKKRAEKQKRKEMEAKNKENGKVENGLGKTDRKKEIVKFEPQVDTEAEDMISAVKSRRLLAIQAKKEREIQEREMKVKLERQAEEERIRKHKAAAEKAFQEGIAKAKLVMRRTPIGTDRNHNRYWLFSDEVPGLFIEKGWVHDSIDYRFNHHCKDHTVSGDEDYCPRSKKANLGKNASMNTQHGTATEVAVETTTPKQGQNLWFLCDSQKELDELLNCLHPQGIRESQLKERLEKRYQDIIHSIHLARKPNLGLKSCDGNQELLNFLRSDLIEVATRLQKGGLGYVEETSEFEARVISLEKLKDFGECVIALQASVIKKFLQGFMAPKQKRRKLQSEDSAKTEEVDEEKKMVEEAKVASALEKWKTAIREAQTFSRMHVLLGMLDACIKWDMSAENARCKVCRKKGEDDKLILCDECNKAFHLFCLRPALYEVPDGEWQCPACQPATARRNSRGRNYTEESASEDSEDDESDEEEEEEEEEEEEEDYEVAGLRLRPRKTIRGKHSVIPPAARSGRRPGKKPHSTRRSQPKAPPVDDAEVDELVLQTKRSSRRQSLELQKCEEILHKIVKYRFSWPFREPVTRDEAEDYYDVITHPMDFQTVQNKCSCGSYRSVQEFLTDMKQVFTNAEVYNCRGSHVLSCMVKTEQCLVALLHKHLPGHPYVRRKRKKFPDRLAEDEGDSEPEAVGQSRGRRQKK

SEQ ID NO: 11087 - protein, 1479 aa, Homo sapiens
MAPLLGRKPFPLVKPLPGEEPLFTIPHTQEAFRTREEYEARLERYSERIWTCKSTGSSQLTHKEAWEEEQEVAELLKEEFPAWYEKLVLEMVHHNTASLEKLVDTAWLEIMTKYAVGEECDFEVGKEKMLKVKIVKIHPLEKVDEEATEKKSDGACDSPSSDKENSSQIAQDHQKKETVVKEDEGRRESINDRARRSPRKLPTSLKKGERKWAPPKFLPHKYDVKLQNEDKIISNVPADSLIRTERPPNKEIVRYFIRHNALRAGTGENAPWVVEDELVKKYSLPSKFSDFLLDPYKYMTLNPSTKRKNTGSPDRKPSKKSKTDNSSLSSPLNPKLWCHVHLKKSLSGSPLKVKNSKNSKSPEEHLEEMMKMMSPNKLHTNFHIPKKGPPAKKPGKHSDKPLKAKGRSKGILNGQKSTGNSKSPKKGLKTPKTKMKQMTLLDMAKGTQKMTRAPRNSGGTPRTSSKPHKHLPPAALHLIAYYKENKDREDKRSALSCVISKTARLLSSEDRARLPEELRSLVQKRYELLEHKKRWASMSEEQRKEYLKKKREELKKKLKEKAKERREKEMLERLEKQKRYEDQELTGKNLPAFRLVDTPEGLPNTLFGDVAMVVEFLSCYSGLLLPDAQYPITAVSLMEALSADKGGFLYLNRVLVILLQDEIAEDYGELGMKLSEIPLTLHSVSELVRLCLRRSDVQEESEGSDTDDNKDSAAFEDNEVQDEFLEKLETSEFFELTSEEKLQILTALCHRILMTYSVQDHMETRQQMSAELWKERLAVLKEENDKKRAEKQKRKEMEAKNKENGKVENGLGKTDRKKEIVKFEPQVDTEAEDMISAVKSRRLLAIQAKKEREIQEREMKVKLERQAEEERIRKHKAAAEKAFQEGIAKAKLVMRRTPIGTDRNHNRYWLFSDEVPGLFIEKGWVHDSIDYRFNHHCKDHTVSGDEDYCPRSKKANLGKNASMNTQHGTATEVAVETTTPKQGQNLWFLCDSQKELDELLNCLHPQGIRESQLKERLEKRYQDIIHSIHLARKPNLGLKSCDGNQELLNFLRSDLIEVATRLQKGGLGYVEETSEFEARVISLEKLKDFGECVIALQASVIKKFLQGFMAPKQKRRKLQSEDSAKTEEVDEEKKMVEEAKVASALEKWKTAIREAQTFSRMHVLLGMLDACIKWDMSAENARCKVCRKKGEDDKLILCDECNKAFHLFCLRPALYEVPDGEWQCPACQPATARRNSRGRNYTEESASEDSEDDESDEEEEEEEEEEEEEDYEVAGLRLRPRKTIRGKHSVIPPAARSGRRPGKKPHSTRRSQPKAPPVDDAEVDELVLQTKRSSRRQSLELQKCEEILHKIVKYRFSWPFREPVTRDEAEDYYDVITHPMDFQTVQNKCSCGSYRSVQEFLTDMKQVFTNAEVYNCRGSHVLSCMVKTEQCLVALLHKHLPGHPYVRRKRKKFPDRLAEDEGDSEPEAVGQSRGRRQKK

SEQ ID NO: 11088 - protein, 345 aa, Homo sapiens
MAQRGGARRPRGDRERLGSRLRALRPGREPRQSEPPAQRGPPPSGRPPARSTASGHDRPTRGAAAGARRPRMKKKTRRRSTRSEELTRSEELTLSEEATWSEEATQSEEATQGEEMNRSQEVTRDEESTRSEEVTREEMAAAGLTVTVTHSNEKHDLHVTSQQGSSEPVVQDLAQVVEEVIGVPQSFQKLIFKGKSLKEMETPLSALGIQDGCRVMLIGKKNSPQEEVELKKLKHLEKSVEKIADQLEELNKELTGIQQGFLPKDLQAEALCKLDRRVKATIEQFMKILEEIDTLILPENFKDSRLKRKGLVKKVQAFLAECDTVEQNICQETERLQSTNFALAE

SEQ ID NO: 11089 - protein, 311 aa, Homo sapiens
MAQRGGARRPRGDRERLGSRLRALRPGREPRQSEPPAQRGPPPSGRPPARSTASGHDRPTRGAAAGARRPRMKKKTRRRSTRSEELTRSEELTLSEEATWSEEATQSEEATQGEEMNRSQEVTRDEESTRSEEVTREEMAAAGLTVTVTHSNEKHDLHVTSQQGSSEPVVQDLAQVVEEVIGVPQSFQKLIFKGKSLKEMETPLSALGIQDGCRVMLIGKKNSPQEEVELKKLKHLEKSVEKIADQLEELNKELTGIQQGFLPKDLQAEALCKLDRRVKATIEQFMKILEEIDTLILPENFPTLTLVLNEK

SEQ ID NO: 11090 - protein, 274 aa, Homo sapiens
MKKKTRRRSTRSEELTRSEELTLSEEATWSEEATQSEEATQGEEMNRSQEVTRDEESTRSEEVTREEMAAAGLTVTVTHSNEKHDLHVTSQQGSSEPVVQDLAQVVEEVIGVPQSFQKLIFKGKSLKEMETPLSALGIQDGCRVMLIGKKNSPQEEVELKKLKHLEKSVEKIADQLEELNKELTGIQQGFLPKDLQAEALCKLDRRVKATIEQFMKILEEIDTLILPENFKDSRLKRKGLVKKVQAFLAECDTVEQNICQETERLQSTNFALAE

SEQ ID NO: 11091 - protein, 230 aa, Homo sapiens
MNRSQEVTRDEESTRSEEVTREEMAAAGLTVTVTHSNEKHDLHVTSQQGSSEPVVQDLAQVVEEVIGVPQSFQKLIFKGKSLKEMETPLSALGIQDGCRVMLIGKKNSPQEEVELKKLKHLEKSVEKIADQLEELNKELTGIQQGFLPKDLQAEALCKLDRRVKATIEQFMKILEEIDTLILPENFKDSRLKRKGLVKKVQAFLAECDTVEQNICQETERLQSTNFALAE

SEQ ID NO: 11092 - protein, 736 aa, Homo sapiens
MTSTGKDGGAQHAQYVGPYRLEKTLGKGQTGLVKLGVHCVTCQKVAIKIVNREKLSESVLMKVEREIAILKLIEHPHVLKLHDVYENKKYLYLVLEHVSGGELFDYLVKKGRLTPKEARKFFRQIISALDFCHSHSICHRDLKPENLLLDEKNNIRIADFGMASLQVGDSLLETSCGSPHYACPEVIRGEKYDGRKADVWSCGVILFALLVGALPFDDDNLRQLLEKVKRGVFHMPHFIPPDCQSLLRGMIEVDAARRLTLEHIQKHIWYIGGKNEPEPEQPIPRKVQIRSLPSLEDIDPDVLDSMHSLGCFRDRNKLLQDLLSEEENQEKMIYFLLLDRKERYPSQEDEDLPPRNEIDPPRKRVDSPMLNRHGKRRPERKSMEVLSVTDGGSPVPARRAIEMAQHGQRSRSISGASSGLSTSPLSSPRVTPHPSPRGSPLPTPKGTPVHTPKESPAGTPNPTPPSSPSVGGVPWRARLNSIKNSFLGSPRFHRRKLQVPTPEEMSNLTPESSPELAKKSWFGNFISLEKEEQIFVVIKDKPLSSIKADIVHAFLSIPSLSHSVISQTSFRAEYKATGGPAVFQKPVKFQVDITYTEGGEAQKENGIYSVTFTLLSGPSRRFKRVVETIQAQLLSTHDPPAAQHLSDTTNCMEMMTGRLSKCGSPLSNFFDVIKQLFSDEKNGQAAQAPSTPAKRSAHGPLGDSAAAGPGPGGDAEYPTGKDTAKMGPPTARREQP

SEQ ID NO: 11093 - protein, 674 aa, Homo sapiens
MTSTGKDGGAQHAQYVGPYRLEKTLGKGQTGLVKLGVHCVTCQKVAIKIVNREKLSESVLMKVEREIAILKLIEHPHVLKLHDVYENKKYLYLVLEHVSGGELFDYLVKKGRLTPKEARKFFRQIISALDFCHSHSICHRDLKPENLLLDEKNNIRIADFGMASLQVGDSLLETSCGSPHYACPEVIRGEKYDGRKADVWSCGVILFALLVGALPFDDDNLRQLLEKVKRGVFHMPHFIPPDCQSLLRGMIEVDAARRLTLEHIQKHIWYIGGKNEPEPEQPIPRKVQIRSLPSLEDIDPDVLDSMHSLGCFRDRNKLLQDLLSEEENQEKMIYFLLLDRKERYPSQEDEDLPPRNEIDPPRKRVDSPMLNRHGKRRPERKSMEVLSVTDGGSPVPARRAIEMAQHGQRSRSISGASSGLSTSPLSSPRVTPHPSPRGSPLPTPKGTPVHTPKESPAGTPNPTPPSSPSVGGVPWRARLNSIKNSFLGSPRFHRRKLQVPTPEEMSNLTPESSPELAKKSWFGNFISLEKEEQIFVVIKDKPLSSIKADIVHAFLSIPSLSHSVISQTSFRAEYKATGGPAVFQKPVKFQVDITYTEGGEAQKENGIYSVTFTLLSGPSRRFKRVVETIQAQLLSTHDPPAAQHLSEPPPPAPGLSWGAGLKGQKVATSYESSL

SEQ ID NO: 11094 - protein, 668 aa, Homo sapiens
MTSTGKDGGAQHAQYVGPYRLEKTLGKGQTGLVKLGVHCVTCQKVAIKIVNREKLSESVLMKVEREIAILKLIEHPHVLKLHDVYENKKYLYLVLEHVSGGELFDYLVKKGRLTPKEARKFFRQIISALDFCHSHSICHRDLKPENLLLDEKNNIRIADFGMASLQVGDSLLETSCGSPHYACPEVIRGEKYDGRKADVWSCGVILFALLVGALPFDDDNLRQLLEKVKRGVFHMPHFIPPDCQSLLRGMIEVDAARRLTLEHIQKHIWYIGGKNEPEPEQPIPRKVQIRSLPSLEDIDPDVLDSMHSLGCFRDRNKLLQDLLSEEENQEKMIYFLLLDRKERYPSQEDEDLPPRNEIDPPRKRVDSPMLNRHGKRRPERKSMEVLSVTDGGSPVPARRAIEMAQHGQRSRSISGASSGLSTSPLSSPRVTPHPSPRGSPLPTPKGTPVHTPKESPAGTPNPTPPSSPSVGGVPWRARLNSIKNSFLGSPRFHRRKLQVPTPEEMSNLTPESSPELAKKSWFGNFISLEKEEQIFVVIKDKPLSSIKADIVHAFLSIPSLSHSVISQTSFRAEYKATGGPAVFQKPVKFQVDITYTEGGEAQKENGIYSVTFTLLSGPSRRFKRVVETIQAQLLSTHDPPAAQHLSDTTNCMEMMTGRLSKCGIIPKS

SEQ ID NO: 11095 - protein, 696 aa, Homo sapiens
MTSTGKDGGAQHAQYVGPYRLEKTLGKGQTGLVKLGVHCVTCQKVAIKIVNREKLSESVLMKVEREIAILKLIEHPHVLKLHDVYENKKYLYLVLEHVSGGELFDYLVKKGRLTPKEARKFFRQIISALDFCHSHSICHRDLKPENLLLDEKNNIRIADFGMASLQVGDSLLETSCGSPHYACPEVIRGEKYDGRKADVWSCGVILFALLVGALPFDDDNLRQLLEKVKRGVFHMPHFIPPDCQSLLRGMIEVDAARRLTLEHIQKHIWYIGGKNEPEPEQPIPRKVQIRSLPSLEDIDPDVLDSMHSLGCFRDRNKLLQDLLSEEENQEKMIYFLLLDRKERYPSQEDEDLPPRNEIDPPRKRVDSPMLNRHGKRRPERKSMEVLSVTDGGSPVPARRAIEMAQHGQSKAMFSKSLDIAEAHPQFSKEDRSRSISGASSGLSTSPLSSPRVTPHPSPRGSPLPTPKGTPVHTPKESPAGTPNPTPPSSPSVGGVPWRARLNSIKNSFLGSPRFHRRKLQVPTPEEMSNLTPESSPELAKKSWFGNFISLEKEEQIFVVIKDKPLSSIKADIVHAFLSIPSLSHSVISQTSFRAEYKATGGPAVFQKPVKFQVDITYTEGGEAQKENGIYSVTFTLLSGPSRRFKRVVETIQAQLLSTHDPPAAQHLSEPPPPAPGLSWGAGLKGQKVATSYESSL

SEQ ID NO: 11096 - protein, 766 aa, Homo sapiens
MSPEGHPSRWARPRRPCICPSSLCSPREPRSGPAVGRGGAAHHRVPAGHTPGPQLLQPHLHLPQGQTWLCLQPSPAGLVKLGVHCVTCQKVAIKIVNREKLSESVLMKVEREIAILKLIEHPHVLKLHDVYENKKYLYLVLEHVSGGELFDYLVKKGRLTPKEARKFFRQIISALDFCHSHSICHRDLKPENLLLDEKNNIRIADFGMASLQVGDSLLETSCGSPHYACPEVIRGEKYDGRKADVWSCGVILFALLVGALPFDDDNLRQLLEKVKRGVFHMPHFIPPDCQSLLRGMIEVDAARRLTLEHIQKHIWYIGGKNEPEPEQPIPRKVQIRSLPSLEDIDPDVLDSMHSLGCFRDRNKLLQDLLSEEENQEKMIYFLLLDRKERYPSQEDEDLPPRNEIDPPRKRVDSPMLNRHGKRRPERKSMEVLSVTDGGSPVPARRAIEMAQHGQRSRSISGASSGLSTSPLSSPRVTPHPSPRGSPLPTPKGTPVHTPKESPAGTPNPTPPSSPSVGGVPWRARLNSIKNSFLGSPRFHRRKLQVPTPEEMSNLTPESSPELAKKSWFGNFISLEKEEQIFVVIKDKPLSSIKADIVHAFLSIPSLSHSVISQTSFRAEYKATGGPAVFQKPVKFQVDITYTEGGEAQKENGIYSVTFTLLSGPSRRFKRVVETIQAQLLSTHDPPAAQHLSDTTNCMEMMTGRLSKCDEKNGQAAQAPSTPAKRSAHGPLGDSAAAGPGPGGDAEYPTGKDTAKMGPPTARREQP

SEQ ID NO: 11097 - protein, 614 aa, Homo sapiens
MKVEREIAILKLIEHPHVLKLHDVYENKKYLYLVLEHVSGGELFDYLVKKGRLTPKEARKFFRQIISALDFCHSHSICHRDLKPENLLLDEKNNIRIADFGMASLQVGDSLLETSCGSPHYACPEVIRGEKYDGRKADVWSCGVILFALLVGALPFDDDNLRQLLEKVKRGVFHMPHFIPPDCQSLLRGMIEVDAARRLTLEHIQKHIWYIGGKNEPEPEQPIPRKVQIRSLPSLEDIDPDVLDSMHSLGCFRDRNKLLQDLLSEEENQEKMIYFLLLDRKERYPSQEDEDLPPRNEIDPPRKRVDSPMLNRHGKRRPERKSMEVLSVTDGGSPVPARRAIEMAQHGQRSRSISGASSGLSTSPLSSPRVTPHPSPRGSPLPTPKGTPVHTPKESPAGTPNPTPPSSPSVGGVPWRARLNSIKNSFLGSPRFHRRKLQVPTPEEMSNLTPESSPELAKKSWFGNFISLEKEEQIFVVIKDKPLSSIKADIVHAFLSIPSLSHSVISQTSFRAEYKATGGPAVFQKPVKFQVDITYTEGGEAQKENGIYSVTFTLLSGPSRRFKRVVETIQAQLLSTHDPPAAQHLSEPPPPAPGLSWGAGLKGQKVATSYESSL

SEQ ID NO: 11098 - protein, 1403 aa, Homo sapiens
MATQQKASDERISQFDHNLLPELSALLGLDAVQLAKELEEEEQKERAKMQKGYNSQMRSEAKRLKTFVTYEPYSSWIPQEMAAAGFYFTGVKSGIQCFCCSLILFGAGLTRLPIEDHKRFHPDCGFLLNKDVGNIAKYDIRVKNLKSRLRGGKMRYQEEEARLASFRNWPFYVQGISPCVLSEAGFVFTGKQDTVQCFSCGGCLGNWEEGDDPWKEHAKWFPKCEFLRSKKSSEEITQYIQSYKGFVDITGEHFVNSWVQRELPMASAYCNDSIFAYEELRLDSFKDWPRESAVGVAALAKAGLFYTGIKDIVQCFSCGGCLEKWQEGDDPLDDHTRCFPNCPFLQNMKSSAEVTPDLQSRGELCELLETTSESNLEDSIAVGPIVPEMAQGEAQWFQEAKNLNEQLRAAYTSASFRHMSLLDISSDLATDHLLGCDLSIASKHISKPVQEPLVLPEVFGNLNSVMCVEGEAGSGKTVLLKKIAFLWASGCCPLLNRFQLVFYLSLSSTRPDEGLASIICDQLLEKEGSVTEMCVRNIIQQLKNQVLFLLDDYKEICSIPQVIGKLIQKNHLSRTCLLIAVRTNRARDIRRYLETILEIKAFPFYNTVCILRKLFSHNMTRLRKFMVYFGKNQSLQKIQKTPLFVAAICAHWFQYPFDPSFDDVAVFKSYMERLSLRNKATAEILKATVSSCGELALKGFFSCCFEFNDDDLAEAGVDEDEDLTMCLMSKFTAQRLRPFYRFLSPAFQEFLAGMRLIELLDSDRQEHQDLGLYHLKQINSPMMTVSAYNNFLNYVSSLPSTKAGPKIVSHLLHLVDNKESLENISENDDYLKHQPEISLQMQLLRGLWQICPQAYFSMVSEHLLVLALKTAYQSNTVAACSPFVLQFLQGRTLTLGALNLQYFFDHPESLSLLRSIHFPIRGNKTSPRAHFSVLETCFDKSQVPTIDQDYASAFEPMNEWERNLAEKEDNVKSYMDMQRRASPDLSTGYWKLSPKQYKIPCLEVDVNDIDVVGQDMLEILMTVFSASQRIELHLNHSRGFIESIRPALELSKASVTKCSISKLELSAAEQELLLTLPSLESLEVSGTIQSQDQIFPNLDKFLCLKELSVDLEGNINVFSVIPEEFPNFHHMEKLLIQISAEYDPSKLVKLIQNSPNLHVFHLKCNFFSDFGSLMTMLVSCKKLTEIKFSDSFFQAVPFVASLPNFISLKILNLEGQQFPDEETSEKFAYILGSLSNLEELILPTGDGIYRVAKLIIQQCQQLHCLRVLSFFKTLNDDSVVEIAKVAISGGFQKLENLKLSINHKITEEGYRNFFQALDNMPNLQELDISRHFTECIKAQATTVKSLSQCVLRLPRLIRLNMLSWLLDADDIALLNVMKERHPQSKYLTILQKWILPFSPIIQK

SEQ ID NO: 11099 - protein, 1241 aa, Homo sapiens
MPLHIGDFVWDSKVHSLQSSLNIFSLLPTKGRTEHLFFSHILSFHWPAFSSIRLELWINLRCEFLRSKKSSEEITQYIQSYKGFVDITGEHFVNSWVQRELPMASAYCNDSIFAYEELRLDSFKDWPRESAVGVAALAKAGLFYTGIKDIVQCFSCGGCLEKWQEGDDPLDDHTRCFPNCPFLQNMKSSAEVTPDLQSRGELCELLETTSESNLEDSIAVGPIVPEMAQGEAQWFQEAKNLNEQLRAAYTSASFRHMSLLDISSDLATDHLLGCDLSIASKHISKPVQEPLVLPEVFGNLNSVMCVEGEAGSGKTVLLKKIAFLWASGCCPLLNRFQLVFYLSLSSTRPDEGLASIICDQLLEKEGSVTEMCVRNIIQQLKNQVLFLLDDYKEICSIPQVIGKLIQKNHLSRTCLLIAVRTNRARDIRRYLETILEIKAFPFYNTVCILRKLFSHNMTRLRKFMVYFGKNQSLQKIQKTPLFVAAICAHWFQYPFDPSFDDVAVFKSYMERLSLRNKATAEILKATVSSCGELALKGFFSCCFEFNDDDLAEAGVDEDEDLTMCLMSKFTAQRLRPFYRFLSPAFQEFLAGMRLIELLDSDRQEHQDLGLYHLKQINSPMMTVSAYNNFLNYVSSLPSTKAGPKIVSHLLHLVDNKESLENISENDDYLKHQPEISLQMQLLRGLWQICPQAYFSMVSEHLLVLALKTAYQSNTVAACSPFVLQFLQGRTLTLGALNLQYFFDHPESLSLLRSIHFPIRGNKTSPRAHFSVLETCFDKSQVPTIDQDYASAFEPMNEWERNLAEKEDNVKSYMDMQRRASPDLSTGYWKLSPKQYKIPCLEVDVNDIDVVGQDMLEILMTVFSASQRIELHLNHSRGFIESIRPALELSKASVTKCSISKLELSAAEQELLLTLPSLESLEVSGTIQSQDQIFPNLDKFLCLKELSVDLEGNINVFSVIPEEFPNFHHMEKLLIQISAEYDPSKLVKLIQNSPNLHVFHLKCNFFSDFGSLMTMLVSCKKLTEIKFSDSFFQAVPFVASLPNFISLKILNLEGQQFPDEETSEKFAYILGSLSNLEELILPTGDGIYRVAKLIIQQCQQLHCLRVLSFFKTLNDDSVVEIAKVAISGGFQKLENLKLSINHKITEEGYRNFFQALDNMPNLQELDISRHFTECIKAQATTVKSLSQCVLRLPRLIRLNMLSWLLDADDIALLNVMKERHPQSKYLTILQKWILPFSPIIQK

SEQ ID NO: 11100 - protein, 43 aa, Homo sapiens
MAARAVFLALSAQLLQARLMKEESPVVSWRLEPEDGTALCFIF

SEQ ID NO: 11101 - protein, 109 aa, Homo sapiens
MAAGVVFLALSAQLLQARLMKEESPVVSWRLEPEDGTALDVHFVSTLEPLSNAVKRNVPRCIIILVLQEPTAFRISVTSSCFVQNTLTKLLKDRRKMQTVQCATARETS

SEQ ID NO: 11102 - protein, 175 aa, Homo sapiens
MAEVHVIGQIIGASGFSESSLFCKWGIHTGAAWKLLSGVREGQTQVDTPQIGDMAYWSHPIDLHFATKGLQGWPRLHFQVWSQDSFGRCQLAGYGFCHVPSSPGTHQLACPTWRPLGSWREQLARAFVGGGPQLLHGDTIYSGADRYRLHTAAGGTVHLEIGLLLRNFDRYGVEC

SEQ ID NO: 11103 - protein, 675 aa, Homo sapiens
MDTKSILEELLLKRSQQKKKMSPNNYKERLFVLTKTNLSYYEYDKMKRGSRKGSIEIKKIRCVEKVNLEEQTPVERQYPFQIVYKDGLLYVYASNEESRSQWLKALQKEIRGNPHLLVKYHSGFFVDGKFLCCQQSCKAAPGCTLWEAYANLHTAVNEEKHRVPTFPDRVLKIPRAVPVLKMDAPSSSTTLAQYDNESKKNYGSQPPSSSTSLAQYDSNSKKIYGSQPNFNMQYIPREDFPDWWQVRKLKSSSSSEDVASSNQKERNVNHTTSKISWEFPESSSSEEEENLDDYDWFAGNISRSQSEQLLRQKGKEGAFMVRNSSQVGMYTVSLFSKAVNDKKGTVKHYHVHTNAENKLYLAENYCFDSIPKLIHYHQHNSAGMITRLRHPVSTKANKVPDSVSLGNGIWELKREEITLLKELGSGQFGVVQLGKWKGQYDVAVKMIKEGSMSEDEFFQEAQTMMKLSHPKLVKFYGVCSKEYPIYIVTEYISNGCLLNYLRSHGKGLEPSQLLEMCYDVCEGMAFLESHQFIHRDLAARNCLVDRDLCVKVSDFGMTRYVLDDQYVSSVGTKFPVKWSAPEVFHYFKYSSKSDVWAFGILMWEVFSLGKQPYDLYDNSQVVLKVSQGHRLYRPHLASDTIYQIMYSCWHELPEKRPTFQQLLSSIEPLREKDKH

SEQ ID NO: 11104 - protein, 145 aa, Homo sapiens
MGCGGSRADAIEPRYYESWTRETESTWLTYTDSDAPPSAAAPDSGPEAGGLHSGMLEDGLPSNGVPRSTAPGGIPNPEKKTNCETQCPNPQSLSSGPLTQKQNGLQTTEAKRDAKRMPAKEVTINVTDSIQQMDRSRRITKNCVN

SEQ ID NO: 11105 - protein, 180 aa, Homo sapiens
MGCGGSRADAIEPRYYESWTRETESTWLTYTDSDAPPSAAAPDSGPEAGGLHSVLEAEKSKIKAPTDSVSDEGLFSASKMAPLAVFSHGMLEDGLPSNGVPRSTAPGGIPNPEKKTNCETQCPNPQSLSSGPLTQKQNGLQTTEAKRDAKRMPAKEVTINVTDSIQQMDRSRRITKNCVN

SEQ ID NO: 11106 - protein, 149 aa, Homo sapiens
MGCGGSRADAIEPRYYESWTRETESTWLTYTDSDAPPSAAAPDSGPEAGGLHSVLEAEKSKIKAPTDSVSDEGLFSASKMAPLAVFSHGMLEDGLPSNGVPRSTAPGGIPNPEKKTNCETQCPNPQSLSSGPLTQKQNGLQTTEVLLPS

SEQ ID NO: 11107 - protein, 80 aa, Homo sapiens
MGCGGSRADAIEPRYYESWTRETESTWLTYTDSDAPPSAAAPDSGPEAGGLHSAHYPLAFALAWRDNSLGALLVQEGLCR

SEQ ID NO: 11108 - protein, 73 aa, Homo sapiens
MGCGGSRADAIEPRYYESWTRETESTWLTYTDSDAPPSAAAPDSGPEAGGLHSGCLEEHYHLTALQKVGHPNH

SEQ ID NO: 11109 - protein, 54 aa, Homo sapiens
MGCGGSRADAIEPRYYESWTRETESTWLTYTDSDAPPSAAAPDSGPEAGGLHSG

SEQ ID NO: 11110 - protein, 994 aa, Homo sapiens
MRRRPPSRGGRGAARARETRRQPRHRSGRRMAEAISCTLNCSCQSFKPGKINHRQCDQCKHGWVAHALSKLRIPPMYPTSQVEIVQSNVVFDISSLMLYGTQAIPVRLKILLDRLFSVLKQDEVLQILHALDWTLQDYIRGYVLQDASGKVLDHWSIMTSEEEVATLQQFLRFGETKSIVELMAIQEKEEQSIIIPPSTANVDIRAFIESCSHRSSSLPTPVDKGNPSSIHPFENLISNMTFMLPFQFFNPLPPALIGSLPEQYMLEQGHDQSQDPKQEVHGPFPDSSFLTSSSTPFQVEKDQCLNCPDAITKKEDSTHLSDSSSYNIVTKFERTQLSPEAKVKPERNSLGTKKGRVFCTACEKTFYDKGTLKIHYNAVHLKIKHKCTIEGCNMVFSSLRSRNRHSANPNPRLHMPMNRNNRDKDLRNSLNLASSENYKCPGFTVTSPDCRPPPSYPGSGEDSKGQPAFPNIGQNGVLFPNLKTVQPVLPFYRSPATPAEVANTPGILPSLPLLSSSIPEQLISNEMPFDALPKKKSRKSSMPIKIEKEAVEIANEKRHNLSSDEDMPLQVVSEDEQEACSPQSHRVSEEQHVQSGGLGKPFPEGERPCHRESVIESSGAISQTPEQATHNSERETEQTPALIMVPREVEDGGHEHYFTPGMEPQVPFSDYMELQQRLLAGGLFSALSNRGMAFPCLEDSKELEHVGQHALARQIEENRFQCDICKKTFKNACSVKIHHKNMHVKEMHTCTVEGCNATFPSRRSRDRHSSNLNLHQKALSQEALESSEDHFRAAYLLKDVAKEAYQDVAFTQQASQTSVIFKGTSRMGSLVYPITQVHSASLESYNSGPLSEGTILDLSTTSSMKSESSSHSSWDSDGVSEEGTVLMEDSDGNCEGSSLVPGEDEYPICVLMEKADQSLASLPSGLPITCHLCQKTYSNKGTFRAHYKTVHLRQLHKCKVPGCNTMFSSVRSRNRHSQNPNLHKSLASSPSHLQ

SEQ ID NO: 11111 - protein, 472 aa, Homo sapiens
MSNIYIQEPPTNGKVLLKTTAGDIDIELWSKEAPKACRNFIQLCLEAYYDNTIFHRVVPGFIVQGGDPTGTGSGGESIYGAPFKDEFHSRLRFNRRGLVAMANAGSHDNGSQFFFTLGRADELNNKHTIFGKVTGDTVYNMLRLSEVDIDDDERPHNPHKIKSCEVLFNPFDDIIPREIKRLKKEKPEEEVKKLKPKGTKNFSLLSFGEEAEEEEEEVNRVSQSMKGKSKSSHDLLKDDPHLSSVPVVESEKGDAPDLVDDGEDESAEHDEYIDGDEKNLMRERIAKKLKKDTSANVKSAGEGEVEKKSVSRSEELRKEARQLKRELLAAKQKKVENAAKQAEKRSEEEEAPPDGAVAEYRREKQKYEALRKQQSKKGTSREDQTLALLNQFKSKLTQAIAETPENDIPETEVEDDEGWMSHVLQFEDKSRKVKDASMQDSDTFEIYDPRNPVNKRRREESKKLMREKKERR

SEQ ID NO: 11112 - protein, 390 aa, Homo sapiens
MSNIYIQEPPTNGKVLLKTTAGDIDIELWSKEAPKACRNFIQLCLEAYYDNTIFHRVVPGFIVQGGDPTGTGSGGESIYGAPFKDEFHSRLRFNRRGLVAMANAGSHDNGSQFFFTLGRADELNNKHTIFGKVTGDTVYNMLRLSEVDIDDDERPHNPHKIKSCEVLFNPFDDIIPREIKRLKKEKPEEEVKKLKPKGTKNFSLLSFGEEAEEEEEEVNRVSQSMKGKSKSSHDLLKDDPHLSSVPVVESEKGDAPDLVDDGEDESAEHDEYIDGDEKNLMRERIAKKLKKDTSANVKSAGEGEVEKKSVSRSEELRKEARQLKRELLAAKQKKVENAAKQAEKRSEEEEAPPDGAVAEYRREKQKYEALRKQQSKKGTSREDQDVTCTS

SEQ ID NO: 11113 - protein, 157 aa, Homo sapiens
METLQSETKTRVLPSWLTAQVATKNVAPMKAPKRMRMAAVPVAAARLPATRTVYCMNEAEIVDVALGILIESRKQEKACEQPALAGADNPEHSPPCSVSPHTSSGSSSEEEDSGKQALAPGLSPSQRPGGSSSACSRSPEEEEEEDVLKYVREIFFS

SEQ ID NO: 11114 - protein, 128 aa, Homo sapiens
MRLESLCHLCLACLFFRLPATRTVYCMNEAEIVDVALGILIESRKQEKACEQPALAGADNPEHSPPCSVSPHTSSGSSSEEEDSGKQALAPGLSPSQRPGGSSSACSRSPEEEEEEDVLKYVREIFFS

SEQ ID NO: 11115 - protein, 102 aa, Homo sapiens
MNEAEIVDVALGILIESRKQEKACEQPALAGADNPEHSPPCSVSPHTSSGSSSEEEDSGKQALAPGLSPSQRPGGSSSACSRSPEEEEEEDVLKYVREIFFS

SEQ ID NO: 11116 - protein, 69 aa, Homo sapiens
METLQSETKTRVLPSWLTAQVATKNVAPMKAPKRMRMAAVPVAAARCDSSGQKTPANLTPCDKDCVLHE

SEQ ID NO: 11117 - protein, 656 aa, Homo sapiens
MEGDGSDPEPPDAGEDSKSENGENAPIYCICRKPDINCFMIGCDNCNEWFHGDCIRITEKMAKAIREWYCRECREKDPKLEIRYRHKKSRERDGNERDSSEPRDEGGGRKRPVPDPDLQRRAGSGTGVGAMLARGSASPHKSSPQPLVATPSQHHQQQQQQIKRSARMCGECEACRRTEDCGHCDFCRDMKKFGGPNKIRQKCRLRQCQLRARESYKYFPSSLSPVTPSESLPRPRRPLPTQQQPQPSQKLGRIREDEGAVASSTVKEPPEATATPEPLSDEDLPLDPDLYQDFCAGAFDDHGLPWMSDTEESPFLDPALRKRAVKVKHVKRREKKSEKKKEERYKRHRQKQKHKDKWKHPERADAKDPASLPQCLGPGCVRPAQPSSKYCSDDCGMKLAANRIYEILPQRIQQWQQSPCIAEEHGKKLLERIRREQQSARTRLQEMERRFHELEAIILRAKQQAVREDEESNEGDSDDTDLQIFCVSCGHPINPRVALRHMERCYAKYESQTSFGSMYPTRIEGATRLFCDVYNPQSKTYCKRLQVLCPEHSRDPKVPADEVCGCPLVRDVFELTGDFCRLPKRQCNRHYCWEKLRRAEVDLERVRVWYKLDELFEQERNVRTAMTNRAGLLALMLHQTIQHDPLTTDLRSSADR

SEQ ID NO: 11118 - protein, 660 aa, Homo sapiens
MEGDGSDPEPPDAGEDSKSENGENAPIYCICRKPDINCFMIGCDNCNEWFHGDCIRITEKMAKAIREWYCRECREKDPKLEIRYRHKKSRERDGNERDSSEPRDEGGGRKRPVPDPDLQRRAGSGTGVGAMLARGSASPHKSSPQPLVATPSQHHQQQQQQIKRSARMCGECEACRRTEDCGHCDFCRDMKKFGGPNKIRQKCRLRQCQLRARESYKYFPSSLSPVTPSESLPRPRRPLPTQQQPQPSQKLGRIREDEGAVASSTVKEPPEATATPEPLSDEDLPLDPDLYQDFCAGAFDDHGLPWMSDTEESPFLDPALRKRAVKVKHVKRREKKSEKKVMERKEERYKRHRQKQKHKDKWKHPERADAKDPASLPQCLGPGCVRPAQPSSKYCSDDCGMKLAANRIYEILPQRIQQWQQSPCIAEEHGKKLLERIRREQQSARTRLQEMERRFHELEAIILRAKQQAVREDEESNEGDSDDTDLQIFCVSCGHPINPRVALRHMERCYAKYESQTSFGSMYPTRIEGATRLFCDVYNPQSKTYCKRLQVLCPEHSRDPKVPADEVCGCPLVRDVFELTGDFCRLPKRQCNRHYCWEKLRRAEVDLERVRVWYKLDELFEQERNVRTAMTNRAGLLALMLHQTIQHDPLTTDLRSSADR

SEQ ID NO: 11119 - protein, 316 aa, Homo sapiens
MSGDTCLCPASGAKPKLSGFKGGGLGNKYVQLNVGGSLYYTTVRALTRHDTMLKAMFSGRMEVLTDKEGWILIDRCGKHFGTILNYLRDDTITLPQNRQEIKELMAEAKYYLIQGLVNMCQSALQDKKDSYQPVCNIPIITSLKEEERLIESSTKPVVKLLYNRSNNKYSYTSNSDDHLLKNIELFDKLSLRFNGRVLFIKDVIGDEICCWSFYGQGRKLAEVCCTSIVYATEKKQTKVEFPEARIYEETLNVLLYETPRVPDNSLLEATSRSRSQASPSEDEETFELRDRVRRIHVKRYSTYDDRQLGHQSTHRD

SEQ ID NO: 11120 - protein, 212 aa, Homo sapiens
MAEAKYYLIQGLVNMCQSALQDKKDSYQPVCNIPIITSLKEEERLIESSTKPVVKLLYNRSNNKYSYTSNSDDHLLKNIELFDKLSLRFNGRVLFIKDVIGDEICCWSFYGQGRKLAEVCCTSIVYATEKKQTKVEFPEARIYEETLNVLLYETPRVPDNSLLEATSRSRSQASPSEDEETFELRDRVRRIHVKRYSTYDDRQLGHQSTHRD

SEQ ID NO: 11121 - protein, 211 aa, Homo sapiens
MASGQGPGPPRQECGEPALPSASEEQVAQDTEEVFRSYVFYRHQQEQEAEGVAAPADPEMVTLPLQPSSTMGQVGRQLAIIGDDINRRYDSEFQTMLQHLQPTAENAYEYFTKIATSLFESGINWGRVVALLGFGYRLALHVYQHGLTGFLGQVTRFVVDFMLHHCIARWIAQRGGWVAALNLGNGPILNVLVVLGVVLLGQFVVRRFFKS

SEQ ID NO: 11122 - protein, 153 aa, Homo sapiens
MASGQGPGPPRQECGEPALPSASEEQVAQDTEEVFRSYVFYRHQQEQEAEGVAAPADPEMVTLPLQPSSTMGQVGRQLAIIGDDINRRYDSEFQTMLQHLQPTAENAYEYFTKIATRPAATPTACLRVASIGAVWWLFWASATVWPYTSTSMA

SEQ ID NO: 11123 - protein, 398 aa, Homo sapiens
MVNDPPVPALLWAQEVGQVLAGRARRLLLQFGVLFCTILLLLWVSVFLYGSFYYSYMPTVSHLSPVHFYYRTDCDSSTTSLCSFPVANVSLTKGGRDRVLMYGQPYRVTLELELPESPVNQDLGMFLVTISCYTRGGRIISTSSRSVMLHYRSDLLQMLDTLVFSSLLLFGFAEQKQLLEVELYADYRENSYVPTTGAIIEIHSKRIQLYGAYLRIHAHFTGLRYLLYNFPMTCAFIGVASNFTFLSVIVLFSYMQWVWGGIWPRHRFSLQVNIRKRDNSRKEVQRRISAHQPGPEGQEESTPQSDVTEDGESPEDPSGTEGQLSEEEKPDQQPLSGEEELEPEASDGSGSWEDAALLTEANLPAPAPASASAPVLETLGSSEPAGGALRQRPTCSSS

SEQ ID NO: 11124 - protein, 287 aa, Homo sapiens
MVNDPPVPALLWAQEVGQVLAGRARRLLLQFGVLFCTILLLLWVSVFLYGSFYYSYMPTVSHLSPVHFYYRTDCDSSTTSLCSFPVANVSLTKGGRDRVLMYGQPYRVTLELELPESPVNQDLGMFLVTISCYTRGGRIISTSSRSVMLHYRSDLLQMLDTLVFSSLLLFGFAEQKQLLEVELYADYRENSYVPTTGAIIEIHSKRIQLYGAYLRIHAHFTGLRLTSEKETIPGRKSNEGSLLISQGLKARRSQLRNQMLQRMVRALKIPQGQRVSCPRRRNQISSP

SEQ ID NO: 11125 - protein, 462 aa, Homo sapiens
MSTEKVDQKEEAGEKEVCGDQIKGPDKEEEPPAAASHGQGWRPGGRAARNARPEPGARHPALPAMVNDPPVPALLWAQEVGQVLAGRARRLLLQFGVLFCTILLLLWVSVFLYGSFYYSYMPTVSHLSPVHFYYRTDCDSSTTSLCSFPVANVSLTKGGRDRVLMYGQPYRVTLELELPESPVNQDLGMFLVTISCYTRGGRIISTSSRSVMLHYRSDLLQMLDTLVFSSLLLFGFAEQKQLLEVELYADYRENSYVPTTGAIIEIHSKRIQLYGAYLRIHAHFTGLRYLLYNFPMTCAFIGVASNFTFLSVIVLFSYMQWVWGGIWPRHRFSLQVNIRKRDNSRKEVQRRISAHQPGPEGQEESTPQSDVTEDGESPEDPSGTEGQLSEEEKPDQQPLSGEEELEPEASDGSGSWEDAALLTEANLPAPAPASASAPVLETLGSSEPAGGALRQRPTCSSS

SEQ ID NO: 11126 - protein, 529 aa, Homo sapiens
MAPEMDQFYRSTMAIYKSIMEQFNPALENLVYLGNNYLRAFHALSEAAEVYFSAIQKIGERALQSPTSQILGEILVQMSDTQRHLNSDLEVVVQTFHGGLLQHMEKNTKLDMQFIKDSRQHYELEYRHRAANLEKCMSELWRMERKRDKNVREMKESVNRLHAQMQAFVSESQRAAELEEKRRYRFLAEKHLLLSNTFLQFFGRARGMLQNRVLLWKEQSEASRSPSRAHSPGLLGPALGPPYPSGRLTPTCLDMPPRPLGEFSSPRSRHGSGSYGTEPDARPASQLEPDRRSLPRTPSASSLYSGSAQSSRSNSFGERPGGGGGARRVRALVSHSEGANHTLLRFSAGDVVEVLVPEAQNGWLYGKLEGSSASGWFPEAYVKALEEGPVNPMTPVTPMTSMTSMSPMTPMNPGNELPSRSYPLRGSHSLDDLLDRPGNSIAPSEYWDGQSRSRTPSRVPSRAPSPAPPPLPSSRRSSMGSTAVATDVKKLMSSEQYPPQELFPRGTNPFATVKLRPTITNDRSAPLIR

SEQ ID NO: 11127 - protein, 515 aa, Homo sapiens
MAPEMDQFYRSTMAIYKSIMEQFNPALENLVYLGNNYLRAFHALSEAAEVYFSAIQKIGERALQSPTSQILGEILVQMSDTQRHLNSDLEVVVQTFHGGLLQHMEKNTKLDMQFIKDSRQHYELEYRHRAANLEKCMSELWRMERKRDKNVREMKESVNRLHAQMQAFVSESQRAAELEEKRRYRFLAEKHLLLSNTFLQFFGRARGMLQNRVLLWKEQSEASRSPSRAHSPGLLGPALGPPYPSGRLTPTCLDMPPRPLGEFSSPRSRHGSGSYGTEPDARPASQLEPDRRSLPRTPSASSLYSGSAQSSRSNSFGERPGGGGGARRVRALVSHSEGANHTLLRFSAGDVVEVLVPEAQNGWLYGKLEGSSASGWFPEAYVKALEEGPVNPMTPVTPMTSMTSMSPMTPMNPGNELPSRSYPLRGSHSLDDLLDRPGNSTPSRVPSRAPSPAPPPLPSSRRSSMGSTAVATDVKKLMSSEQYPPQELFPRGTNPFATVKLRPTITNDRSAPLIR

SEQ ID NO: 11128 - protein, 387 aa, Homo sapiens
MACTIQKAEALDGAHLMQILWYDEEESLYPAVWLRDNCPCSDCYLDSAKARKLLVEALDVNIGIKGLIFDRKKVYITWPDEHYSEFQADWLKKRCFSKQARAKLQRELFFPECQYWGSELQLPTLDFEDVLRYDEHAYKWLSTLKKVGIVRLTGASDKPGEVSKLGKRMGFLYLTFYGHTWQVQDKIDANNVAYTTGKLSFHTDYPALHHPPGVQLLHCIKQTVTGGDSEIVDGFNVCQKLKKNNPQAFQILSSTFVDFTDIGVDYCDFSVQSKHKIIELDDKGQVVRINFNNATRDTIFDVPVERVQPFYAALKEFVDLMNSKESKFTFKMNPGDVITFDNWRLLHGRRSYEAGTEISRHLEGAYADWDVVMSRLRILRQRVENGN

SEQ ID NO: 11129 - protein, 450 aa, Homo sapiens
MEGSKTSNNSTMQVSFVCQRCSQPLKLDTSFKILDRVTIQELTAPLLTTAQAKPGETQEEETNSGEEPFIETPRQDGVSRRFIPPARMMSTESANSFTLIGEASDGGTMENLSRRLKVTGDLFDIMSGQTDVDHPLCEECTDTLLDQLDTQLNVTENECQNYKRCLEILEQMNEDDSEQLQMELKELALEEERLIQELEDVEKNRKIVAENLEKVQAEAERLDQEEAQYQREYSEFKRQQLELDDELKSVENQMRYAQTQLDKLKKTNVFNATFHIWHSGQFGTINNFRLGRLPSVPVEWNEINAAWGQTVLLLHALANKMGLKFQRYRLVPYGNHSYLESLTDKSKELPLYCSGGLRFFWDNKFDHAMVAFLDCVQQFKEEVEKGETRFCLPYRMDVEKGKIEDTGGSGGSYSIKTQFNSEEQWTKALKFMLTNLKWGLAWVSSQFYNK

SEQ ID NO: 11130 - protein, 260 aa, Homo sapiens
MDRHSSYIFIWLQLELCAMAVLLTKGEIRCYCDAAHCVATGYMCKSELSACFSRLLDPQNSNSPLTHGCLDSLASTTDICQAKQARNHSGTTIPTLECCHEDMCNYRGLHDVLSPPRGEASGQGNRYQHDGSRNLITKVQELTSSKELWFRAAVIAVPIAGGLILVLLIMLALRMLRSENKRLQDQRQQMLSRLHYSFHGHHSKKGQVAKLDLECMVPVSGHENCCLTCDKMRQADLSNDKILSLVHWGMYSGHGKLEFV

SEQ ID NO: 11131 - protein, 636 aa, Homo sapiens
MAAEEEAAAGGKVLREENQCIAPVVSSRVSPGTRPTAMGSFSSHMTEFPRKRKGSDSDPSQSGIMTEKVVEKLSQNPLTYLLSTRIEISASSGSRVEDGEHQVKMKAFREAHSQTEKRRRDKMNNLIEELSAMIPQCNPMARKLDKLTVLRMAVQHLRSLKGLTNSYVGSNYRPSFLQDNELRHLILKTAEGFLFVVGCERGKILFVSKSVSKILNYDQASLTGQSLFDFLHPKDVAKVKEQLSSFDISPREKLIDAKTGLQVHSNLHAGRTRVYSGSRRSFFCRIKSCKISVKEEHGCLPNSKKKEHRKFYTIHCTGYLRSWPPNIVGMEEERNSKKDNSNFTCLVAIGRLQPYIVPQNSGEINVKPTEFITRFAVNGKFVYVDQRATAILGYLPQELLGTSCYEYFHQDDHNNLTDKHKAVLQSKEKILTDSYKFRAKDGSFVTLKSQWFSFTNPWTKELEYIVSVNTLVLGHSEPGEASFLPCSSQSSEESSRQSCMSVPGMSTGTVLGAGSIGTDIANEILDLQRLQSSSYLDDSSPTGLMKDTHTVNCRSMSNKELFPPSPSEMGELEATRQNQSTVAVHSHEPLLSDGAQLDFDALCDNDDTAMAAFMNYLEAEGGLGDPGDFSDIQWTL

SEQ ID NO: 11132 - protein, 622 aa, Homo sapiens
MAAEEEAAAGGKVLREENQCIAPVVSSRVSPGTRPTAMGSFSSHMTEFPRKRKGSDSDPSQSGIMTEKVVEKLSQNPLTYLLSTRIEISASSGSREAHSQTEKRRRDKMNNLIEELSAMIPQCNPMARKLDKLTVLRMAVQHLRSLKGLTNSYVGSNYRPSFLQDNELRHLILKTAEGFLFVVGCERGKILFVSKSVSKILNYDQASLTGQSLFDFLHPKDVAKVKEQLSSFDISPREKLIDAKTGLQVHSNLHAGRTRVYSGSRRSFFCRIKSCKISVKEEHGCLPNSKKKEHRKFYTIHCTGYLRSWPPNIVGMEEERNSKKDNSNFTCLVAIGRLQPYIVPQNSGEINVKPTEFITRFAVNGKFVYVDQRATAILGYLPQELLGTSCYEYFHQDDHNNLTDKHKAVLQSKEKILTDSYKFRAKDGSFVTLKSQWFSFTNPWTKELEYIVSVNTLVLGHSEPGEASFLPCSSQSSEESSRQSCMSVPGMSTGTVLGAGSIGTDIANEILDLQRLQSSSYLDDSSPTGLMKDTHTVNCRSMSNKELFPPSPSEMGELEATRQNQSTVAVHSHEPLLSDGAQLDFDALCDNDDTAMAAFMNYLEAEGGLGDPGDFSDIQWTL

SEQ ID NO: 11133 - protein, 599 aa, Homo sapiens
MAAEEEAAAGGEVAGGEATAPGKVLREENQCIAPVVSSRVSPGTRPTAMGSFSSHMTEFPRKRKGSDSDPSQEAHSQTEKRRRDKMNNLIEELSAMIPQCNPMARKLDKLTVLRMAVQHLRSLKGLTNSYVGSNYRPSFLQDNELRHLILKTAEGFLFVVGCERGKILFVSKSVSKILNYDQASLTGQSLFDFLHPKDVAKVKEQLSSFDISPREKLIDAKTGLQVHSNLHAGRTRVYSGSRRSFFCRIKSCKISVKEEHGCLPNSKKKEHRKFYTIHCTGYLRSWPPNIVGMEEERNSKKDNSNFTCLVAIGRLQPYIVPQNSGEINVKPTEFITRFAVNGKFVYVDQRATAILGYLPQELLGTSCYEYFHQDDHNNLTDKHKAVLQSKEKILTDSYKFRAKDGSFVTLKSQWFSFTNPWTKELEYIVSVNTLVLGHSEPGEASFLPCSSQSSEESSRQSCMSVPGMSTGTVLGAGSIGTDIANEILDLQRLQSSSYLDDSSPTGLMKDTHTVNCRSMSNKELFPPSPSEMGELEATRQNQSTVAVHSHEPLLSDGAQLDFDALCDNDDTAMAAFMNYLEAEGGLGDPGDFSDIQWTL

SEQ ID NO: 11134 - protein, 588 aa, Homo sapiens
MAAEEEAAAGGKVLREENQCIAPVVSSRVSPGTRPTAMGSFSSHMTEFPRKRKGSDSDPSQEAHSQTEKRRRDKMNNLIEELSAMIPQCNPMARKLDKLTVLRMAVQHLRSLKGLTNSYVGSNYRPSFLQDNELRHLILKTAEGFLFVVGCERGKILFVSKSVSKILNYDQASLTGQSLFDFLHPKDVAKVKEQLSSFDISPREKLIDAKTGLQVHSNLHAGRTRVYSGSRRSFFCRIKSCKISVKEEHGCLPNSKKKEHRKFYTIHCTGYLRSWPPNIVGMEEERNSKKDNSNFTCLVAIGRLQPYIVPQNSGEINVKPTEFITRFAVNGKFVYVDQRATAILGYLPQELLGTSCYEYFHQDDHNNLTDKHKAVLQSKEKILTDSYKFRAKDGSFVTLKSQWFSFTNPWTKELEYIVSVNTLVLGHSEPGEASFLPCSSQSSEESSRQSCMSVPGMSTGTVLGAGSIGTDIANEILDLQRLQSSSYLDDSSPTGLMKDTHTVNCRSMSNKELFPPSPSEMGELEATRQNQSTVAVHSHEPLLSDGAQLDFDALCDNDDTAMAAFMNYLEAEGGLGDPGDFSDIQWTL

SEQ ID NO: 11135 - protein, 602 aa, Homo sapiens
MAAEEEAAAGGKVLREENQCIAPVVSSRVSPGTRPTAMGSFSSHMTEFPRKRKGSDSDPSQVEDGEHQVKMKAFREAHSQTEKRRRDKMNNLIEELSAMIPQCNPMARKLDKLTVLRMAVQHLRSLKGLTNSYVGSNYRPSFLQDNELRHLILKTAEGFLFVVGCERGKILFVSKSVSKILNYDQASLTGQSLFDFLHPKDVAKVKEQLSSFDISPREKLIDAKTGLQVHSNLHAGRTRVYSGSRRSFFCRIKSCKISVKEEHGCLPNSKKKEHRKFYTIHCTGYLRSWPPNIVGMEEERNSKKDNSNFTCLVAIGRLQPYIVPQNSGEINVKPTEFITRFAVNGKFVYVDQRATAILGYLPQELLGTSCYEYFHQDDHNNLTDKHKAVLQSKEKILTDSYKFRAKDGSFVTLKSQWFSFTNPWTKELEYIVSVNTLVLGHSEPGEASFLPCSSQSSEESSRQSCMSVPGMSTGTVLGAGSIGTDIANEILDLQRLQSSSYLDDSSPTGLMKDTHTVNCRSMSNKELFPPSPSEMGELEATRQNQSTVAVHSHEPLLSDGAQLDFDALCDNDDTAMAAFMNYLEAEGGLGDPGDFSDIQWTL

SEQ ID NO: 11136 - protein, 551 aa, Homo sapiens
MGSFSSHMTEFPRKRKGSDSDPSQEAHSQTEKRRRDKMNNLIEELSAMIPQCNPMARKLDKLTVLRMAVQHLRSLKGLTNSYVGSNYRPSFLQDNELRHLILKTAEGFLFVVGCERGKILFVSKSVSKILNYDQASLTGQSLFDFLHPKDVAKVKEQLSSFDISPREKLIDAKTGLQVHSNLHAGRTRVYSGSRRSFFCRIKSCKISVKEEHGCLPNSKKKEHRKFYTIHCTGYLRSWPPNIVGMEEERNSKKDNSNFTCLVAIGRLQPYIVPQNSGEINVKPTEFITRFAVNGKFVYVDQRATAILGYLPQELLGTSCYEYFHQDDHNNLTDKHKAVLQSKEKILTDSYKFRAKDGSFVTLKSQWFSFTNPWTKELEYIVSVNTLVLGHSEPGEASFLPCSSQSSEESSRQSCMSVPGMSTGTVLGAGSIGTDIANEILDLQRLQSSSYLDDSSPTGLMKDTHTVNCRSMSNKELFPPSPSEMGELEATRQNQSTVAVHSHEPLLSDGAQLDFDALCDNDDTAMAAFMNYLEAEGGLGDPGDFSDIQWTL

SEQ ID NO: 11137 - protein, 585 aa, Homo sapiens
MGSFSSHMTEFPRKRKGSDSDPSQSGIMTEKVVEKLSQNPLTYLLSTRIEISASSGSREAHSQTEKRRRDKMNNLIEELSAMIPQCNPMARKLDKLTVLRMAVQHLRSLKGLTNSYVGSNYRPSFLQDNELRHLILKTAEGFLFVVGCERGKILFVSKSVSKILNYDQASLTGQSLFDFLHPKDVAKVKEQLSSFDISPREKLIDAKTGLQVHSNLHAGRTRVYSGSRRSFFCRIKSCKISVKEEHGCLPNSKKKEHRKFYTIHCTGYLRSWPPNIVGMEEERNSKKDNSNFTCLVAIGRLQPYIVPQNSGEINVKPTEFITRFAVNGKFVYVDQRATAILGYLPQELLGTSCYEYFHQDDHNNLTDKHKAVLQSKEKILTDSYKFRAKDGSFVTLKSQWFSFTNPWTKELEYIVSVNTLVLGHSEPGEASFLPCSSQSSEESSRQSCMSVPGMSTGTVLGAGSIGTDIANEILDLQRLQSSSYLDDSSPTGLMKDTHTVNCRSMSNKELFPPSPSEMGELEATRQNQSTVAVHSHEPLLSDGAQLDFDALCDNDDTAMAAFMNYLEAEGGLGDPGDFSDIQWTL

SEQ ID NO: 11138 - protein, 572 aa, Homo sapiens
MGSFSSHMTEFPRKRKGSDSDPSHQNPLTYLLSTRIEISASSGSREAHSQTEKRRRDKMNNLIEELSAMIPQCNPMARKLDKLTVLRMAVQHLRSLKGLTNSYVGSNYRPSFLQDNELRHLILKTAEGFLFVVGCERGKILFVSKSVSKILNYDQASLTGQSLFDFLHPKDVAKVKEQLSSFDISPREKLIDAKTGLQVHSNLHAGRTRVYSGSRRSFFCRIKSCKISVKEEHGCLPNSKKKEHRKFYTIHCTGYLRSWPPNIVGMEEERNSKKDNSNFTCLVAIGRLQPYIVPQNSGEINVKPTEFITRFAVNGKFVYVDQRATAILGYLPQELLGTSCYEYFHQDDHNNLTDKHKAVLQSKEKILTDSYKFRAKDGSFVTLKSQWFSFTNPWTKELEYIVSVNTLVLGHSEPGEASFLPCSSQSSEESSRQSCMSVPGMSTGTVLGAGSIGTDIANEILDLQRLQSSSYLDDSSPTGLMKDTHTVNCRSMSNKELFPPSPSEMGELEATRQNQSTVAVHSHEPLLSDGAQLDFDALCDNDDTAMAAFMNYLEAEGGLGDPGDFSDIQWTL

SEQ ID NO: 11139 - protein, 540 aa, Homo sapiens
MAAEEEAAAGGEVAGGEATAPGKVLREENQCIAPVVSSRVSPGTRPTAMGSFSSHMTEFPRKRKGSDSDPSQEAHSQTEKRRRDKMNNLIEELSAMIPQCNPMARKLDKLTVLRMAVQHLRSLKGLTNSYVGSNYRPSFLQDNELRHLILKTAEGFLFVVGCERGKILFVSKSVSKILNYDQASLTGQSLFDFLHPKDVAKVKEQLSSFDISPREKLIDAKTGLQVHSNLHAGRTRVYSGSRRSFFCRIKSCKISVKEEHGCLPNSKKKEHRKFYTIHCTGYLRSWPPNIVGMEEERNSKKDNSNFTCLVAIGRLQPYIVPQNSGEINVKPTEFITRFAVNGKFVYVDQRATAILGYLPQELLGTSCYEYFHQDDHNNLTDKHKAVLQSKEKILTDSYKFRAKDGSFVTLKSQWFSFTNPWTKELEYIVSVNTLVLGHSEPGEASFLPCSSQSSEESSRQSCMSVPGMSTGTVLGAGSIGTDIANEILDLQRLQSSSYLDDSSPTGLMKDTHTVNCRSVMVHSWISMPYVTMMTQPWLHL

SEQ ID NO: 11140 - protein, 824 aa, Homo sapiens
MSAPSEEEEYARLVMEAQPEWLRAEVKRLSHELAETTREKIQAAEYGLAVLEEKHQLKLQFEELEVDYEAIRSEMEQLKEAFGQAHTNHKKVAADGESREESLIQESASKEQYYVRKVLELQTELKQLRNVLTNTQSENERLASVAQELKEINQNVEIQRGRLRDDIKEYKFREARLLQDYSELEEENISLQKQVSVLRQNQVEFEGLKHEIKRLEEETEYLNSQLEDAIRLKEISERQLEEALETLKTEREQKNSLRKELSHYMSINDSFYTSHLHVSLDGLKFSDDAAEPNNDAEALVNGFEHGGLAKLPLDNKTSTPKKEGLAPPSPSLVSDLLSELNISEIQKLKQQLMQMEREKAGLLATLQDTQKQLEHTRGSLSEQQEKVTRLTENLSALRRLQASKERQTALDNEKDRDSHEDGDYYEVDINGPEILACKYHVAVAEAGELREQLKALRSTHEAREAQHAEEKGRYEAEGQALTEKVSLLEKASRQDRELLARLEKELKKVSDVAGETQGSLSVAQDELVTFSEELANLYHHVCMCNNETPNRVMLDYYREGQGGAGRTSPGGRTSPEARGRRSPILLPKGLLAPEAGRADGGTGDSSPSPGSSLPSPLSDPRREPMNIYNLIAIIRDQIKHLQAAVDRTTELSRQRIASQELGPAVDKDKEALMEEILKLKSLLSTKREQITTLRTVLKANKQTAEVALANLKSKYENEKAMVTETMMKLRNELKALKEDAATFSSLRAMFATRCDEYITQLDEMQRQLAAAEDEKKTLNSLLRMAIQQKLALTQRLELLELDHEQTRRGRAKAAPKTKPATPSL

SEQ ID NO: 11141 - protein, 855 aa, Homo sapiens
MSAPSEEEEYARLVMEAQPEWLRAEVKRLSHELAETTREKIQAAEYGLAVLEEKHQLKLQFEELEVDYEAIRSEMEQLKEAFGQAHTNHKKVAADGESREESLIQESASKEQYYVRKVLELQTELKQLRNVLTNTQSENERLASVAQELKEINQNVEIQRGRLRDDIKEYKFREARLLQDYSELEEENISLQKQVSVLRQNQVEFEGLKHEIKRLEEETEYLNSQLEDAIRLKEISERQLEEALETLKTEREQKNSLRKELSHYMSINDSFYTSHLHVSLDGLKFSDDAAEPNNDAEALVNGFEHGGLAKLPLDNKTSTPKKEGLAPPSPSLVSDLLSELNISEIQKLKQQLMQMEREKAGLLATLQDTQKQLEHTRGSLSEQQEKVTRLTENLSALRRLQASKERQTALDNEKDRDSHEDGDYYEVDINGPEILACKYHVAVAEAGELREQLKALRSTHEAREAQHAEEKGRYEAEGQALTEKVSLLEKASRQDRELLARLEKELKKVSDVAGETQGSLSVAQDELVTFSEELANLYHHVCMCNNETPNRVMLDYYREGQGGAGRTSPGGRTSPEARGRRSPILLPKGLLAPEAGRADGGTGDSSPSPGSSLPSPLSDPRREPMNIYNLIAIIRDQIKHLQAAVDRTTELSRQRIASQELGPAVDKDKEALMEEILKLKSLLSTKREQITTLRTVLKANKQTAEVALANLKSKYENEKAMVTETMMKLRNELKALKEDAATFSSLRAMFATRCDEYITQLDEMQRQLAAAEDEKKTLNSLLRMAIQQKLALTQRLELLELDHEQTRRGRAKAAPKTKPATPSVSHTCACASDRAEGTGLANQVFCSEKHSIYCD

SEQ ID NO: 11142 - protein, 62 aa, Homo sapiens
MGELAASANHGHSPCYPERKGTPGDLSKRKMLVHFYPRRHSHPRATQQWILKNKTLCRRIKE

SEQ ID NO: 11143 - protein, 89 aa, Homo sapiens
MGELAASANHGHSPCYPERKGTPGDLSKRKMLVHFYPRRHSHPRATQQWILKNKTQEGSHLQTKRRVLSRPWICWHPDLGLPASRTMRN

SEQ ID NO: 11144 - protein, 134 aa, Homo sapiens
MAEQSDEAVKYYTLEEIQKHNHSKSTWLILHHKVYDLTKFLEEHPGGEEVLREQAGGDATENFEDVGHSTDAREMSKTFIIGELHPDDRPKLNKPPETLITTIDSSSSWWTNWVIPAISAVAVALMYRLYMAED

SEQ ID NO: 11145 - protein, 98 aa, Homo sapiens
MAEQSDEAVKYYTLEEIQKHNHSKSTWLILHHKVYDLTKFLEEHPGGEEVLREQAGGDATENFEDVGHSTDAREMSKTFIIGELHPDDRPKLNKPPEP

SEQ ID NO: 11146 - protein, 124 aa, Homo sapiens
MAEQSDEAVKYYTLEEIQKHNHSKSTWLILHHKVYDLTKFLEEHPGGEEVLREQAGGDATENFEDVGHSTDAREMSKTFIIGELHPETLITTIDSSSSWWTNWVIPAISAVAVALMYRLYMAED

SEQ ID NO: 11147 - protein, 107 aa, Homo sapiens
MAAWSPAAAAPLLRGIRGLPLHHRMFATQTEGELRVTQILKEKFPRATAIKVTDISGGCGAMYEIKIESEEFKEKRTVQQHQMVNQALKEEIKEMHGLRIFTSVPKR

SEQ ID NO: 11148 - protein, 101 aa, Homo sapiens
MAAWSPAAAAPLLRGIRGLPLHHRMFATQTEGELRVTQILKEKFPRATAIKVTDISGTKRRNQRDAWIADIYLCPQTLTTPWLHRCCCLRPWMNFTDIILP

SEQ ID NO: 11149 - protein, 125 aa, Homo sapiens
MSRFRGCSSSGVRFCSAEREASGSGRGNVLQFVQEPQAQQSRPFPAGAQLSLELLFSDWGMEWAQPRLPKPALPLPVVVAFSRAADCAVDHHFRFCLLLRLLRQLLTLLRDEEREVNPWQRKIVV

SEQ ID NO: 11150 - protein, 364 aa, Homo sapiens
MPRGRCRQQGPRIPIWAAANYANAHPWQQMDKASPGVAYTPLVDPWIERPCCGDTVCVRTTMEQKSTASGTCGGKPAERGPLAGHMPSSRPHRVDFCWVPGSDPGTFDGSPWLLDRFLAQLGDYMSFHFEHYQDNISRVCEILRRLTGRAQAWAAPYLDGDLPLPDDYELFCQDLKEVVQDPNSFAEYHAVVTCPLPLASSQLPVAPQLPVVRQYLARFLEGLALDMGTAPRSLPAAMATPAVSGSNSVSRSALFEQQLTKESTPGPKEPPVLPSSTCSSKPGPVEPASSQPEEAAPTPVPRLSESANPPAQRPDPAHPGGPKPQKTEEEVLETEGDQEVSLGTPQEVVEAPETPGEPPLSPGF

SEQ ID NO: 11151 - protein, 90 aa, Homo sapiens
MDNMSPRLRAFLSEPIGEKDVCWVDGISHELAINLVTKGINKAYILLGQFLLMHKNEAEFQRWLICCFGATECEAQQTSHCLKEWCACFL

SEQ ID NO: 11152 - protein, 97 aa, Homo sapiens
MLRGTKEMDNMSPRLRAFLSEPIGEKDVCWVDGISHELAINLVTKGINKAYILLGQFLLMHKNEAEFQRWLICCFGATECEAQQTSHCLKEWCACFL

SEQ ID NO: 11153 - protein, 534 aa, Homo sapiens
MEEEMQPAEEGPSVPKIYKQRSPYSVLKTFPSKRPALAKRYERPTLVELPHVRAPPPPPPPFAPHAAVSISSSEPPPQQFQAQSSYPPGPGRAAAAASSSSPSCTPATSQGHLRTPAQPPPASPAASSSSSFAAVVRYGPGAAAAAGTGGTGSDSASLELSAESRMILDAFAQQCSRVLSLLNCGGKLLDSNHSQSMISCVKQEGSSYNERQEHCHIGKGVHSQTSDNVDIEMQYMQRKQQTSAFLRVFTDSLQNYLLSGSFPTPNPSSASEYGHLADVDPLSTSPVHTLGGWTSPATSESHGHPSSSTLPEEEEEEDEEGYCPRCQELEQEVISLQQENEELRRKLESIPVPCQTVLDYLKMVLQHHNQLLIPQPADQPTEGSKQLLNNYPVYITSKQWDEAVNSSKKDGRRLLRYLIRFVFTTDELKYSCGLGKRKRSVQSGETGPERRPLDPVKVTCLREFIRMHCTSNPDWWMPSEEQINKVFSDAVGHARQGRAVGTFLHNGGSFYEGIDHQASQDEVFNKSSQDGSGD

SEQ ID NO: 11154 - protein, 441 aa, Homo sapiens
MEEEMQPAEEGPSVPKIYKQRSPYSVLKTFPSKRPALAKRYERPTLVELPHVRAPPPPPPPFAPHAAVSISSSEPPPQQFQAQSSYPPGPGRAAAAASSSSPSCTPATSQGHLRTPAQPPPASPAASSSSSFAAVVRYGPGAAAAAGTGGTGSDSASLELSAESRMILDAFAQQCSRVLSLLNCGGKLLDSNHSQSMISCVKQEGSSYNERQEHCHIGKGVHSQTSDNVDIEMQYMQRKQQTSAFLRVFTDSLQNYLLSGSFPTPNPSSASEYGHLADVDPLSTSPVHTLGGWTSPATSESHGHPSSSTLPEEEEEEDEEGYCPRCQELEQEVISLQQENEELRRKLESIPVPCQTVLDYLKMVLQHHNQLLIPQPADQPTEGSKQLLNNYPVYITSKQWDEAVNSSKKDGRRLLRYLIRFVFTTDELKYSCGLGKRKRIH

SEQ ID NO: 11155 - protein, 416 aa, Homo sapiens
MQGAPRARFGSRTPPAAAASSSSPSCTPATSQGHLRTPAQPPPASPAASSSSSFAAVVRYGPGAAAAAGTGGTGSDSASLELSAESRMILDAFAQQCSRVLSLLNCGGKLLDSNHSQSMISCVKQEGSSYNERQEHCHIGKGVHSQTSDNVDIEMQYMQRKQQTSAFLRVFTDSLQNYLLSGSFPTPNPSSASEYGHLADVDPLSTSPVHTLGGWTSPATSESHGHPSSSTLPEEEEEEDEEGYCPRCQELEQEVISLQQENEELRRKLESIPVPCQTVLDYLKMVLQHHNQLLIPQPADQPTEGSKQLLNNYPVYITSKQWDEAVNSSKKDGRRLLRYLIRFVFTTDELKYSCGLGKRKRSVQSGETGPERRPLDPVKVTCLRGTASFRSVSPSVISFHRIGCGSPRTSVQPSVF

SEQ ID NO: 11156 - protein, 409 aa, Homo sapiens
MEEEMQPAEEGPSVPKIYKQRSPYSVLKTFPSLELSAESRMILDAFAQQCSRVLSLLNCGGKLLDSNHSQSMISCVKQEGSSYNERQEHCHIGKGVHSQTSDNVDIEMQYMQRKQQTSAFLRVFTDSLQNYLLSGSFPTPNPSSASEYGHLADVDPLSTSPVHTLGGWTSPATSESHGHPSSSTLPEEEEEEDEEGYCPRCQELEQEVISLQQENEELRRKLESIPVPCQTVLDYLKMVLQHHNQLLIPQPADQPTEGSKQLLNNYPVYITSKQWDEAVNSSKKDGRRLLRYLIRFVFTTDELKYSCGLGKRKRSVQSGETGPERRPLDPVKVTCLREFIRMHCTSNPDWWMPSEEQINKVFSDAVGHARQGRAVGTFLHNGGSFYEGIDHQASQDEVFNKSSQDGSGD

SEQ ID NO: 11157 - protein, 316 aa, Homo sapiens
MEEEMQPAEEGPSVPKIYKQRSPYSVLKTFPSLELSAESRMILDAFAQQCSRVLSLLNCGGKLLDSNHSQSMISCVKQEGSSYNERQEHCHIGKGVHSQTSDNVDIEMQYMQRKQQTSAFLRVFTDSLQNYLLSGSFPTPNPSSASEYGHLADVDPLSTSPVHTLGGWTSPATSESHGHPSSSTLPEEEEEEDEEGYCPRCQELEQEVISLQQENEELRRKLESIPVPCQTVLDYLKMVLQHHNQLLIPQPADQPTEGSKQLLNNYPVYITSKQWDEAVNSSKKDGRRLLRYLIRFVFTTDELKYSCGLGKRKRIH

SEQ ID NO: 11158 - protein, 1257 aa, Homo sapiens
MAHFSSEDQAMLQAMLRRLFQSVKEKITGAPSLECAEEILLHLEETDENFHNYEFVKYLRQHIGNTLGSMIEEEMEKCTSDRNQGEECGYDTVVQQVTKRTQESKEYKEMMHYLKNIMIAVVESMINKFEEDETRNQERQKKIQKEKSHSYRTDNCSDSDSSLNQSYKFCQGKLQLILDQLDPGQPKEVRYEALQTLCSAPPSDVLNCENWTTLCEKLTVSLSDPDPVFSDRILKFCAQTFLLSPLHMTKEIYTSLAKYLESYFLSRENHIPTLSAGVDITNPNMTRLLKKVRLLNEYQKEAPSFWIRHPEKYMEEIVESTLSLLTVKHNQSHVVSQKILDPIYFFALVDTKAVWFKKWMHAHYSRTTVLRLLETKYKSLVTTAIQQCVQYFEMCKTRKADETLGHSKHCRNKQKTFYYLGQELQYIYFIHSLCLLGRLLIYKQGRKLFPIKLKNKKGLVSLIDLLVLFTQLIYYSPSCPKMTSAAHSENYSPASMVTEVLWILSDQKECAVECLYNNIVIETLLQPIHNLMKGNEASPNCSETALIHIAGILARIASVEEGLILLLYGANMNSSEESPTGAHIIAQFSKKLLDEDISIFSGSEMLPVVKGAFISVCRHIYSTCEGLQVLITYNLHESIAKAWKKTSLLSERIPTPVEGSDSVSSVSQESQNIMAWEDNLLDDLLHFAATPKGLLLLQRTGAINECVTFIFNRYAKKLQVSRHKKFGYGVLVTRVASTAAGGIALKKSGFINELITELWSNLEYGRDDVRVTHPRTTPVDPIDRSCQKSFLALVNLLSYPAIYELVRNQDLPNKTEYSLREVPTCVIDIIDRLIILNSEAKIRSLFNYEQSHIFGLRDFIIDGLSVERNHVLVRINLVGGPLERILPPRLLEKSDNPYPWPMFSSYPLPNCYLSDITRNAGIKQDNDLDKLLLCLKISDKQTEWIENCQRQFCKMMKAKPDIISGEALIELLEKFVLHLTESPSECYFPSVEYTATDANVKNESLSSVQQLGIKMTVRYGKFLSLLKDGAENDLTWVLKHCERFLKQQQTSIKSSLLCLQGNYAGHDWFVSSLFMIMLGDKEKTFQFLHQFSRLLTSAFLWLPRLHISSYLPNDTVESGIHPVYFCSTHYIEMLLKAELPLVFSAFHMSGFAPSQICLQWITQCFWNYLDWIEICHYIATCVFLGPDYQVYICIAVFKHLQQDILQHTQTQDLQVFLKEEALHGFRVSDYFEYMEILEQNYRTVLLRDMRNIRLQST

SEQ ID NO: 11159 - protein, 1298 aa, Homo sapiens
MAHFSSEDQAMLQAMLRRLFQSVKEKITGAPSLECAEEILLHLEETDENFHNYEFVKYLRQHIGNTLGSMIEEEMEKCTSDRNQGEECGYDTVVQQVTKRTQESKEYKEMMHYLKNIMIAVVESMINKFEEDETRNQERQKKIQKEKSHSYRTDNCSDSDSSLNQSYKFCQGKLQLILDQLDPGQPKEVRYEALQTLCSAPPSDVLNCENWTTLCEKLTVSLSDPDPVFSDRILKFCAQTFLLSPLHMTKEIYTSLAKYLESYFLSRENHIPTLSAGVDITNPNMTRLLKKVRLLNEYQKEAPSFWIRHPEKYMEEIVESTLSLLTVKHNQSHVVSQKILDPIYFFALVDTKAVWFKKWMHAHYSRTTVLRLLETKYKSLVTTAIQQCVQYFEMCKTRKADETLGHSKHCRNKQKTFYYLGQELQYIYFIHSLCLLGRLLIYKQGRKLFPIKLKNKKGLVSLIDLLVLFTQLIYYSPSCPKMTSAAHSENYSPASMVTEVLWILSDQKECAVECLYNNIVIETLLQPIHNLMKGNEASPNCSETALIHIAGILARIASVEEGLILLLYGANMNSSEESPTGAHIIAQFSKKLLDEDISIFSGSEMLPVVKGAFISVCRHIYSTCEGLQVLITYNLHESIAKAWKKTSLLSERIPTPVEGSDSVSSVSQESQNIMAWEDNLLDDLLHFAATPKGLLLLQRTGAINECVTFIFNRYAKKLQVSRHKKFGYGVLVTRVASTAAGGIALKKSGFINELITELWSNLEYGRDDVRVTHPRTTPVDPIDRSCQKSFLALVNLLSYPAIYELVRNQDLPNKTEYSLREVPTCVIDIIDRLIILNSEAKIRSLFNYEQSHIFGLRLLSVICCDLDTLLLLEAQYQVSEMLLNAQEENILEISESHRDFIIDGLSVERNHVLVRINLVGGPLERILPPRLLEKSDNPYPWPMFSSYPLPNCYLSDITRNAGIKQDNDLDKLLLCLKISDKQTEWIENCQRQFCKMMKAKPDIISGEALIELLEKFVLHLTESPSECYFPSVEYTATDANVKNESLSSVQQLGIKMTVRYGKFLSLLKDGAENDLTWVLKHCERFLKQQQTSIKSSLLCLQGNYAGHDWFVSSLFMIMLGDKEKTFQFLHQFSRLLTSAFLWLPRLHISSYLPNDTVESGIHPVYFCSTHYIEMLLKAELPLVFSAFHMSGFAPSQICLQWITQCFWNYLDWIEICHYIATCVFLGPDYQVYICIAVFKHLQQDILQHTQTQDLQVFLKEEALHGFRVSDYFEYMEILEQNYRTVLLRDMRNIRLQST

SEQ ID NO: 11160 - protein, 108 aa, Homo sapiens
MAHFSSEDQAMLQAMLRRLFQSVKEKITGAPSLECAEEILLHLEETDENFHNYEFVKYLRQHIGNTLGSMIEEEMEKCTSDRNQGEECGYDTVVQQVTKRTQESKELP

SEQ ID NO: 11161 - protein, 291 aa, Homo sapiens
MAVTCDPEAFLSICFVTLVFLQLPLASIWKADFDVTGPHAPILAMAGGHVELQCQLFPNISAEDMELRWYRCQPSLAVHMHERGMDMDGEQKWQYRGRTTFMSDHVARGKAMVRSHRVTTFDNRTYCCRFKDGVKFGEATVQVQVAGLGREPRIQVTDQQDGVRAECTSAGCFPKSWVERRDFRGQARPAVTNLSASATTRLWAVASSLTLWDRAVEGLSCSISSPLLPERRKVAESHLPATFSRSSQFTAWKAALPLILVAMGLVIAGGICIFWKRQREKNKASLEEERE

SEQ ID NO: 11162 - protein, 381 aa, Homo sapiens
MERGMHLGAAAAGEDDLFLHKSLSASTSKRLEAAFRSTPPGMDLSLAPPPRERPASSSSSPLGCFEPADPEGAGLLLPPPGGGGGGSAGSGGGGGGGVGVPGLLVGSAGVGGDPSLSSLPAGAALCLKYGESASRGSVAESSGGEQSPDDDSDGRCELVLRAGVADPRASPGAGGGGAKAAEGCSNAHLHGGASVPPGGLGGGGGGGSSSGSSGGGGGSGSGSGGSSSSSSSSSKKSKEQKALRLNINARERRRMHDLNDALDELRAVIPYAHSPSVRKLSKIATLLLAKNYILMQAQALEEMRRLVAYLNQGQAISAASLPSSAAAAAAAAALHPALGAYEQAAGYPFSAGLPPAASCPEKCALFNSVSSSLCKQCTEKP

SEQ ID NO: 11163 - protein, 189 aa, Homo sapiens
MKTKNRPPRRRAPVQDTEATPGEGTPDGSLPNPGPEPAKGLRSRPARAAARAPGEGRRRRPGPSGPGGRRDSSIQRRLESNERERQRMHKLNNAFQALREVIPHVRADKKLSKIETLTLAKNYIKSLTATILTMSSSRLPGLEGPGPKLYQHYQQQQQVAGGALGATEAQPQGHLQRYSTQIHSFREGT

SEQ ID NO: 11164 - protein, 677 aa, Homo sapiens
MDRGLPGPATPAVTPQPPARPQDDEEAAAPHAAAGPDGQLGTVEQRLEPAKRAAHNIHKRLQACLQGQSGADMDKRVKKLPLMALSTTMAESFKELDPDSSMGKALEMSCAIQNQLARILAEFEMTLERDVLQPLSRLSEEELPAILKHKKSLQKLVSDWNTLKSRLSQATKNSGSSQGLGGSPGSHSHTTMANKVETLKEEEEELKRKVEQCRDEYLADLYHFVTKEDSYANYFIRLLEIQADYHRRSLSSLDTALAELRENHGQADHSPSMTATHFPRVYGVSLATHLQELGREIALPIEACVMMLLSEGMKEEGLFRLAAGASVLKRLKQTMASDPHSLEEFCSDPHAVAGALKSYLRELPEPLMTFDLYDDWMRAASLKEPGARLQALQEVCSRLPPENLSNLRYLMKFLARLAEEQEVNKMTPSNIAIVLGPNLLWPPEKEGDQAQLDAASVSSIQVVGVVEALIQSADTLFPGDINFNVSGLFSAVTLQDTVSDRLASEELPSTAVPTPATTPAPAPAPAPAPAPALASAATKERTESEVPPRPASPKVTRSPPETAAPVEDMARRSTGSLAAAVETASGRQALVVGKPSPYMFECITENFSIDPARTLMVGDRLETDILFGHRCGMTTVLTLTGVSRLEEAQAYLAAGQHDLVPHYYVESIADLTEGLED

SEQ ID NO: 11165 - protein, 605 aa, Homo sapiens
MDKRVKKLPLMALSTTMAESFKELDPDSSMGKALEMSCAIQNQLARILAEFEMTLERDVLQPLSRLSEEELPAILKHKKSLQKLVSDWNTLKSRLSQATKNSGSSQGLGGSPGSHSHTTMANKVETLKEEEEELKRKVEQCRDEYLADLYHFVTKEDSYANYFIRLLEIQADYHRRSLSSLDTALAELRENHGQADHSPSMTATHFPRVYGVSLATHLQELGREIALPIEACVMMLLSEGMKEEGLFRLAAGASVLKRLKQTMASDPHSLEEFCSDPHAVAGALKSYLRELPEPLMTFDLYDDWMRAASLKEPGARLQALQEVCSRLPPENLSNLRYLMKFLARLAEEQEVNKMTPSNIAIVLGPNLLWPPEKEGDQAQLDAASVSSIQVVGVVEALIQSADTLFPGDINFNVSGLFSAVTLQDTVSDRLASEELPSTAVPTPATTPAPAPAPAPAPAPALASAATKERTESEVPPRPASPKVTRSPPETAAPVEDMARRSTGSLAAAVETASGRQALVVGKPSPYMFECITENFSIDPARTLMVGDRLETDILFGHRCGMTTVLTLTGVSRLEEAQAYLAAGQHDLVPHYYVESIADLTEGLED

SEQ ID NO: 11166 - protein, 396 aa, Homo sapiens
MKTLLLLLLVLLELGEAQGSLHRVPLRRHPSLKKKLRARSQLSEFWKSHNLDMIQFTESCSMDQSAKEPLINYLDMEYFGTISIGSPPQNFTVIFDTGSSNLWVPSVYCTSPACKTHSRFQPSQSSTYSQPGQSFSIQYGTGSLSGIIGADQVSVEGLTVVGQQFGESVTEPGQTFVDAEFDGILGLGYPSLAVGGVTPVFDNMMAQNLVDLPMFSVYMSSNPEGGAGSELIFGGYDHSHFSGSLNWVPVTKQAYWQIALDNIQVGGTVMFCSEGCQAIVDTGTSLITGPSDKIKQLQNAIGAAPVDGEYAVECANLNVMPDVTFTINGVPYTLSPTAYTLLDFVDGMQFCSSGFQGLDIHPPAGPLWILGDVFIRQFYSVFDRGNNRVGLAPAVP

SEQ ID NO: 11167 - protein, 363 aa, Homo sapiens
MKTLLLLLLVLLELGEAQGSLHRVPLRRHPSLKKKLRARSQLSEFWKSHNLDMIQFTESCSMDQSAKEPLINYLDMEYFGTISIGSPPQNFTVIFDTGSSNLWVPSVYCTSPACKTHSRFQPSQSSTYSQPGQSFSIQYGTGSLSGIIGADQVSVEGLTVVGQQFGESVTEPGQTFVDAEFDGILGLGYPSLAVGGVTPVFDNMMAQNLVDLPMFSVYMSSNPEGGAGSELIFGGYDHSHFSGSLNWVPVTKQAYWQIALDNMLWSVPTLTSCRMSPSPLTESPIPSAQLPTPYWTSWMECSSAAVAFKDLTSTLQLGPSGSWGMSSFDSFTQSLTVGITVWDWPQQSPKEGPCVCACLSDRP

SEQ ID NO: 11168 - protein, 401 aa, Homo sapiens
MKTLLLLLLVLLELGEAQGSLHRVPLRRHPSLKKKLRARSQLSEFWKSHNLDMIQFTESCSMDQSAKEPLINYLDMEYFGTISIGSPPQNFTVIFDTGSSNLWVPSVYCTSPACKTHSRFQPSQSSTYSQPGQSFSIQYGTGSLSGIIGADQVSAFATQVEGLTVVGQQFGESVTEPGQTFVDAEFDGILGLGYPSLAVGGVTPVFDNMMAQNLVDLPMFSVYMSSNPEGGAGSELIFGGYDHSHFSGSLNWVPVTKQAYWQIALDNIQVGGTVMFCSEGCQAIVDTGTSLITGPSDKIKQLQNAIGAAPVDGEYAVECANLNVMPDVTFTINGVPYTLSPTAYTLLDFVDGMQFCSSGFQGLDIHPPAGPLWILGDVFIRQFYSVFDRGNNRVGLAPAVP

SEQ ID NO: 11169 - protein, 169 aa, Homo sapiens
MPPTRDPFQQPTLDNDDSYLGELRASKKLPYKNPTHLAQQQEPWSRLNSTPTITSMRRDAYYFDPEIPKDDLDFRLAALYNHHTGTFKNKSEILLNQKTTQDTYRTKIQFPGEFLTPPTPPITFLANIRHWINPKKESIHSIQGSIVSPHTAATNGGYSRKKDGGFFST

SEQ ID NO: 11170 - protein, 157 aa, Homo sapiens
MERSPSRRRRLEEAPKLPYKNPTHLAQQQEPWSRLNSTPTITSMRRDAYYFDPEIPKDDLDFRLAALYNHHTGTFKNKSEILLNQKTTQDTYRTKIQFPGEFLTPPTPPITFLANIRHWINPKKESIHSIQGSIVSPHTAATNGGYSRKKDGGFFST

SEQ ID NO: 11171 - protein, 186 aa, Homo sapiens
MNQAFWKTYKSKVLQTLSGESEEDLAEERENPALVGSETAEPTEETFNPMSQLARRVQGVGVKGWLTMSSLFNKEDEDKLLPSEPCADHPLAARPPSQAAAAAEARGPGFWDAFASRWQQQQAAAASMLRGTEPTPEPDPEPADEAAEEAAERPESQEAEPVAGFKWGFLTHKLAEMRVKAAPKGD

SEQ ID NO: 11172 - protein, 593 aa, Homo sapiens
MAAASSSDSDACGAESNEANSKWLDAHYDPMANIHTFSACLALADLHGDGEYKLVVGDLGPGGQQPRLKVLKGPLVMTESPLPALPAAAATFLMEQHEPRTPALALASGPCVYVYKNLRPYFKFSLPQLPPNPLEQDLWNQAKEDRIDPLTLKEMLESIRETAEEPLSIQSLRFLQLELSEMEAFVNQHKSNSIKRQTVITTMTTLKKNLADEDAVSCLVLGTENKELLVLDPEAFTILAKMSLPSVPVFLEVSGQFDVEFRLAAACRNGNIYILRRDSKHPKYCIELSAQPVGLIRVHKVLVVGSTQDSLHGFTHKGKKLWTVQMPAAILTMNLLEQHSRGLQAVMAGLANGEVRIYRDKALLNVIHTPDAVTSLCFGRYGREDNTLIMTTRGGGLIIKILKRTAVFVEGGSEVGPPPAQAMKLNVPRKTRLYVDQTLREREAGTAMHRAFQTDLYLLRLRAARAYLQALESSLSPLSTTAREPLKLHAVVQGLGPTFKLTLHLQNTSTTRPVLGLLVCFLYNEALYSLPRAFFKVPLLVPGLNYPLETFVESLSNKGISDIIKVLVLREGQSAPLLSAHVNMPGSEGLAAA

SEQ ID NO: 11173 - protein, 630 aa, Homo sapiens
MDPSWRRSSHSWPQPMPDSGRAPVRPHLAKLEEDVWPCPQFHQTKAASGPPFVNEANSKWLDAHYDPMANIHTFSACLALADLHGDGEYKLVVGDLGPGGQQPRLKVLKGPLVMTESPLPALPAAAATFLMEQHEPRTPALALASGPCVYVYKNLRPYFKFSLPQLPPNPLEQDLWNQAKEDRIDPLTLKEMLESIRETAEEPLSIQSLRFLQLELSEMEAFVNQHKSNSIKRQTVITTMTTLKKNLADEDAVSCLVLGTENKELLVLDPEAFTILAKMSLPSVPVFLEVSGQFDVEFRLAAACRNGNIYILRRDSKHPKYCIELSAQPVGLIRVHKVLVVGSTQDSLHGFTHKGKKLWTVQMPAAILTMNLLEQHSRGLQAVMAGLANGEVRIYRDKALLNVIHTPDAVTSLCFGRYGREDNTLIMTTRGGGLIIKILKRTAVFVEGGSEVGPPPAQAMKLNVPRKTRLYVDQTLREREAGTAMHRAFQTDLYLLRLRAARAYLQALESSLSPLSTTAREPLKLHAVVQGLGPTFKLTLHLQNTSTTRPVLGLLVCFLYNEALYSLPRAFFKVPLLVPGLNYPLETFVESLSNKGISDIIKVLVLREGQSAPLLSAHVNMPGSEGLAAA

SEQ ID NO: 11174 - protein, 446 aa, Homo sapiens
MAAASSSDSDACGAESNEANSKWLDAHYDPMANIHTFSACLALADLHGDGEYKLVVGDLGPGGQQPRLKVLKGPLVMTESPLPALPAAAATFLMEQHEPRTPALALASGPCVYVYKNLRPYFKFSLPQLPPNPLEQDLWNQAKEDRIDPLTLKEMLESIRETAEEPLSIQSLRFLQLELSEMEAFVNQHKSNSIKRQTVITTMTTLKKNLADEDAVSCLVLGTENKELLVLDPEAFTILAKDAVTSLCFGRYGREDNTLIMTTRGGGLIIKILKRTAVFVEGGSEVGPPPAQAMKLNVPRKTRLYVDQTLREREAGTAMHRAFQTDLYLLRLRAARAYLQALESSLSPLSTTAREPLKLHAVVQGLGPTFKLTLHLQNTSTTRPVLGLLVCFLYNEALYSLPRAFFKVPLLVPGLNYPLETFVESLSNKGISDIIKVGPALVPRGR

SEQ ID NO: 11175 - protein, 588 aa, Homo sapiens
MKLEFTEKNYNSFVLQNLNRQRKRKEYWDMALSVDNHVFFAHRNVLAAVSPLVRSLISSNDMKTADELFITIDTSYLSPVTVDQLLDYFYSGKVVISEQNVEELLRGAQYFNTPRLRVHCNDFLIKSICRANCLRYLFLAELFELKEVSDVAYSGIRDNFHYWASPEGSMHFMRCPPVIFGRLLRDENLHVLNEDQALSALINWVYFRKEDREKYFKKFFNYINLNAVSNKTLVFASNKLVGMENTSSHTTLIESVLMDRKQERPCSLLVYQRKGALLDSVVILGGQKAHGQFNDGVFAYIIQENLWMKLSDMPYRAAALSATSAGRYIYISGGTTEQISGLKTAWRYDMDDNSWTKLPDLPIGLVFHTMVTCGGTVYSVGGSIAPRRYVSNIYRYDERKEVWCLAGKMSIPMDGTAVITKGDRHLYIVTGRCLVKGYISRVGVVDCFDTSTGDVVQCITFPIEFNHRPLLSFQQDNILCVHSHRQSVEINLQKVKASKTTTSVPVLPNSCPLDVSHAICSIGDSKVFVCGGVTTASDVQTKDYTINPNAFLLDQKTGKWKTLAPPPEALDCPACCLAKLPCKILQRI

SEQ ID NO: 11176 - protein, 509 aa, Homo sapiens
MNENKDTDSKKSEEYEDDFEKDLEWLINENEKSDASIIEMACEKEENINQDLKENETVMEHTKRHSDPDKSLQDEVSPRRNDIISVPGIQPLDPISDSDSENSFQESKLESQKDLEEEEDEEVRRYIMEKIVQANKLLQNQEPVNDKRERKLKFKDQLVDLEVPPLEDTTTFKNYFENERNMFGKLSQLCISNDFGQEDVLLSLTNGSCEENKDRTILVERDGKFELLNLQDIASQGFLPPINNANSTENDPQQLLPRSSNSSVSGTKKEDSTAKIHAVTHSSTGEPLAYIAQPPLNRKTCPSSAVNSDRSKGNGKSNHRTQSAHISPVTSTYCLSPRQKELQKQLEEKREKLKREEERRKIEEEKEKKRENDIVFKAWLQKKREQVLEMRRIQRAKEIEDMNSRQENRDPQQAFRLWLKKKHEEQMKERQTEELRKQEECLFFLKGTEGRERAFKQWLRRKRMEKMAEQQAVRERTRQLRLEAKRSKQLQHHLYMSEAKPFRFTDHYN

SEQ ID NO: 11177 - protein, 418 aa, Homo sapiens
MNENKDTDSKKSEEYEDDFEKDLEWLINENEKSDASIIEMACEKEENINQDLKENETVMEHTKRHSDPDKSLQDEVSPRRNDIISVPGIQPLDPISDSDSENSFQESKLESQKDLEEEEDEEVRRYIMEKIVQANKLLQNQEPVNDKRERKLKFKDQLVDLEVPPLEDTTTFKNYFENERNMFGKLSQLCISNDFGQEDVLLSLTNGSCEENKDRTILVERDGKFELLNLQDIASQGFLPPINNANSTENDPQQLLPRSSNSSVSGTKKEDSTAKIHAVTHSSTGEPLAYIAQPPLNRKTCPSSAVNSDRSKGNGKSNHRTQSAHISPVTSTYCLSPRQKELQKQLEEKREKLKREEERRKIEEEKEKKRENDIVFKAWLQKKREQVLEMRRIQRAKEIEDMNSRVSKTSLKNKFIQI

SEQ ID NO: 11178 - protein, 508 aa, Homo sapiens
MNENKDTDSKKSEEYEDDFEKDLEWLINENEKSDASIIEMACEKEENINQDLKENETVMEHTKRHSDPDKSLQDEVSPRRNDIISVPGIQPLDPISDSDSENSFQESKLESQKDLEEEEDEEVRRYIMEKIVQANKLLQNQEPVNDKRERKLKFKDQLVDLEVPPLEDTTTFKNYFENERNMFGKLSQLCISNDFGQEDVLLSLTNGSCEENKDRTILVERDGKFELLNLQDIASQGFLPPINNANSTENDPQQLLPRSSNSSVSGTKKEDSTAKIHAVTHSSTGEPLAYIAQPPLNRKTCPSSAVNSDRSKGNGKSNHRTQSAHISPVTSTYCLSPRQKELQKQLEEKREKLKREEERRKIEEEKEKKRENDIVFKAWLQKKREQVLEMRRIQRAKEIEDMNSRENRDPQQAFRLWLKKKHEEQMKERQTEELRKQEECLFFLKGTEGRERAFKQWLRRKRMEKMAEQQAVRERTRQLRLEAKRSKQLQHHLYMSEAKPFRFTDHYN

SEQ ID NO: 11179 - protein, 328 aa, Homo sapiens
MGAAARLSAPRALVLWAALGAAAHIGPAPDPEDWWSYKDNLQGNFVPGPPFWGLVNAAWSLCAVGKRQSPVDVELKRVLYDPFLPPLRLSTGGEKLRGTLYNTGRHVSFLPAPRPVVNVSGGPLLYSHRLSELRLLFGARDGAGSEHQINHQGFSAEVQLIHFNQELYGNFSAASRGPNGLAILSLFVNVASTSNPFLSRLLNRDTITRISYKNDAYFLQDLSLELLFPESFGFITYQGSLSTPPCSETVTWILIDRALNITSLQMHSLRLLSQNPPSQIFQSLSGNSRPLQPLAHRALRGNRDPRHPERRCRGPNYRLHVDGVPHGR

SEQ ID NO: 11180 - protein, 793 aa, Homo sapiens
MALSPWTPGLGAGEKLVQAAAVSTGPSLELCTLPSTLGSSVAVEALEQLFVVEQSLQSDYFKCNEEAKIFLKDIAVAVKKLEEMRKATIDLLEIESMELNKLYYLLETLPNSIKRELEECVRDARRLNLFEINTIKMRITRTENEIELLKKKITDLTKYNEALGEKQEELARKHARFVLSLNQTMEKKATTTVYINETYTKINLKREDIALQKKCIQEAEELMEKERAEYLIRKQELTAQINEFENTREVKRMETYQKKKELDKLQTKMSKIKETVTVSAAVLSDHNLEIARLHESIRYWEQEVSELKKDLAILEAKLCFFTDNKEKLDDISNDEKNEFLNKIKQLVETLHAARMEYKDLREKMKTLARQYKIVLSEEEKAFLQKQKIHDENQKQLTFISQKEYFLSQKRVDIKNMEEGLITLQELQQATKTVYQQQIKILSANLERESQRCVITQWKMACLRKKHARWTAKIKAEIQAITEKIQNAEVRRIELLNETSFRQQEISGFVAQIEKLTTELKEEEKAFVNKEKMLMKELSKYEEIFVKETQINKEKEEELVEYLPQLQVAEQEYKEKRRKLEELSNIITAQRQEEDLLNNHIFLFTRDFSRYISNMEDVKQELQQLRDQESKKNKDHFETLKNLENGFYINDQKADLLLLENKKLKEYILYLKNNIEKYREGQEALMHTSSDLSRQLIAQEAQYKDLWAEFQTTVKILVDNGEETLQDINNLTDKLRERDEKMQHVSTWLRGSLEGLRLLVEQESPMDLLKKKKHIRTRVHFPVVKCTEKNTLTK

SEQ ID NO: 11181 - protein, 386 aa, Homo sapiens
MKDCSNGCSAECTGEGGSKEVVGTFKAKDLIVTPATILKEKPDPNNLVFGTVFTDHMLTVEWSSEFGWEKPHIKPLQNLSLHPGSSALHYAVELFEGLKAFRGVDNKIRLFQPNLNMDRMYRSAVRATLPVFDKEELLECIQQLVKLDQEWVPYSTSASLYIRPTFIGTEPSLGVKKPTKALLFVLLSPVGPYFSSGTFNPVSLWANPKYVRAWKGGTGDCKMGGNYGSSLFAQCEAVDNGCQQVLWLYGEDHQITEVGTMNLFLYWINEDGEEELATPPLDGIILPGVTRRCILDLAHQWGEFKVSERYLTMDDLTTALEGNRVREMFGSGTACVVCPVSDILYKGETIHIPTMENGPKLASRILSKLTDIQYGREESDWTIVLS

SEQ ID NO: 11182 - protein, 325 aa, Homo sapiens
MKAKDLIVTPATILKEKPDPNNLVFGTVFTDHMLTVEWSSEFGWEKPHIKPLQNLSLHPGSSALHYAVEVFDKEELLECIQQLVKLDQEWVPYSTSASLYIRPTFIGTEPSLGVKKPTKALLFVLLSPVGPYFSSGTFNPVSLWANPKYVRAWKGGTGDCKMGGNYGSSLFAQCEAVDNGCQQVLWLYGEDHQITEVGTMNLFLYWINEDGEEELATPPLDGIILPGVTRRCILDLAHQWGEFKVSERYLTMDDLTTALEGNRVREMFGSGTACVVCPVSDILYKGETIHIPTMENGPKLASRILSKLTDIQYGREESDWTIVLS

SEQ ID NO: 11183 - protein, 349 aa, Homo sapiens
MKDCSNGCSAECTGEGGSKEVVGTFKAKDLIVTPATILKEKPDPNNLVFGTVFTDHMLTVEWSSEFGWEKPHIKPLQNLSLHPGSSALHYAVEVFDKEELLECIQQLVKLDQEWVPYSTSASLYIRPTFIGTEPSLGVKKPTKALLFVLLSPVGPYFSSGTFNPVSLWANPKYVRAWKGGTGDCKMGGNYGSSLFAQCEAVDNGCQQVLWLYGEDHQITEVGTMNLFLYWINEDGEEELATPPLDGIILPGVTRRCILDLAHQWGEFKVSERYLTMDDLTTALEGNRVREMFGSGTACVVCPVSDILYKGETIHIPTMENGPKLASRILSKLTDIQYGREESDWTIVLS

SEQ ID NO: 11184 - protein, 385 aa, Homo sapiens
MDCSNGCSAECTGEGGSKEVVGTFKAKDLIVTPATILKEKPDPNNLVFGTVFTDHMLTVEWSSEFGWEKPHIKPLQNLSLHPGSSALHYAVELFEGLKAFRGVDNKIRLFQPNLNMDRMYRSAVRATLPVFDKEELLECIQQLVKLDQEWVPYSTSASLYIRPTFIGTEPSLGVKKPTKALLFVLLSPVGPYFSSGTFNPVSLWANPKYVRAWKGGTGDCKMGGNYGSSLFAQCEAVDNGCQQVLWLYGEDHQITEVGTMNLFLYWINEDGEEELATPPLDGIILPGVTRRCILDLAHQWGEFKVSERYLTMDDLTTALEGNRVREMFGSGTACVVCPVSDILYKGETIHIPTMENGPKLASRILSKLTDIQYGREESDWTIVLS

SEQ ID NO: 11185 - protein, 398 aa, Homo sapiens
MASPLRSAAALARQDCSNGCSAECTGEGGSKEVVGTFKAKDLIVTPATILKEKPDPNNLVFGTVFTDHMLTVEWSSEFGWEKPHIKPLQNLSLHPGSSALHYAVELFEGLKAFRGVDNKIRLFQPNLNMDRMYRSAVRATLPVFDKEELLECIQQLVKLDQEWVPYSTSASLYIRPTFIGTEPSLGVKKPTKALLFVLLSPVGPYFSSGTFNPVSLWANPKYVRAWKGGTGDCKMGGNYGSSLFAQCEAVDNGCQQVLWLYGEDHQITEVGTMNLFLYWINEDGEEELATPPLDGIILPGVTRRCILDLAHQWGEFKVSERYLTMDDLTTALEGNRVREMFGSGTACVVCPVSDILYKGETIHIPTMENGPKLASRILSKLTDIQYGREESDWTIVLS

SEQ ID NO: 11186 - protein, 194 aa, Homo sapiens
MEDGLLEIMTKDGGDMPAPLEVSTVPAVGDVISGEYNGGMKELMEHLKAQLQALFEDVRAMRGALDEQASHIQVLSDDVCANQRAIVSMCQIMTTAPRQGGLGVVGGKGSFQSDPQEPETPSPGIGDSGLLGRDPEDEEEEEEEKEMPSPATPSSHCERPESPCAGLLGGDGPLVEPLDMPDITLLQLEGEASL

SEQ ID NO: 11187 - protein, 1371 aa, Homo sapiens
MTEESSDVPRELIESIKDVIGRKIKISVKKKVKLEVKGDKVENKVLVLTSCRAFLVTARIPTKLELTFSYLEIHGVVCSKSAQMIVETEKCSISMKMASPEDVSEVLAHIGTCLRKIFPGLSPVRIMKKVSMEPSERLASLQALWDSQTVAEQGPCGGFSQMYACVCDWLGFSYREEVQWDVDTIYLTQDTRELNLQDFSHLDHRDLIPIIAALEYNQWFTKLSSKDLKLSTDVCEQILRVVSRSNRLEELVLENAGLRTDFAQKLASALAHNPNSGLHTINLAGNPLEDRGVSSLSIQFAKLPKGLKHLNLSKTSLSPKGVNSLSQSLSANPLTASTLVHLDLSGNVLRGDDLSHMYNFLAQPNAIVHLDLSNTECSLDMVCGALLRGCLQYLAVLNLSRTVFSHRKGKEVPPSFKQFFSSSLALMHINLSGTKLSPEPLKALLLGLACNHNLKGVSLDLSNCELRSGGAQVLEGCIAEIHNITSLDISDNGLESDLSTLIVWLSKNRSIQHLALGKNFNNMKSKNLTPVLDNLVQMIQDEESPLQSLSLADSKLKTEVTIIINALGSNTSLTKVDISGNGMGDMGAKMLAKALQINTKLRTVIWDKNNITAQGFQDIAVAMEKNYTLRFMPIPMYDASQALKTNPEKTEDALQKIENYLLRNHETRKYLQEQAYRLQQGIVTSTTQQMIDRICVKVQDHLNSLRNCGGDAIQEDLKSAERLMRDAKNSKTLLPNLYHVGGASWAGASGLLSSPIQETLESMAGEVTRVVDEQLKALLESMVDAAENLCPNVMKKAHIRQDLIHASTEKISIPRTFVKNVLLEQSGIDILNKISEVKLTVASFLSDRIVDEILDALSHCHHKLADHFSRRGKTLPQQESLEIELAEEKPVKRSIITVEELTEIERLEDLDTCMMTPKSKRKSIHSRMLRPVSRAFEMEFDLDKALEEVPIHIEDPPFPSLRQEKRSSGFISELPSEEGKKLEHFTKLRPKRNKKQQPTQAAVCAANIVSQDGEQNGLMGRVDEGVDEFFTKKVTKMDSKKWSTRGSESHELNEGGDEKKKRDSRKSSGFLNLIKSRSKSERPPTILMTEEPSSPKGAVRSPPVDCPRKDTKAAEHNGNSERIEEIKTPDSFEESQGEEIGKVERSDSKSSPQAGRRYGVQVMGSGLLAEMKAKQEKRAACAQKKLGNDAVSQDSSSPALSGVERSDGGGAVPKLHPGLPENRFGLGTPEKNTKAEPKAEAGSRSRSSSSTPTSPKPLLQSPKPSLAARPVIPQKPRTASRPDDIPDSPSSPKVALLPPVLKKVPSDKERDGQSSPQPSPRTFSQEVSRRSWGQQAQEYQEQKQRSSSKDGHQGSKSNDSGEEAEKEFIFV

SEQ ID NO: 11188 - protein, 1326 aa, Homo sapiens
MTEESSDVPRELIESIKDVIGRKIKISVKKKVKLEVKGDKVENKVLVLTSCRAFLVTARIPTKLELTFSYLEIHGVVCSKSAQMIVETEKCSISMKMASPEDVSEVLAHIGTCLRKIFPGLSPVRIMKKVSMEPSERLASLQALWDSQTVAEQGPCGGFSQMYACVCDWLGFSYREEVQWDVDTIYLTQDTRELNLQDFSHLDHRDLIPIIAALEYNQWFTKLSSKDLKLSTDVCEQILRVVSRSNRLEELVLENAGLRTDFAQKLASALAHNPNSGLHTINLAGNPLEDRGVSSLSIQFAKLPKGLKHLNLSKTSLSPKGVNSLSQSLSANPLTASTLVHLDLSGNVLRGDDLSHMYNFLAQPNAIVHLDLSNTECSLDMVCGALLRGCLQYLAVLNLSRTVFSHRKGKEVPPSFKQFFSSSLALMHINLSGTKLSPEPLKALLLGLACNHNLKGVSLDLSNCELRSGGAQVLEGCIAEIHNITSLDISDNGLESDLSTLIVWLSKNRSIQHLALGKNFNNMKSKNLTPVLDNLVQMIQDEESPLQSLSLADSKLKTEVTIIINALGSNTSLTKVDISGNGMGDMGAKMLAKALQINTKLRTVIWDKNNITAQGFQDIAVAMEKNYTLRFMPIPMYDASQALKTNPEKTEDALQKIENYLLRNHETRKYLQEQAYRLQQGIVTSTTQQMIDRICVKVQDHLNSLRNCGGDAIQEDLKSAERLMRDAKNSKTLLPNLYHVGGASWAGASGLLSSPIQETLESMAGEVTRVVDEQLKALLESMVDAAENLCPNVMKKAHIRQDLIHASTEKISIPRTFVKNVLLEQSGIDILNKISEVKLTVASFLSDRIVDEILDALSHCHHKLADHFSRRGKTLPQQESLEIELAEEKPVKRSIITVEELTEIERLEDLDTCMMTPKSKRKSIHSRMLRPVSRAFEMEFDLDKALEEVPIHIEDPPFPSLRQEKRSSGFISELPSEEGKKLEHFTKLRPKRNKKQQPTQAAVCAANIVSQDGEQNGLMGRVDEGVDEFFTKKVTKMDSKKWSTRGSESHELNEGGDEKKKRDSRKSSGFLNLIKSRSKSERPPTILMTEEPSSPKGAVRSPPVDCPRKDTKAAEHNGNSERIEEIKTPDSFEESQGEEIGKVERSDSKSSPQAGRRYGVQVMGSGLLAEMKAKQENRFGLGTPEKNTKAEPKAEAGSRSRSSSSTPTSPKPLLQSPKPSLAARPVIPQKPRTASRPDDIPDSPSSPKVALLPPVLKKVPSDKERDGQSSPQPSPRTFSQEVSRRSWGQQAQEYQEQKQRSSSKDGHQGSKSNDSGEEAEKEFIFV

SEQ ID NO: 11189 - protein, 499 aa, Homo sapiens
MTEESSDVPRELIESIKDVIGRKIKISVKKKVKLEVKGDKVENKVLVLTSCRAFLVTARIPTKLELTFSYLEIHGVVCSKSAQMIVETEKCSISMKMASPEDVSEVLAHIGTCLRKIFPGLSPVRIMKKVSMEPSERLASLQALWDSQTVAEQGPCGGFSQMYACVCDWLGFSYREEVQWDVDTIYLTQDTRELNLQDFSHLDHRDLIPIIAALEYNQWFTKLSSKDLKLSTDVCEQILRVVSRSNRLEELVLENAGLRTDFAQKLASALAHNPNSGLHTINLAGNPLEDRGVSSLSIQFAKLPKGLKHLNLSKTSLSPKGVNSLSQSLSANPLTASTLVHLDLSGNVLRGDDLSHMYNFLAQPNAIVHLDLSNTECSLDMVCGALLRGCLQYLAVLNLSRTVFSHRKGKEVPPSFKQFFSSSLALMHINLSGTKLSPEPLKALLLGLACNHNLKGVSLDLSNCELRSGGAQVLEGCIAEIHNITQLGTRYRNAVLRVY

SEQ ID NO: 11190 - protein, 176 aa, Homo sapiens
MYACVCDWLGFSYREEVQWDVDTIYLTQDTRELNLQDFSHLDHRDLIPIIAALEYNQWFTKLSSKDLKLSTDVCEQILRVVSRSNRLEELVLENAGLRTDFAQKLASALAHNPNSGLHTINLAGNPLEDRETTTKIKRQNVPTVLQTYLVVCPSDYQPCPLPLGKDNYYSDFSHDG

SEQ ID NO: 11191 - protein, 402 aa, Homo sapiens
MEGLKTLGPCGHPHPQCPPTPASSSHGGGLDQPCQGFVGWPCLGPISSAHSVQSQRPFPVPGAGGSGPTVEGEAPGLFLSSQEQRARDTEGPRQGDLEAGLGWGWPLHPGSNQGAPRQGGSIGSGTRPCPCPPLSREGGALASPRVALSQLQCGLLGSAEQSFLQLEQENHSLKRQNQELREQLGALLGPGQQFLPLCPEHSSCTALAWPPDPAGTQPLGNRAPLQLLRRELCQGQEAFVQQSQNELQQIRLCFERKKMVITEVWDNVAEMHMALNNQATGLLNLKKDIRGVLDQMEDIQLEILRERAQCRTRARKEKQMASMSKGRPKLGSSKGLAGQLWLLTLRLLLGALLVWTAAYVYVVNPTPFEGLVPPLLSRATVWKLRALLDPFLRLKVDGFLPF

SEQ ID NO: 11192 - protein, 68 aa, Homo sapiens
MRTSYLLLFTLCLLLSEMASGGNFLTGLGHRSDHYNCVSSGGQCLYSACPIFTKIQGTCYRGKAKCCK

SEQ ID NO: 11193 - protein, 376 aa, Homo sapiens
MALTAHPSCLLALLVAGLAQGIRGPLRAQDLGPQPLELKEAFKLFQIQFNRSYLSPEEHAHRLDIFAHNLAQAQRLQEEDLGTAEFGVTPFSDLTEEEFGQLYGYRRAAGGVPSMGREIRSEEPEESVPFSCDWRKVASAISPIKDQKNCNCCWAMAAAGNIETLWRISFWDFVDVSVQELLDCGRCGDGCHGGFVWDAFITVLNNSGLASEKDYPFQGKVRAHRCHPKKYQKVAWIQDFIMLQNNEHRIAQYLATYGPITVTINMKPLQLYRKGVIKATPTTCDPQLVDHSVLLVGFGSVKSEEGIWAETVSSQSQPQPPHPTPYWILKNSWGAQWGEKGYFRLHRGSNTCGITKFPLTARVQKPDMKPRVSCPP

SEQ ID NO: 11194 - protein, 297 aa, Homo sapiens
MTSGANSSGSYLPSEIRSSKIDDNYLKELNEDLKLRKQELLEMLKPLEDKNNLLFQKLMSNLEEKQRSLQIMRQIMAGKGCEESSVMELLKEAEEMKQNLERKNKMLRKEMEMLWNKTFEAEELSDQQKAPQTKNKADLQDGKAPKSPSSPRKTESELEKSFAEKVKEIRKEKQQRKMEWVKYQEQNNILQNDFHGKVIELRIEALKNYQKANDLKLSLYLQQNFEPMQAFLNLPGSQGTMGITTMDRVTTGRNEHHVRILGTKIYTEQQGTKGSQLDNTGGRLFFLRSLPDEALKN

SEQ ID NO: 11195 - protein, 143 aa, Homo sapiens
MAAMDTGQRADPSNPGDKEGDLQGLWQELYQLQAKQKKLKREVEKHKLFEDYLIKVLEKIPEGCTGWEEPEEVLVEATVKHYGKLFTASQDTQKRLEAFCQMIQAVHRSLESLEEDHRALIASRSGCVSCRRSATASRSSGGS

SEQ ID NO: 11196 - protein, 127 aa, Homo sapiens
MAAMDTGQRADPSNPGDKEGDLQGLWQELYQLQAKQKKLKREVEKHKLFEDYLIKVLEKIPEGCTGWEEPEEVLVEATVKHYGKLFTASQDTQKRLEAFCQMIQAVHRSLESLEEDHRALMLLSHNK

SEQ ID NO: 11197 - protein, 296 aa, Homo sapiens
MGLSHSKTHLRVIKVAPLQNKEVETPSAGRVDFAFNQNLEEKTSYSLARLQDQNKALEGQLPPLQENWYGRYSTASRDMYFDIPLEHRETSIIKRHPPQRLQKLEPIDLPRVITSGRLLSQREARTMHKAKQVLEKKMQTPMYTSENRQYLHKMQVLEMIRKRQEAQMELKKSLHGEARINKQSPRDHKAKKTLQSTPRNDDHDLLTMLPDEILNRGPGNSKNTEFLKHQAVNNYCPWKIGKMETWLHEQEAQGQLLWDSSSSDSDEQGKDEKKPRALVRTRTERIPLFDEFFDQE

SEQ ID NO: 11198 - protein, 168 aa, Homo sapiens
MGSAYHWEARRRQMALDRRRWLMAQQQQELQQKEQELKNHQEEEQQSEEKLQPHKKLNVPQPPVAKLWTSQEQPQPSQQQPSVQPPSQPPPQPSTLPQAQVWPGPQPPQPQPPPQPTQPSAQARCTQHTSKCNLQDSQRPGLMNPCQSSPIRNTGYSQLKSTNYIQQW

SEQ ID NO: 11199 - protein, 148 aa, Homo sapiens
MPGGDTTPEEAAAPSCAGYNPGLLLFRAQKAQGACVTSTEGAWPRRASALYGGRKMRCGESGAGPDPRSNSAEVSSSQPALASKSQSKWGPTSNNPRGALTTTEFEMAGNRSQNIKHKQTALIAIPMSSQTPRMLGRPRNQGQLYPQP

SEQ ID NO: 11200 - protein, 401 aa, Homo sapiens
MADPKYADLPGIARNEPDVYETSDLPEDDQAEFDAEELTSTSVEHIIVNPNAAYDKFKDKRVGTKGLDFSDRIGKTKRTGYESGEYEMLGEGLGVKETPQQKYQRLLHEVQELTTEVEKIKTTVKESATEEKLTPVLLAKQLAALKQQLVASHLEKLLGPDAAINLTDPDGALAKRLLLQLEATKNSKGGSGGKTTGTPPDSSLVTYELHSRPEQDKFSQAAKVAELEKRLTELETAVRCDQDAQNPLSAGLQGACLMETVELLQAKVSALDLAVLDQVEARLQSVLGKVNEIAKHKASVEDADTQSKVHQLYETIQRWSPIASTLPELVQRLVTIKQLHEQAMQFGQLLTHLDTTQQMIANSLKDNTTLLTQVQTTMRENLATVEGNFASIDERMKKLGK

SEQ ID NO: 11201 - protein, 406 aa, Homo sapiens
MADPKYADLPGIARNEPDVYETSDLPEDDQAEFDAFAQELEELTSTSVEHIIVNPNAAYDKFKDKRVGTKGLDFSDRIGKTKRTGYESGEYEMLGEGLGVKETPQQKYQRLLHEVQELTTEVEKIKTTVKESATEEKLTPVLLAKQLAALKQQLVASHLEKLLGPDAAINLTDPDGALAKRLLLQLEATKNSKGGSGGKTTGTPPDSSLVTYELHSRPEQDKFSQAAKVAELEKRLTELETAVRCDQDAQNPLSAGLQGACLMETVELLQAKVSALDLAVLDQVEARLQSVLGKVNEIAKHKASVEDADTQSKVHQLYETIQRWSPIASTLPELVQRLVTIKQLHEQAMQFGQLLTHLDTTQQMIANSLKDNTTLLTQVQTTMRENLATVEGNFASIDERMKKLGK

SEQ ID NO: 11202 - protein, 403 aa, Homo sapiens
MADPKYADLPGIARNEPDVYETSDLPEDDQAEFDAELEELTSTSVEHIIVNPNAAYDKFKDKRVGTKGLDFSDRIGKTKRTGYESGEYEMLGEGLGVKETPQQKYQRLLHEVQELTTEVEKIKTTVKESATEEKLTPVLLAKQLAALKQQLVASHLEKLLGPDAAINLTDPDGALAKRLLLQLEATKNSKGGSGGKTTGTPPDSSLVTYELHSRPEQDKFSQAAKVAELEKRLTELETAVRCDQDAQNPLSAGLQGACLMETVELLQAKVSALDLAVLDQVEARLQSVLGKVNEIAKHKASVEDADTQSKVHQLYETIQRWSPIASTLPELVQRLVTIKQLHEQAMQFGQLLTHLDTTQQMIANSLKDNTTLLTQVQTTMRENLATVEGNFASIDERMKKLGK

SEQ ID NO: 11203 - protein, 110 aa, Homo sapiens
MRFMTLLFLTALAGALVCAYDPEAASAPGSGNPCHEASAAQKENAGEDPGLARQAPKPRKQRSSLLEKGLDGAKKAVGGLGKLGKDAVEDLESVGKGAVHDVKDVLDSVL

SEQ ID NO: 11204 - protein, 121 aa, Homo sapiens
MRFMTLLFLTALAGALVCAYDPEAASAPGSGNPCHEASAAQKENAGEDPGLARQAPKPRKQRSSLLEKGLDGAKKAVGGLGKLGKDAVEDLESVGKGGEERLVFGAPVNLTSIPLTSVSRP

SEQ ID NO: 11205 - protein, 77 aa, Homo sapiens
MRFMTLLFLTALAGALVCAYDPEAASAPGSGNHKQMDCLQLQKPPSETAKFLSSSTNLPRREKLVPSAKPPHTRGLV

SEQ ID NO: 11206 - protein, 186 aa, Homo sapiens
MAGLTDLQRLQARVEELERWVYGPGGARGSRKVADGLVKVQVALGNISSKRERVKILYKKIEDLIKYLDPEYIDRIAIPDASKLQFILAEEQFILSQVALLEQVNALVPMLDSAHIKAVPEHAARLQRLAQIHIQQQDQCVEITEESKALLEEYNKTTMLLSKQFVQWDELLCQLEAATQVKPAEE

SEQ ID NO: 11207 - protein, 176 aa, Homo sapiens
MAGLTDLQRLQARVEELERWVYGPGGARGSRKVADGLVKVQVALGNISSKRERVKILYKKIEDLIKYLDPEYIDRIAIPDASKLQFILAEEQFILSQVALLEQVNALVPMLDSAHIKAVPEHAARLQRLAQIHIQQQAPWGVGVRDEAGSLVEDVGFAQFLSVLHFGPTGPVCGNH

SEQ ID NO: 11208 - protein, 158 aa, Homo sapiens
MAGLTDLQRLQARVEELERWVYGPGGARGSRKVADGLVKVQVALGNISSKRERVKILYKKIEDLIKYLDPEYIDRIAIPDASKLQFILAAVPEHAARLQRLAQIHIQQQDQCVEITEESKALLEEYNKTTMLLSKQFVQWDELLCQLEAATQVKPAEE

SEQ ID NO: 11209 - protein, 460 aa, Homo sapiens
MASLLQSDRVLYLVQGEKKVRAPLSQLYFCRYCSELRSLECVSHEVDSHYCPSCLENMPSAEAKLKKNRCANCFDCPGCMHTLSTRATSISTQLPDDPAKTTMKKAYYLACGFCRWTSRDVGMADKSVASGGWQEPENPHTQRMNKLIEYYQQLAQKEKVERDRKKLARRRNYMPLAFSDKYGLGTRLQRPRAGASISTLAGLSLKEGEDQKEIKIEPAQAVDEVEPLPEDYYTRPVNLTEVTTLQQRLLQPDFQPVCASQLYPRHKHLLIKRSLRCRKCEHNLSKPEFNPTSIKFKIQLVAVNYIPEVRIMSIPNLRYMKESQVLLTLTNPVENLTHVTLFECEEGDPDDINSTAKVVVPPKELVLAGKDAAAEYDELAEPQDFQDDPDIIAFRKANKVGIFIKVTPQREEGEVTVCFKMKHDFKNLAAPIRPIEESDQGTEVIWLTQHVELSLGPLLP

SEQ ID NO: 11210 - protein, 403 aa, Homo sapiens
MPSAEAKLKKNRCANCFDCPGCMHTLSTRATSISTQLPDDPAKTTMKKAYYLACGFCRWTSRDVGMADKSVASGGWQEPENPHTQRMNKLIEYYQQLAQKEKVERDRKKLARRRNYMPLAFSDKYGLGTRLQRPRAGASISTLAGLSLKEGEDQKEIKIEPAQAVDEVEPLPEDYYTRPVNLTEVTTLQQRLLQPDFQPVCASQLYPRHKHLLIKRSLRCRKCEHNLSKPEFNPTSIKFKIQLVAVNYIPEVRIMSIPNLRYMKESQVLLTLTNPVENLTHVTLFECEEGDPDDINSTAKVVVPPKELVLAGKDAAAEYDELAEPQDFQDDPDIIAFRKANKVGIFIKVTPQREEGEVTVCFKMKHDFKNLAAPIRPIEESDQGTEVIWLTQHVELSLGPLLP

SEQ ID NO: 11211 - protein, 467 aa, Homo sapiens
MASLLQSDRVLYLVQGEKKVRAPLSQLYFCRYCSELRSLECVSHEVDSHYCPSCLENMPSAEAKLKKNRCANCFDCPGCMHTLSTRATSISTQLPDDPAKTTMKKAYYLACGFCRWTSRDVGMADKSVASGGWQEPENPHTQRMNKLIEYYQQLAQKEKVERDRKKLARRRNYMPLAFSQHTIHVVDKYGLGTRLQRPRAGASISTLAGLSLKEGEDQKEIKIEPAQAVDEVEPLPEDYYTRPVNLTEVTTLQQRLLQPDFQPVCASQLYPRHKHLLIKRSLRCRKCEHNLSKPEFNPTSIKFKIQLVAVNYIPEVRIMSIPNLRYMKESQVLLTLTNPVENLTHVTLFECEEGDPDDINSTAKVVVPPKELVLAGKDAAAEYDELAEPQDFQDDPDIIAFRKANKVGIFIKVTPQREEGEVTVCFKMKHDFKNLAAPIRPIEESDQGTEVIWLTQHVELSLGPLLP

SEQ ID NO: 11212 - protein, 182 aa, Homo sapiens
MELGELLYNKSEYIETASGNKVSRQSVLCGSQNIVLNGKTIVMNDCIIRGDLANVRVGRHCVVKSRSVIRPPFKKFSKGVAFFPLHIGDHVFIEEDCVVNAAQIGSYVHVGKNCVIGRRCVLKDCCKILDNTVLPPETVVPPFTVFSGCPGLFSGELPECTQELMIDVTKSYYQKFLPLTQV

SEQ ID NO: 11213 - protein, 152 aa, Homo sapiens
MELGELLYNKSEYIETASGNKVSRQSVLCGSQNIVLNGKTIVMNDCIIRGDLANVRVGRHCVVKSRSVIRPPFKKFSKGVAFFPLHIGDHVFIEEDCVVNAAQIGSYVHVGKNCVIGRRCVLKDCCKILDNTVLPPETVVPPFTVFSGCPAP

SEQ ID NO: 11214 - protein, 84 aa, Homo sapiens
MELGELLYNKSEYIETASGNKVSRQSVLCGSQNIVLNGKNFVISVFLSPYIRCHSACRDRKRSDESVRLSVNNREWWGLVNWRM

SEQ ID NO: 11215 - protein, 178 aa, Homo sapiens
MSGGKYVDSEGHLYTVPIREQGNIYKPNNKAMADELSEKQVYDAHTKEIDLVNRDPKHLNDDVVKIDFEDVIAEPEGTHSFDGIWKASFTTFTVTKYWFYRLLSALFGIPMALIWGIYFAILSFLHIWAVVPCIKSFLIEIQCISRVYSIYVHTVCDPLFEAVGKIFSNVRINLQKEI

SEQ ID NO: 11216 - protein, 147 aa, Homo sapiens
MADELSEKQVYDAHTKEIDLVNRDPKHLNDDVVKIDFEDVIAEPEGTHSFDGIWKASFTTFTVTKYWFYRLLSALFGIPMALIWGIYFAILSFLHIWAVVPCIKSFLIEIQCISRVYSIYVHTVCDPLFEAVGKIFSNVRINLQKEI

SEQ ID NO: 11217 - protein, 553 aa, Homo sapiens
MSKAAGGAAAAAAAAESCSPAPAGSSAAPPAPVEDLSKVSDEELLQWSKEELIRSLRRAEAEKVSAMLDHSNLIREVNRRLQLHLGEIRGLKDINQKLQEDNQELRDLCCFLDDDRQKGKRVSREWQRLGRYTAGVMHKEVALYLQKLKDLEVKQEEVVKENMELKELCVLLDEEKGAGCAGSRCSIDSQASLCQLTASTAPYVRDVGDGSSTSSTGSTDSPDHHKHHASSGSPEHLQKPRSEGSPEHSKHRSASPEHPQKPRACGTPDRPKALKGPSPEHHKPLCKGSPEQQRHPHPGSSPETLPKHVLSGSPEHFQKHRSGSSPEHARHSGGSPEHLQKHALGGSLEHLPRARGTSPEHLKQHYGGSPDHKHGGGSGGSGGSGGGSREGTLRRQAQEDGSPHHRNVYSGMNESTLSYVRQLEARVRQLEEENRMLPQASQNRRQPPTRNSSNMEKGWGSRARRVLQWWQGCRGIGRCLPTLPGSFRLSSGADGSNSSPNSAASFSGHATPSQQPEPVVHSLKVVWRKLGDAAGSCPGIRQHLSGNQYKGPM

SEQ ID NO: 11218 - protein, 190 aa, Homo sapiens
MAEKTQKSVKIAPGAVVCVESEIRGDVTIGPRTVIHPKARIIAEAGPIVIGEGNLIEEQALIINAYPDNITPDTEDPEPKPMIIGTNNVFEVGCYSQAMKMGDNNVIESKAYVGRNVILTSGCIIGACCNLNTFEVIPENTVIYGADCLRRVQTERPQPQTLQLDFLMKILPNYHHLKKTMKGSSTPVKN

SEQ ID NO: 11219 - protein, 170 aa, Homo sapiens
MSVAGGEIRGDTGGEDTAAPGRFSFSPEPTLEDIRRLHAEFAAERDWEQFHQPRNLLLALVGEVGELAELFQWKTDGEPGPQGWSPRERAALQEELSDVLIYLVALAARCRVDLPLAVLSKMDINRRRYPAHLARSSSRKYTELPHGAISEDQAVGPADIPCDSTGQTST

SEQ ID NO: 11220 - protein, 631 aa, Homo sapiens
MALRKELLKSIWYAFTALDVEKSGKVSKSQLKVLSHNLYTVLHIPHDPVALEEHFRDDDDGPVSSQGYMPYLNKYILDKVEEGAFVKEHFDELCWTLTAKKNYRADSNGNSMLSNQDAFRLWCLFNFLSEDKYPLIMVPDEVEYLLKKVLSSMSLEVSLGELEELLAQEAQVAQTTGGLSVWQFLELFNSGRCLRGVGRDTLSMAIHEVYQELIQDVLKQGYLWKRGHLRRNWAERWFQLQPSCLCYFGSEECKEKRGIIPLDAHCCVEVLPDRDGKRCMFCVKTANRTYEMSASDTRQRQEWTAAIQMAIRLQAEGKTSLHKDLKQKRREQREQRERRRAAKEEELLRLQQLQEEKERKLQELELLQEAQRQAERLLQEEEERRRSQHRELQQALEGQLREAEQARASMQAEMELKEEEAARQRQRIKELEEMQQRLQEALQLEVKARRDEESVRIAQTRLLEEEEEKLKQLMQLKEEQERYIERAQQEKEELQQEMAQQSRSLQQAQQQLEEVRQNRQRADEDVEAAQRKLRQASTNVKHWNVQMNRLMHPIEPGDKRPVTSSSFSGFQPPLLAHRDSSLKRLTRWGSQGNRTPSPNSNEQQKSLNGGDEAPAPASTPQEDKLDPAPEN

SEQ ID NO: 11221 - protein, 1489 aa, Homo sapiens
MGDAADPREMRKTFIVPAIKPFDHYDFSRAKIACNLAWLVAKAFGTENVPEELQEPFYTDQYDQEHIKPPVVNLLLSAELYCRAGSLILKSDAAKPLLGHDAVIQALAQKGLYVTDQEKLVTERDLHKKPIQMSAHLAMIDTLMMAYTVEMVSIEKVIACAQQYSAFFQATDLPYDIEDAVMYWINKVNEHLKDIMEQEQKLKEHHTVEAPGGQKSPSKWFWKLVPARYRKEQTLLKQLPCIPLVENLLKDGTDGCALAALIHFYCPDVVRLEDICLKETMSLADSLYNLQLIQEFCQEYLNQCCHFTLEDMLYAASSIKSNYLVFMAELFWWFEVVKPSFVQPRVVRPQGAEPVKDMPSIPVLNAAKRNVLDSSSDFPSSGEGATFTQSHHHLPSRYSRPQAHSSASGGIRRSSSMSYVDGFIGTWPKEKRSSVHGVSFDISFDKEDSVQRSTPNRGITRSISNEGLTLNNSHVSKHIRKNLSFKPINGEEEAESIEEELNIDSHSDLKSCVPLNTNELNSNENIHYKLPNGALQNRILLDEFGNQIETPSIEEALQIIHDTEKSPHTPQPDQIANGFFLHSQEMSILNSNIKLNQSSPDNVTDTKGALSPITDNTEVDTGIHVPSEDIPETMDEDSSLRDYTVSLDSDMDDASKFLQDYDIRTGNTREALSPCPSTVSTKSQPGSSASSSSGVKMTSFAEQKFRKLNHTDGKSSGSSSQKTTPEGSELNIPHVVAWAQIPEETGLPQGRDTTQLLASEMVHLRMKLEEKRRAIEAQKKKMEAAFTKQRQKMGRTAFLTVVKKKGDGISPLREEAAGAEDEKVYTDRAKEKESQKTDGQRSKSLADIKESMENPQAKWLKSPTTPIDPEKQWNLASPSEETLNEGEILEYTKSIEKLNSSLHFLQQEMQRLSLQQEMLMQMREQQSWVISPPQPSPQKQIRDFKPSKQAGLSSAIAPFSSDSPRPTHPSPQSSNRKSASFSVKSQRTPRPNELKITPLNRTLTPPRSVDSLPRLRRFSPSQVPIQTRSFVCFGDDGEPQLKESKPKEEVKKEELESKGTLEQRGHNPEEKEIKPFESTVSEVLSLPVTETVCLTPNEDQLNQPTEPPPKPVFPPTAPKNVNLIEVSLSDLKPPEKADVPVEKYDGESDKEQFDDDQKVCCGFFFKDDQKAENDMAMKRAALLEKRLRREKETQLRKQQLEAEMEHKKEETRRKTEEERQKKEDERARREFIRQEYMRRKQLKLMEDMDTVIKPRPQVVKQKKQRPKSIHRDHIESPKTPIKGPPVSSLSLASLNTGDNESVHSGKRTPRSESVEGFLSPSRCGSRNGEKDWENASTTSSVASGTEYTGPKLYKEPSAKSNKHIIQNALAHCCLAGKVNEGQKKKILEEMEKSDANNFLILFRDSGCQFRSLYTYCPETEEINKLTGIGPKSITKKMIEGLYKYNSDRKQFSHIPAKTLSASVDAITIHSHLWQTKRPVTPKKLLPTKA

SEQ ID NO: 11222 - protein, 1462 aa, Homo sapiens
MGDAADPREMRKTFIVPAIKPFDHYDFSRAKIACNLAWLVAKAFGTENVPEELQEPFYTDQYDQEHIKPPVVNLLLSAELYCRAGSLILKSDAAKPLLGHDAVIQALAQKGLYVTDQEKLVTERDLHKKPIQMSAHLAMIDTLMMAYTVEMVSIEKVIACAQQYSAFFQATDLPYDIEDAVMYWINKVNEHLKDIMEQEQKLKEHHTVEAPGGQKARYRKEQTLLKQLPCIPLVENLLKDGTDGCALAALIHFYCPDVVRLEDICLKETMSLADSLYNLQLIQEFCQEYLNQCCHFTLEDMLYAASSIKSNYLVFMAELFWWFEVVKPSFVQPRVVRPQGAEPVKDMPSIPVLNAAKRNVLDSSSDFPSRYSRPQAHSSASGGIRRSSSMSYVDGFIGTWPKEKRSSVHGVSFDISFDKEDSVQRSTPNRGITRSISNEGLTLNNSHVSKHIRKNLSFKPINGEEEAESIEEELNIDSHSDLKSCVPLNTNELNSNENIHYKLPNGALQNRILLDEFGNQIETPSIEEALQIIHDTEKSPHTPQPDQIANGFFLHSQEMSILNSNIKLNQSSPDNVTDTKGALSPITDNTEVDTGIHVPSEDIPETMDEDSSLRDYTVSLDSDMDDASKFLQDYDIRTGNTREALSPCPSTVSTKSQPGSSASSSSGVKMTSFAEQKFRKLNHTDGKSSGSSSQKTTPEGSELNIPHVVAWAQIPEETGLPQGRDTTQLLASEMVHLRMKLEEKRRAIEAQKKKMEAAFTKQRQKMGRTAFLTVVKKKGDGISPLREEAAGAEDEKVYTDRAKEKESQKTDGQRSKSLADIKESMENPQAKWLKSPTTPIDPEKQWNLASPSEETLNEGEILEYTKSIEKLNSSLHFLQQEMQRLSLQQEMLMQMREQQSWVISPPQPSPQKQIRDFKPSKQAGLSSAIAPFSSDSPRPTHPSPQSSNRKSASFSVKSQRTPRPNELKITPLNRTLTPPRSVDSLPRLRRFSPSQVPIQTRSFVCFGDDGEPQLKESKPKEEVKKEELESKGTLEQRGHNPEEKEIKPFESTVSEVLSLPVTETVCLTPNEDQLNQPTEPPPKPVFPPTAPKNVNLIEVSLSDLKPPEKADVPVEKYDGESDKEQFDDDQKVCCGFFFKDDQKAENDMAMKRAALLEKRLRREKETQLRKQQLEAEMEHKKEETRRKTEEERQKKEDERARREFIRQEYMRRKQLKLMEDMDTVIKPRPQVVKQKKQRPKSIHRDHIESPKTPIKGPPVSSLSLASLNTGDNESVHSGKRTPRSESVEGFLSPSRCGSRNGEKDWENASTTSSVASGTEYTGPKLYKEPSAKSNKHIIQNALAHCCLAGKVNEGQKKKILEEMEKSDANNFLILFRDSGCQFRSLYTYCPETEEINKLTGIGPKSITKKMIEGLYKYNSDRKQFSHIPAKTLSASVDAITIHSHLWQTKRPVTPKKLLPTKA

SEQ ID NO: 11223 - protein, 1478 aa, Homo sapiens
MGDAADPREMRKTFIVPAIKPFDHYDFSRAKIACNLAWLVAKAFGTENVPEELQEPFYTDQYDQEHIKPPVVNLLLSAELYCRAGSLILKSDAAKPLLGHDAVIQALAQKGLYVTDQEKLVTERDLHKKPIQMSAHLAMIDTLMMAYTVEMVSIEKVIACAQQYSAFFQATDLPYDIEDAVMYWINKVNEHLKDIMEQEQKLKEHHTVEAPGGQKARYRKEQTLLKQLPCIPLVENLLKDGTDGCALAALIHFYCPDVVRLEDICLKETMSLADSLYNLQLIQEFCQEYLNQCCHFTLEDMLYAASSIKSNYLVFMAELFWWFEVVKPSFVQPRVVRPQGAEPVKDMPSIPVLNAAKRNVLDSSSDFPSSGEGATFTQSHHHLPSRYSRPQAHSSASGGIRRSSSMSYVDGFIGTWPKEKRSSVHGVSFDISFDKEDSVQRSTPNRGITRSISNEGLTLNNSHVSKHIRKNLSFKPINGEEEAESIEEELNIDSHSDLKSCVPLNTNELNSNENIHYKLPNGALQNRILLDEFGNQIETPSIEEALQIIHDTEKSPHTPQPDQIANGFFLHSQEMSILNSNIKLNQSSPDNVTDTKGALSPITDNTEVDTGIHVPSEDIPETMDEDSSLRDYTVSLDSDMDDASKFLQDYDIRTGNTREALSPCPSTVSTKSQPGSSASSSSGVKMTSFAEQKFRKLNHTDGKSSGSSSQKTTPEGSELNIPHVVAWAQIPEETGLPQGRDTTQLLASEMVHLRMKLEEKRRAIEAQKKKMEAAFTKQRQKMGRTAFLTVVKKKGDGISPLREEAAGAEDEKVYTDRAKEKESQKTDGQRSKSLADIKESMENPQAKWLKSPTTPIDPEKQWNLASPSEETLNEGEILEYTKSIEKLNSSLHFLQQEMQRLSLQQEMLMQMREQQSWVISPPQPSPQKQIRDFKPSKQAGLSSAIAPFSSDSPRPTHPSPQSSNRKSASFSVKSQRTPRPNELKITPLNRTLTPPRSVDSLPRLRRFSPSQVPIQTRSFVCFGDDGEPQLKESKPKEEVKKEELESKGTLEQRGHNPEEKEIKPFESTVSEVLSLPVTETVCLTPNEDQLNQPTEPPPKPVFPPTAPKNVNLIEVSLSDLKPPEKADVPVEKYDGESDKEQFDDDQKVCCGFFFKDDQKAENDMAMKRAALLEKRLRREKETQLRKQQLEAEMEHKKEETRRKTEEERQKKEDERARREFIRQEYMRRKQLKLMEDMDTVIKPRPQVVKQKKQRPKSIHRDHIESPKTPIKGPPVSSLSLASLNTGDNESVHSGKRTPRSESVEGFLSPSRCGSRNGEKDWENASTTSSVASGTEYTGPKLYKEPSAKSNKHIIQNALAHCCLAGKVNEGQKKKILEEMEKSDANNFLILFRDSGCQFRSLYTYCPETEEINKLTGIGPKSITKKMIEGLYKYNSDRKQFSHIPAKTLSASVDAITIHSHLWQTKRPVTPKKLLPTKA

SEQ ID NO: 11224 - protein, 277 aa, Homo sapiens
MSDQQLDCALDLMRRLPPQQIEKNLSDLIDLVPSLCEDLLSSVDQPLKIARDKVVGKDYLLCDYNRDGDSYRSPWSNKYDPPLEDGAMPSARLRKLEVEANNAFDQYRDLYFEGGVSSVYLWDLDHGFAGVILIKKAGDGSKKIKGCWDSIHVVEVQEKSSGRTAHYKLTSTVMLWLQTNKSGSGTMNLGGSLTRQMEKDETVSDCSPHIANIGRLVEDMENKIRSTLNEIYFGKTKDIVNGLRSIDAIPDNQKFKQLQRELSQVLTQRQIYIQPDN

SEQ ID NO: 11225 - protein, 272 aa, Homo sapiens
MSDQQLDCALDLMRRLPPQQIEKNLSDLIDLVPSLCEDLLSSVDQPLKIARDKVVGKDYLLCDYNRDGDSYRSPWSNKYDPPLEDGAMPSARLRKLEVEANNAFDQYRDLYFEGGVSSVYLWDLDHGFAGVILIKKAGDGSKKIKGCWDSIHVVEVQEKSSGRTAHYKLTSTVMLWLQTNKSGSGTMNLGGSLTRQMEKDETVSDCSPHIANIGRLVEDMENKIRSTLNEIYFGKTKDIVNGLRSVQTFADKSKQEALKNDLVEALKRKQQC

SEQ ID NO: 11226 - protein, 512 aa, Homo sapiens
MAILSLRAPGPWQAMQVWADRTLLTPHTGVTSQVLGVAAAVMTPLPGGHAAGRTREARWDAMEYDEKLARFRQAHLNPFNKQSGPRQHEQGPGEEVPDVTPEEALPELPPGEPEFRCPERVMDLGLSEDHFSRPVGLFLASDVQQLRQAIEECKQVILELPEQSEKQKDAVVRLIHLRLKLQELKDPNEDEPNIRVLLEHRFYKEKSKSVKQTCDKCNTIIWGLIQTWYTCTGCYYRCHSKCLNLISKPCVSSKVSHQAEYELNICPETGLDSQDYRCAECRAPISLRGVPSEARQCDYTGQYYCSHCHWNDLAVIPARVVHNWDFEPRKVSRCSMRYLALMVSRPVLRLREINPLLFSYVEELVEIRKLRQDILLMKPYFITCREAMEARLLLQLQDRQHFVENDEMYSVQDLLDVHAGRLGCSLTEIHTLFAKHIKLDCERCQAKGFVCELCREGDVLFPFDSHTSVCADCSAVFHRDCYYDNSTTCPKCARLSLRKQSLFQEPGPDVEA

SEQ ID NO: 11227 - protein, 197 aa, Homo sapiens
MEYDEKLARFRQAHLNPFNKQSGPRQHEQGPGEEVPDVTPEEALPELPPGEPEFRCPERVMDLGLSEDHFSRPVGLFLASDVQQLRQAIEECKQVILELPEQSEKQKDAVVRLIHLRLKLQELKDPNEDEPNIRVLLEHRFYKEKSKSVKQTCDKCNTIIWGLIQTWYTCTGGPRPRRGVRNERDQSSCLRWAHIQM

SEQ ID NO: 11228 - protein, 441 aa, Homo sapiens
MEYDEKLARFRQAHLNPFNKQSGPRQHEQGPGEEVPDVTPEEALPELPPGEPEFRCPERVMDLGLSEDHFSRPVLRQAIEECKQVILELPEQSEKQKDAVVRLIHLRLKLQELKDPNEDEPNIRVLLEHRFYKEKSKSVKQTCDKCNTIIWGLIQTWYTCTGCYYRCHSKCLNLISKPCVSSKVSHQAEYELNICPETGLDSQDYRCAECRAPISLRGVPSEARQCDYTGQYYCSHCHWNDLAVIPARVVHNWDFEPRKVSRCSMRYLALMVSRPVLRLREINPLLFSYVEELVEIRKLRQDILLMKPYFITCREAMEARLLLQLQDRQHFVENDEMYSVQDLLDVHAGRLGCSLTEIHTLFAKHIKLDCERCQAKGFVCELCREGDVLFPFDSHTSVCADCSAVFHRDCYYDNSTTCPKCARLSLRKQSLFQEPGPDVEA

SEQ ID NO: 11229 - protein, 391 aa, Homo sapiens
MDLGLSEDHFSRPVGLFLASDVQQLRQAIEECKQVILELPEQSEKQKDAVVRLIHLRLKLQELKDPNEDEPNIRVLLEHRFYKEKSKSVKQTCDKCNTIIWGLIQTWYTCTGCYYRCHSKCLNLISKPCVSSKVSHQAEYELNICPETGLDSQDYRCAECRAPISLRGVPSEARQCDYTGQYYCSHCHWNDLAVIPARVVHNWDFEPRKVSRCSMRYLALMVSRPVLRLREINPLLFSYVEELVEIRKLRQDILLMKPYFITCREAMEARLLLQLQDRQHFVENDEMYSVQDLLDVHAGRLGCSLTEIHTLFAKHIKLDCERCQAKGFVCELCREGDVLFPFDSHTSVCADCSAVFHRDCYYDNSTTCPKCARLSLRKQSLFQEPGPDVEA

SEQ ID NO: 11230 - protein, 451 aa, Homo sapiens
MEYDEKLARFRQAHLNPFNKQSGPRQHEQGPGEEVPDVTPEEALPELPPGEPEFRCPERVMDLGLSEDHFSRPVGLFLASDVQQLRQAIEECKQVILELPEQSEKQKDAVVRLIHLRLKLQELKDPNEDEPNIRVLLEHRFYKEKSKSVKQTCDKCNTIIWGLIQTWYTCTGCYYRCHSKCLNLISKPCVSSKVSHQAEYELNICPETGLDSQDYRCAECRAPISLRGVPSEARQCDYTGQYYCSHCHWNDLAVIPARVVHNWDFEPRKVSRCSMRYLALMVSRPVLRLREINPLLFSYVEELVEIRKLRQDILLMKPYFITCREAMEARLLLQLQDRQHFVENDEMYSVQDLLDVHAGRLGCSLTEIHTLFAKHIKLDCERCQAKGFVCELCREGDVLFPFDSHTSVCADCSAVFHRDCYYDNSTTCPKCARLSLRKQSLFQEPGPDVEA

SEQ ID NO: 11231 - protein, 434 aa, Homo sapiens
MEYDEKLARFRQAHLNPFNKQSGPRQHEQGPGEEVPDVTPEEALPELPPGEPEFRCPERVMDLGLSEDHFSRPVGLFLASDVQQLRQAIEECKQVILELPEQSEKQKDAVVRLIHLRLKLQELKDPNEDEPNIRVLLEHRFYKEKSKSVKQTCDKCNTIIWGLIQTWYTCTGCYYRCHSKCLNLISKPCVSSKVSHQAEYELNICPETGLDSQDYRCAECRAPISLRGVPSEARQCDYTGQYYCSHCHWNDLAVIPARVVHNWDFEPRKVSRCSMRYLALMVSRPVLRLREINPLLFSYVEELVEIRKLRQDILLMKPYFITCREAMEARLLLQDLLDVHAGRLGCSLTEIHTLFAKHIKLDCERCQAKGFVCELCREGDVLFPFDSHTSVCADCSAVFHRDCYYDNSTTCPKCARLSLRKQSLFQEPGPDVEA

SEQ ID NO: 11232 - protein, 415 aa, Homo sapiens
MKLKSLLLRYYPPGIMLEYEKHGELKTKSIDLLDLGPSTDVSALVEEIQKAEPLLTASRTEQVKLLIQRLQEKLGQNSNHTFYLFKVLKAHILPLTNVALNKSGSCFITGSYDRTCKLWDTASGEELNTLEGHRNVVYAIAFNNPYGDKIATGSFDKTCKLWSVETGKCYHTFRGHTAEIVCLSFNPQSTLVATGSMDTTAKLWDIQNGEEVYTLRGHSAEIISLSFNTSGDRIITGSFDHTVVVWDADTGRKVNILIGHCAEISSASFNWDCSLILTGSMDKTCKLWDATNGKCVATLTGHDDEILDSCFDYTGKLIATASADGTARIFSAATRKCIAKLEGHEGEISKISFNPQGNHLLTGSSDKTARIWDAQTGQCLQVLEGHTDEIFSCAFNYKGNIVITGSKDNTCRIWR

SEQ ID NO: 11233 - protein, 369 aa, Homo sapiens
MKLKSLLLRYYPPGIMLEYEKHGELKTKSIDLLDLGPSTDVSALVEEIQKAEPLLTASRTEQVKLLIQRLQEKLGQNSNHTFYLFKVLKAHILPLTNVALNKSGSCFITGSYDRTCKLWDTASGEELNTLEGHRNVVYAIAFNNPYGDKIATGSFDKTCKLWSVETGKCYHTFRGHTAEIVCLSFNPQSTLVATGSMDTTAKLWDIQNGEEVYTLRGHSAEIISLSFNTSGDRIITGSFDHTVVVWDADTGRKVNILIGHCAEISSASFNWDCSLILTGSMDKTCKLWDATNGKCVATLTGHDDEILDSCFDYTGKLIATASADDGVSLCRPGRSAVARSWLTATCASQVQAILLPQPPELCHVLGNHV

SEQ ID NO: 11234 - protein, 479 aa, Homo sapiens
MDFSRNLYDIGEQLDSEDLASLKFLSLDYIPQRKQEPIKDALMLFQRLQEKRMLEESNLSFLKELLFRINRLDLLITYLNTRKEEMERELQTPGRAQISAYRVMLYQISEEVSRSELRSFKFLLQEEISKCKLDDDMNLLDIFIEMEKRVILGEGKLDILKRVCAQINKSLLKIINDYEEFSKERSSSLEGSPDEFSNGEELCGVMTISDSPREQDSESQTLDKVYQMKSKPRGYCLIINNHNFAKAREKVPKLHSIRDRNGTHLDAGALTTTFEELHFEIKPHDDCTVEQIYEILKIYQLMDHSNMDCFICCILSHGDKGIIYGTDGQEAPIYELTSQFTGLKCPSLAGKPKVFFIQACQGDNYQKGIPVETDSEEQPYLEMDLSSPQTRYIPDEADFLLGMATVNNCVSYRNPAEGTWYIQSLCQSLRERCPRGDDILTILTEVNYEVSNKDDKKNMGKQMPQPTFTLRKKLVFPSD

SEQ ID NO: 11235 - protein, 464 aa, Homo sapiens
MDFSRNLYDIGEQLDSEDLASLKFLSLDYIPQRKQEPIKDALMLFQRLQEKRMLEESNLSFLKELLFRINRLDLLITYLNTRKEEMERELQTPGRAQISAYRVMLYQISEEVSRSELRSFKFLLQEEISKCKLDDDMNLLDIFIEMEKRVILGEGKLDILKRVCAQINKSLLKIINDYEEFSKGEELCGVMTISDSPREQDSESQTLDKVYQMKSKPRGYCLIINNHNFAKAREKVPKLHSIRDRNGTHLDAGALTTTFEELHFEIKPHDDCTVEQIYEILKIYQLMDHSNMDCFICCILSHGDKGIIYGTDGQEAPIYELTSQFTGLKCPSLAGKPKVFFIQACQGDNYQKGIPVETDSEEQPYLEMDLSSPQTRYIPDEADFLLGMATVNNCVSYRNPAEGTWYIQSLCQSLRERCPRGDDILTILTEVNYEVSNKDDKKNMGKQMPQPTFTLRKKLVFPSD

SEQ ID NO: 11236 - protein, 395 aa, Homo sapiens
MDFSRNLYDIGEQLDSEDLASLKFLSLDYIPQRKQEPIKDALMLFQRLQEKRMLEESNLSFLKELLFRINRLDLLITYLNTRKEEMERELQTPGRAQISAYRVMLYQISEEVSRSELRSFKFLLQEEISKCKLDDDMNLLDIFIEMEKRVILGEGKLDILKRVCAQINKSLLKIINDYEEFSKGALTTTFEELHFEIKPHDDCTVEQIYEILKIYQLMDHSNMDCFICCILSHGDKGIIYGTDGQEAPIYELTSQFTGLKCPSLAGKPKVFFIQACQGDNYQKGIPVETDSEEQPYLEMDLSSPQTRYIPDEADFLLGMATVNNCVSYRNPAEGTWYIQSLCQSLRERCPRGDDILTILTEVNYEVSNKDDKKNMGKQMPQPTFTLRKKLVFPSD

SEQ ID NO: 11237 - protein, 496 aa, Homo sapiens
MDFSRNLYDIGEQLDSEDLASLKFLSLDYIPQRKQEPIKDALMLFQRLQEKRMLEESNLSFLKELLFRINRLDLLITYLNTRKEEMERELQTPGRAQISAYRFHFCRMSWAEANSQCQTQSVPFWRRVDHLLIRVMLYQISEEVSRSELRSFKFLLQEEISKCKLDDDMNLLDIFIEMEKRVILGEGKLDILKRVCAQINKSLLKIINDYEEFSKGEELCGVMTISDSPREQDSESQTLDKVYQMKSKPRGYCLIINNHNFAKAREKVPKLHSIRDRNGTHLDAGALTTTFEELHFEIKPHDDCTVEQIYEILKIYQLMDHSNMDCFICCILSHGDKGIIYGTDGQEAPIYELTSQFTGLKCPSLAGKPKVFFIQACQGDNYQKGIPVETDSEEQPYLEMDLSSPQTRYIPDEADFLLGMATVNNCVSYRNPAEGTWYIQSLCQSLRERCPRGDDILTILTEVNYEVSNKDDKKNMGKQMPQPTFTLRKKLVFPSD

SEQ ID NO: 11238 - protein, 235 aa, Homo sapiens
MDFSRNLYDIGEQLDSEDLASLKFLSLDYIPQRKQEPIKDALMLFQRLQEKRMLEESNLSFLKELLFRINRLDLLITYLNTRKEEMERELQTPGRAQISAYRVMLYQISEEVSRSELRSFKFLLQEEISKCKLDDDMNLLDIFIEMEKRVILGEGKLDILKRVCAQINKSLLKIINDYEEFSKERSSSLEGSPDEFSNDFGQSLPNEKQTSGILSDHQQSQFCKSTGESAQTSQH

SEQ ID NO: 11239 - protein, 220 aa, Homo sapiens
MDFSRNLYDIGEQLDSEDLASLKFLSLDYIPQRKQEPIKDALMLFQRLQEKRMLEESNLSFLKELLFRINRLDLLITYLNTRKEEMERELQTPGRAQISAYRVMLYQISEEVSRSELRSFKFLLQEEISKCKLDDDMNLLDIFIEMEKRVILGEGKLDILKRVCAQINKSLLKIINDYEEFSKDFGQSLPNEKQTSGILSDHQQSQFCKSTGESAQTSQH

SEQ ID NO: 11240 - protein, 276 aa, Homo sapiens
MDFSRNLYDIGEQLDSEDLASLKFLSLDYIPQRKQEPIKDALMLFQRLQEKRMLEESNLSFLKELLFRINRLDLLITYLNTRKEEMERELQTPGRAQISAYRVMLYQISEEVSRSELRSFKFLLQEEISKCKLDDDMNLLDIFIEMEKRVILGEGKLDILKRVCAQINKSLLKIINDYEEFSKERSSSLEGSPDEFSNGEELCGVMTISDSPREQDSESQTLDKVYQMKSKPRGYCLIINNHNFAKAREKVPKLHSIRDRNGTHLDAGTVEPKREK

SEQ ID NO: 11241 - protein, 261 aa, Homo sapiens
MDFSRNLYDIGEQLDSEDLASLKFLSLDYIPQRKQEPIKDALMLFQRLQEKRMLEESNLSFLKELLFRINRLDLLITYLNTRKEEMERELQTPGRAQISAYRVMLYQISEEVSRSELRSFKFLLQEEISKCKLDDDMNLLDIFIEMEKRVILGEGKLDILKRVCAQINKSLLKIINDYEEFSKGEELCGVMTISDSPREQDSESQTLDKVYQMKSKPRGYCLIINNHNFAKAREKVPKLHSIRDRNGTHLDAGTVEPKREK

SEQ ID NO: 11242 - protein, 538 aa, Homo sapiens
MEGGRRARVVIESKRNFFLGAFPTPFPAEHVELGRLGDSETAMVPGKGGADYILLPFKKMDFSRNLYDIGEQLDSEDLASLKFLSLDYIPQRKQEPIKDALMLFQRLQEKRMLEESNLSFLKELLFRINRLDLLITYLNTRKEEMERELQTPGRAQISAYRVMLYQISEEVSRSELRSFKFLLQEEISKCKLDDDMNLLDIFIEMEKRVILGEGKLDILKRVCAQINKSLLKIINDYEEFSKERSSSLEGSPDEFSNGEELCGVMTISDSPREQDSESQTLDKVYQMKSKPRGYCLIINNHNFAKAREKVPKLHSIRDRNGTHLDAGALTTTFEELHFEIKPHDDCTVEQIYEILKIYQLMDHSNMDCFICCILSHGDKGIIYGTDGQEAPIYELTSQFTGLKCPSLAGKPKVFFIQACQGDNYQKGIPVETDSEEQPYLEMDLSSPQTRYIPDEADFLLGMATVNNCVSYRNPAEGTWYIQSLCQSLRERCPRGDDILTILTEVNYEVSNKDDKKNMGKQMPQPTFTLRKKLVFPSD

SEQ ID NO: 11243 - protein, 1982 aa, Homo sapiens
MAADDDNGDGTSLFDVFSASPLKNNDEGSLDIYAGLDSAVSDSASKSCVPSRNCLDLYEEILTEEGTAKEATYNDLQVEYGKCQLQMKELMKKFKEIQTQNFSLINENQSLKKNISALIKTARVEINRKDEEISNLHQRLSEFPHFRNNHKTARTFDTVKTKDLKSRSPHLDDCSKTDHRAKSDVSKDVHHSTSLPNLEKEGKPHSDKRSTSHLPTSVEKHCTNGVWSRSHYQVGEGSSNEDSRRGRKDIRHSQFNRGTERVRKDLSTGCGDGEPRILEASQRLQGHPEKYGKGEPKTESKSSKFKSNSDSDYKGERINSSWEKETPGERSHSRVDSQSDKKLERQSERSQNINRKEVKSQDKEERKVDQKPKSVVKDQDHWRRSERASLPHSKNEITFSHNSSKYHLEERRGWEDCKRDKSVNSHSFQDGRCPSSLSNSRTHKNIDSKEVDAMHQWENTPLKAERHRTEDKRKREQESKEENRHIRNEKRVPTEHLQKTNKETKKTTTDLKKQNEPKTDKGEVLDNGVSEGADNKELAMKAESGPNETKNKDLKLSFMKKLNLTLSPAKKQPVSQDNQHKITDIPKSSGVCDSESSMQVKTVAYVPSISEHILGEAAVSEHTMGETKSTLLEPKVALLAVTEPRIGISETNKEDENSLLVRSVDNTMHCEEPICGTETSFPSPMEIQQTESLFPSTGMKQTINNGRAAAPVVMDVLQTDVSQNFGLELDTKRNDNSDYCGISEGMEMKVALSTTVSETTESILQPSIEEADILPIMLSEDNNPKFEPSVIVTPLVESKSCHLEPCLPKETLDSSLQQTELMDHRMATGETNSVYHDDDNSVLSIDLNHLRPIPEAISPLNSPVRPVAKVLRNESPPQVPVYNNSHKDVFLPNSAHSTSKSQSDLNKENQKPIYKSDKCTEADTCKNSPLDELEEGEIRSDSETSKPQESFEKNSKRRVSADVRKSKTIPRRGKSTVCLDKDSRKTHVRIHQTNNKWNKRPDKSSRSSKTEKKDKVMSTSSLEKIVPIIAVPSSEQEIMHMLRMIRKHVRKNYMKFKAKFSLIQFHRIIESAILSFTSLIKHLNLHKISKSVTTLQKNLCDIIESKLKQVKKNGIVDRLFEQQLPDMKKKLWKFVDDQLDYLFAKLKKILVCDSKSFGRDSDEGKLEKTSKQNAQYSNSQKRSVDNSNRELLKEKLSKSEDPVHYKSLVGCKKSEENYQDQNNSSINTVKHDIKKNFNICFDNIKNSQSEERSLEVHCPSTPKSEKNEGSSIEDAQTSQHATLKPERSFEILTEQQASSLTFNLVSDAQMGEIFKSLLQGSDLLDSSVNCTEKSEWELKTPEKQLLETLKCESIPACTTEELVSGVASPCPKMISDDNWSLLSSEKGPSLSSGLSLPVHPDVLDESCMFEVSTNLPLSKDNVCSVEKSKPCVSSILLEDLAVSLTVPSPLKSDGHLSFLKPDMSSSSTPEEVISAHFSEDALLEEEDASEQDIHLALESDNSSSKSSCSSSWTSRSVAPGFQYHPNLPMHAVIMEKSNDHFIVKIRRATPSTSSGLKQSMMPDELLTSLPRHGKEADEGPEKEYISCQNTVFKSVEELENSNKNVDGSKSTHEEQSSMIQTQVPDIYEFLKDASDKMGHSDEVADECFKLHQVWETKVPESIEELPSMEEISHSVGEHLPNTYVDLTKDPVTETKNLGEFIEVTVLHIDQLGCSGGNLNQSAQILDNSLQADTVGAFIDLTQDASSEAKSEGNHPALAVEDLGCGVIQVDEDNCKEEKAQVANRPLKCIVEETYIDLTTESPSSCEVKKDELKSEPGSNCDNSELPGTLHNSHKKRRNISDLNHPHKKQRKETDLTNKEKTKKPTQDSCENTEAHQKKASKKKAPPVTKDPSSLKATPGIKDSSAALATSTSLSAKNVIKKKGEIIILWTRNDDREILLECQKRGPSFKTFAYLAAKLDKNPNQVSERFQQLMKLFEKSKCR

SEQ ID NO: 11244 - protein, 703 aa, Homo sapiens
MADRRRQRASQDTEDEESGASGSDSGGSPLRGGGSCSGSAGGGGSGSLPSQRGGRTGALHLRRVESGGAKSAEESECESEDGIEGDAVLSDYESAEDSEGEEGEYSEEENSKVELKSEANDAVNSSTKEEKGEEKPDTKSTVTGERQSGDGQESTEPVENKVGKKGPKHLDDDEDRKNPAYIPRKGLFFEHDLRGQTQEEEVRPKGRQRKLWKDEGRWEHDKFREDEQAPKSRQELIALYGYDIRSAHNPDDIKPRRIRKPRYGSPPQRDPNWNGERLNKSHRHQGLGGTLPPRTFINRNAAGTGRMSAPRNYSRSGGFKEGRAGFRPVEAGGQHGGRSGETVKHEISYRSRRLEQTSVRDPSPEADAPVLGSPEKEEAASEPPAAAPDAAPPPPDRPIEKKSYSRARRTRTKVGDAVKLAEEVPPPPEGLIPAPPVPETTPTPPTKTGTWEAPVDSSTSGLEQDVAQLNIAEQNWSPGQPSFLQPRELRGMPNHIHMGAGPPPQFNRMEEMGVQGGRAKRYSSQRQRPVPEPPAPPVHISIMEGHYYDPLQFQGPIYTHGDSPAPLPPQGMLVQPGMNLPHPGLHPHQTPAPLPNPGLYPPPVSMSPGQPPPQQLLAPTYFSAPGVMNFGNPSYPYAPGALPPPPPPHLYPNTQAPSQVYGGVTYYNPAQQQVQPKPSPPRRTPQPVTIKPPPPEVVSRGSS

SEQ ID NO: 11245 - protein, 678 aa, Homo sapiens
MAANVGSMFQYWKRFDLQQLQRELDATATVLANRQDESEQSRKRLIEQSREFKKNTPEDLRKQVAPLLKSFQGEIDALSKRSKEAEAAFLNVYKRLIDVPDPVPALDLGQQLQLKVQRLHDIETENQKLRETLEEYNKEFAEVKNQEVTIKALKEKIREYEQTLKNQAETIALEKEQKLQNDFAEKERKLQETQMSTTSKLEEAEHKVQSLQTALEKTRTELFDLKTKYDEETTAKADEIEMIMTDLERANQRAEVAQREAETLREQLSSANHSLQLASQIQKAPDVEQAIEVLTRSSLEVELAAKEREIAQLVEDVQRLQASLTKLRENSASQISQLEQQLSAKNSTLKQLEEKLKGQADYEEVKKELNILKSMEFAPSEGAGTQDAAKPLEVLLLEKNRSLQSENAALRISNSDLSGRCAELQVRITEAVATATEQRELIARLEQDLSIIQSIQRPDAEGAAEHRLEKIPEPIKEATALFYGPAAPASGALPEGQVDSLLSIISSQRERFRARNQELEAENRLAQHTLQALQSELDSLRADNIKLFEKIKFLQSYPGRGSGSDDTELRYSSQYEERLDPFSSFSKRERQRKYLSLSPWDKATLSMGRLVLSNKMARTIGFFYTLFLHCLVFLVLYKLAWSESMERDCATFCAKKFADHLHKFHENDNGAAAGDLWQ

SEQ ID NO: 11246 - protein, 676 aa, Homo sapiens
MAANVGSMFQYWKRFDLQQLQRELDATATVLANRQDESEQSRKRLIEQSREFKKNTPEDLRKQVAPLLKSFQGEIDALSKRSKEAEAAFLNVYKRLIDVPDPVPALDLGQQLQLKVQRLHDIETENQKLRETLEEYNKEFAEVKNQEVTIKALKEKIREYEQTLKNQAETIALEKEQKLQNDFAEKERKLQETQMSTTSKLEEAEHKVQSLQTALEKTRTELFDLKTKYDEETTAKADEIEMIMTDLERANQRAEVAQREAETLREQLSSANHSLQLASQIQKAPDVAIEVLTRSSLEVELAAKEREIAQLVEDVQRLQASLTKLRENSASQISQLEQQLSAKNSTLKQLEEKLKGQADYEEVKKELNILKSMEFAPSEGAGTQDAAKPLEVLLLEKNRSLQSENAALRISNSDLSGRCAELQVRITEAVATATEQRELIARLEQDLSIIQSIQRPDAEGAAEHRLEKIPEPIKEATALFYGPAAPASGALPEGQVDSLLSIISSQRERFRARNQELEAENRLAQHTLQALQSELDSLRADNIKLFEKIKFLQSYPGRGSGSDDTELRYSSQYEERLDPFSSFSKRERQRKYLSLSPWDKATLSMGRLVLSNKMARTIGFFYTLFLHCLVFLVLYKLAWSESMERDCATFCAKKFADHLHKFHENDNGAAAGDLWQ

SEQ ID NO: 11247 - protein, 639 aa, Homo sapiens
MAANVGSMFQYWKRFDLQQLQDLRKQVAPLLKSFQGEIDALSKRSKEAEAAFLNVYKRLIDVPDPVPALDLGQQLQLKVQRLHDIETENQKLRETLEEYNKEFAEVKNQEVTIKALKEKIREYEQTLKNQAETIALEKEQKLQNDFAEKERKLQETQMSTTSKLEEAEHKVQSLQTALEKTRTELFDLKTKYDEETTAKADEIEMIMTDLERANQRAEVAQREAETLREQLSSANHSLQLASQIQKAPDVAIEVLTRSSLEVELAAKEREIAQLVEDVQRLQASLTKLRENSASQISQLEQQLSAKNSTLKQLEEKLKGQADYEEVKKELNILKSMEFAPSEGAGTQDAAKPLEVLLLEKNRSLQSENAALRISNSDLSGRCAELQVRITEAVATATEQRELIARLEQDLSIIQSIQRPDAEGAAEHRLEKIPEPIKEATALFYGPAAPASGALPEGQVDSLLSIISSQRERFRARNQELEAENRLAQHTLQALQSELDSLRADNIKLFEKIKFLQSYPGRGSGSDDTELRYSSQYEERLDPFSSFSKRERQRKYLSLSPWDKATLSMGRLVLSNKMARTIGFFYTLFLHCLVFLVLYKLAWSESMERDCATFCAKKFADHLHKFHENDNGAAAGDLWQ

SEQ ID NO: 11248 - protein, 662 aa, Homo sapiens
MAANVGSMFQYWKRFDLQQLQRELDATATVLANRQDESEQSRKRLIEQSREFKKNTPEIDALSKRSKEAEAAFLNVYKRLIDVPDPVPALDLGQQLQLKVQRLHDIETENQKLRETLEEYNKEFAEVKNQEVTIKALKEKIREYEQTLKNQAETIALEKEQKLQNDFAEKERKLQETQMSTTSKLEEAEHKVQSLQTALEKTRTELFDLKTKYDEETTAKADEIEMIMTDLERANQRAEVAQREAETLREQLSSANHSLQLASQIQKAPDVEQAIEVLTRSSLEVELAAKEREIAQLVEDVQRLQASLTKLRENSASQISQLEQQLSAKNSTLKQLEEKLKGQADYEEVKKELNILKSMEFAPSEGAGTQDAAKPLEVLLLEKNRSLQSENAALRISNSDLSGRCAELQVRITEAVATATEQRELIARLEQDLSIIQSIQRPDAEGAAEHRLEKIPEPIKEATALFYGPAAPASGALPEGQVDSLLSIISSQRERFRARNQELEAENRLAQHTLQALQSELDSLRADNIKLFEKIKFLQSYPGRGSGSDDTELRYSSQYEERLDPFSSFSKRERQRKYLSLSPWDKATLSMGRLVLSNKMARTIGFFYTLFLHCLVFLVLYKLAWSESMERDCATFCAKKFADHLHKFHENDNGAAAGDLWQ

SEQ ID NO: 11249 - protein, 364 aa, Homo sapiens
MEHNGSASNADKIHQNRLSSVTEDEDQDAALTIVTVLDKVASIVDSVQASQKRIEERHREMENAIKSVQIDLLKLSQSHSNTGHIINKLFEKTRKVSAHIKDVKARVEKQQIHVKKVEVKQEEIMKKNKFRVVIFQEKFRCPTSLSVVKDRNLTENQEEDDDDIFDPPVDLSSDEEYYVEESRSARLRKSGKEHIDNIKKAFSKENMQKTRQNLDKKVNRIRTRIVTPERRERLRQSGERLRQSGERLRQSGERFKKSISNAAPSKEAFKMRSLRKGKDRTVAEGEECAREMGVDIIARSESLGPISELYSDELSEPEHEAARPVYPPHEGREIPTPEPLKVTFKSQVKVEDDESLLLDLKHSS

SEQ ID NO: 11250 - protein, 740 aa, Homo sapiens
MATANSIIVLDDDDEDEAAAQPGPSHPLPNAASPGAEAPSSSEPHGARGSSSSGGKKCYKLENEKLFEEFLELCKMQTADHPEVVPFLYNRQQRAHSLFLASAEFCNILSRVLSRARSRPAKLYVYINELCTVLKAHSAKKKLNLAPAATTSNEPSGNNPPTHLSLDPTNAENTASQSPRTRGSRRQIQRLEQLLALYVAEIRRLQEKELDLSELDDPDSAYLQEARLKRKLIRLFGRLCELKDCSSLTGRVIEQRIPYRGTRYPEVNRRIERLINKPGPDTFPDYGDVLRAVEKAAARHSLGLPRQQLQLMAQDAFRDVGIRLQERRHLDLIYNFGCHLTDDYRPGVDPALSDPVLARRLRENRSLAMSRLDEVISKYAMLQDKSEEGERKKRRARLQGTSSHSADTPEASLDSGEGPSGMASQGCPSASRAETDDEDDEESDEEEEEEEEEEEEEATDSEEEEDLEQMQEGQEDDEEEDEEEEAAAGKDGDKSPMSSLQISNEKNLEPGKQISRSSGEQQNKGRIVSPSLLSEEPLAPSSIDAESNGEQPEELTLEEESPVSQLFELEIEALPLDTPSSVETDISSSRKQSEEPFTTVLENGAGMVSSTSFNGGVSPHNWGDSGPPCKKSRKEKKQTGSGPLGNSYVERQRSVHEKNGKKICTLPSPPSPLASLAPVADSSTRVDSPSHGLVTSSLCIPSPARLSQTPHSQPPRPGTCKTSVATQCDPEEIIVLSDSD

SEQ ID NO: 11251 - protein, 710 aa, Homo sapiens
MATANSIIVLDDDDEDEAAAQPGPSHPLPNAASPGAEAPSSSEPHGARGSSSSGGKKCYKLENEKLFEEFLELCKMQTADHPEVVPFLYNRQQRAHSLFLASAEFCNILSRVLSRARSRPAKLYVYINELCTVLKAHSAKKKLNLAPAATTSNEPSGNNPPTHLSLDPTNAENTASQSPRTRGSRRQIQRLEQLLALYVAEIRRLQEKELDLSELDDPDSAYLQEARLKRKLIRLFGRLCELKDCSSLTGRVIEQRIPYRGTRYPEVNRRIERLINKPGPDTFPDYGDVLRAVEKAAARHSLGLPRQQLQLMAQDAFRDVGIRLQERRHLDLIYNFGCHLTDDYRPGVDPALSDPVLARRLRENRSLAMSRLDEVISKYAMLQDKSEEGERKKRRARLQGTSSHSADTPEASLDSGEGPSGMASQGCPSASRAETDDEDDEESDEEEEEEEEEEEEEATDSEEEEDLEQMQEGQEDDEEEDEEEEAAAGKDGDKSPMSSLQISNEKNLEPGKQISRSSGEQQNKGRIVSPSLLSEEPLAPSSIDAESNGEQPEELTLEEESPVSQLFELEIEALPLDTPSSVETDISSSRKQSEEPFTTVLENGAGMVSSTSFNGGVSPHNWGDSGPPCKKSRKEKKQTGSGPLGNSYVERQRSVHEKNGKKICTLPSPPSPLASLAPVADSSTRVDSPSHGLVTPAKNLGRRRSKQDQG

SEQ ID NO: 11252 - protein, 665 aa, Homo sapiens
MQTADHPEVVPFLYNRQQRAHSLFLASAEFCNILSRVLSRARSRPAKLYVYINELCTVLKAHSAKKKLNLAPAATTSNEPSGNNPPTHLSLDPTNAENTASQSPRTRGSRRQIQRLEQLLALYVAEIRRLQEKELDLSELDDPDSAYLQEARLKRKLIRLFGRLCELKDCSSLTGRVIEQRIPYRGTRYPEVNRRIERLINKPGPDTFPDYGDVLRAVEKAAARHSLGLPRQQLQLMAQDAFRDVGIRLQERRHLDLIYNFGCHLTDDYRPGVDPALSDPVLARRLRENRSLAMSRLDEVISKYAMLQDKSEEGERKKRRARLQGTSSHSADTPEASLDSGEGPSGMASQGCPSASRAETDDEDDEESDEEEEEEEEEEEEEATDSEEEEDLEQMQEGQEDDEEEDEEEEAAAGKDGDKSPMSSLQISNEKNLEPGKQISRSSGEQQNKGRIVSPSLLSEEPLAPSSIDAESNGEQPEELTLEEESPVSQLFELEIEALPLDTPSSVETDISSSRKQSEEPFTTVLENGAGMVSSTSFNGGVSPHNWGDSGPPCKKSRKEKKQTGSGPLGNSYVERQRSVHEKNGKKICTLPSPPSPLASLAPVADSSTRVDSPSHGLVTSSLCIPSPARLSQTPHSQPPRPGTCKTSVATQCDPEEIIVLSDSD

SEQ ID NO: 11253 - protein, 688 aa, Homo sapiens
MATANSIIVLDDDDEDEAAAQPGPSHPLPNAASPGAEAPSSSEPHGARGSSSSGGKKCYKLENEKLFEEFLELCKMQTADHPEVVPFLYNRQQRAHSLFLASAEFCNILSRVLSRARSRPAKLYVYINELCTVLKAHSAKKKLNLAPAATTSNEPSGNNPPTHLSLDPTNAENTASQSPRTRGSRRQIQRLEQLLALYVAEIRRLQEKELDLSELDDPDSAYLQEARLKRKLIRLFGRLCELKDCSSLTGRVIEQRIPYRGTRYPEVNRRIERLINKPGPDTFPDYGDVLRAVEKAAARHSLGLPRQQLQLMAQDAFRDVGIRLQERRHLDLIYNFGCHLTDDYRPGVDPALSDPVLARRLRENRSLAMSRLDEVISKYAMLQDKSEEGERKKRRARLQGTSSHSADTPEASLDSGEGPSGMASQGCPSASRAETDDEDDEESDEEEEEEEEEEEEEATDSEEEEDLEQMQEGQEDDEEEDEEEEAAAGKDGDKSPMSSLQISNEKNLEPGKQISRSSGEQQNKGRIVSPSLLSEEPLAPSSIDAESNGEQPEELTLEEESPVSQLFELEIEALPLDTPSSVETDISSSRKQSEEPFTTVLENGAGMVSSTSFNGGVSPHNWGDSGPPCKKSRKEKKQTGSGPLGNSYVERQSPAVPNPPFTASSAWYLQDKCGHTMRSRRDHRALRL

SEQ ID NO: 11254 - protein, 682 aa, Homo sapiens
MATANSIIVLDDDDEDEAAAQPGPSHPLPNAASPGAEAPSSSEPHGARGSSSSGGKKCYKLENEKLFEEFLELCKMQTADHPEVVPFLYNRQQRAHSLFLASAEFCNILSRVLSRARSRPAKLYVYINELCTVLKAHSAKKKLNLAPAATTSNEPSGNNPPTHLSLDPTNAENTASQSPRTRGSRRQIQRLEQLLALYVAEIRRLQEKELDLSELDDPDSAYLQEARLKRKLIRLFGRLCELKDCSSLTGRVIEQRIPYRGTRYPEVNRRIERLINKPGPDTFPDYGDVLRAVEKAAARHSLGLPRQQLQLMAQDAFRDVGIRLQERRHLDLIYNFGCHLTDDYRPGVDPALSDPVLARRLRENRSLAMSRLDEVISKYAMLQDKSEEGERKKRRARLQGTSSHSADTPEASLDSGEGPSGMASQGCPSASRAETDDEDDEESDEEEEEEEEEEEEEATDSEEEEDLEQMQEGQEDDEEEDEEEEAAAGKDGDKSPMSSLQISNEKNLEPGKQISRSSGEQQNKGRIVSPSLLSEEPLAPSSIDAESNGEQPEELTLEEESPVSQLFELEIEALPLDTPSSVETDISSSRKQSEEPFTTVLENGAGMVSSTSFNGGVSPHNWGDSGPPCKKSRKEKKQTGSGPLGNSPAVPNPPFTASSAWYLQDKCGHTMRSRRDHRALRL

SEQ ID NO: 11255 - protein, 744 aa, Homo sapiens
MSAANPETPNSTISREASTQSSSAAASQGWVLPEGKIVPNTVFVGGIDARMDETEIGSCFGRYGSVKEVKIITNRTGVSKGYGFVSFVNDVDVQKIVGSQIHFHGKKLKLGPAIRKQKLCARHVQPRPLVVNPPPPPQFQNVWRNPNTETYLQPQITPNPVTQHVQSAANPETPNSTISREASTQSSSAAASQGWVLPEGKIVPNTVFVGGIDARMDETEIGSCFGRYGSVKEVKIITNRTGVSKGYGFVSFVNDVDVQKIVGSQIHFHGKKLKLGPAIRKQKLCARHVQPRPLVVNPPPPPQFQNVWRNPNTETYLQPQITPNPVTQHVQSAANPETPNSTISREASTQSSSAAASQGWVLPEGKIVPNTVFVGGIDARMDETEIGSCFGRYGSVKEVKIITNRTGVSKGYGFVSFVNDVDVQKIVGSQIHFHGKKLKLGPAIRKQKLCARHVQPRPLVVNPPPPPQFQNVWRNPNTETYLQPQITPNPVTQHVQAYSAYPHSPGQVITGCQLLVYNYQEYPTYPDSAFQVTTGYQLPVYNYQPFPAYPRSPFQVTAGYQLPVYNYQAFPAYPNSPFQVATGYQFPVYNYQPFPAYPSSPFQVTAGYQLPVYNYQAFPAYPNSPFQVATGYQFPVYNYQAFPAYPNSPVQVTTGYQLPVYNYQAFPAYPSSPFQVTTGYQLPVYNYQAFPAYPNSAVQVTTGYQFHVYNYQMPPQCPVGEQRRNLWTEAYKWWYLVCLIQRRD

SEQ ID NO: 11256 - protein, 613 aa, Homo sapiens
MSAANPETPNSTISREASTQSSSAAASQGWVLPEGKIVPNTVFVGGIDARMDETEIGSCFGRYGSVKEVKIITNRTGVSKGYGFVSFVNDVDVQKIVGSQIHFHGKKLKLGPAIRKQKLCARHVQPRPLVVNPPPPPQFQNVWRNPNTETYLQPQITPNPVTQHVQSAANPETPNSTISREASTQSSSAAASQGWVLPEGKIVPNTVFVGGIDARMDETEIGSCFGRYGSVKEVKIITNRTGVSKGYGFVSFVNDVDVQKIVGSQIHFHGKKLKLGPAIRKQKLCARHVQPRPLVVNPPPPPQFQNVWRNPNTETYLQPQITPNPVTQHVQSAANPETPNSTISREASTQSSSAAASQGWVLPEGKIVPNTVFVGGIDARMDETEIGSCFGRYGSVKEVKIITNRTGVSKGYGFVSFVNDVDVQKIVGSQIHFHGKKLKLGPAIRKQKLCARHVQPRPLVVNPPPPPQFQNVWRNPNTETYLQPQITPNPVTQHVQAYSAYPHSPGQVITGCQLLVYNYQEYPTYPDSAFQVTTGYQLPVYNYQPFPAYPRSPFQVTAGYQLPVYNYQAFPAYPNSPFQVATGYQFPVCEICKILVLKNAAAFLCHSKVNRSI

SEQ ID NO: 11257 - protein, 558 aa, Homo sapiens
MSAANPETPNSTISREASTQSSSAAASQGWVLPEGKIVPNTVFVGGIDARMDETEIGSCFGRYGSVKEVKIITNRTGVSKGYGFVSFVNDVDVQKIVGSQIHFHGKKLKLGPAIRKQKLCARHVQPRPLVVNPPPPPQFQNVWRNPNTETYLQPQITPNPVTQHVQAYSAYPHSPGQVITGCQLLVYNYQEYPTYPDSAFQVTTGYQLPVYNYQPFPAYPRSPFQVTAGYQLPVYNYQAFPAYPNSPFQVATGYQFPVYNYQPFPAYPSSPFQVTAGYQLPVYNYQAFPAYPNSPFQVATGYQFPVYNYQAFPAYPNSPVQVTTGYQLPVYNYQAFPAYPNSPVQVTTGYQLPVYNYQAFPAYPSSPFQVTTGYQLPVYNYQAFPAYPSSPFQVTTGYQLPVYNYQAFPAYPSSPFQVTTGYQLPVYNYQAFPAYPSSPFQVTTGYQLPVYNYQAFPAYPSSPFQVTTGYQLPVYNYQAFPAYPSSPFQVTTGYQLPVYNYQAFPAYPNSAVQVTTGYQFHVYNYQMPPQCPVGEQRRNLWTEAYKWWYLVCLIQRRD

SEQ ID NO: 11258 - protein, 366 aa, Homo sapiens
MSAANPETPNSTISREASTQSSSAAASQGWVLPEGKIVPNTVFVGGIDARMDETEIGSCFGRYGSVKEVKIITNRTGVSKGYGFVSFVNDVDVQKIVGSQIHFHGKKLKLGPAIRKQKLCARHVQPRPLVVNPPPPPQFQNVWRNPNTETYLQPQITPNPVTQHVQAYSAYPHSPGQVITGCQLLVYNYQEYPTYPDSPFQVTTGYQLPVYNYQAFPAYPSSPFQVTTGYQLPVYNYQAFPAYPSSPFQVTTGYQLPVYNYQAFPAYPSSPFQVTTGYQLPVYNYQAFPAYPSSPFQVTTGYQLPVYNYQAFPAYPNSAVQVTTGYQFHVYNYQMPPQCPVGEQRRNLWTEAYKWWYLVCLIQRRD

SEQ ID NO: 11259 - protein, 534 aa, Homo sapiens
MSAANPETPNSTISREASTQSSSAAASQGWVLPEGKIVPNTVFVGGIDARMDETEIGSCFGRYGSVKEVKIITNRTGVSKGYGFVSFVNDVDVQKIVGSQIHFHGKKLKLGPAIRKQKLCARHVQPRPLVVNPPPPPQFQNVWRNPNTETYLQPQITPNPVTQHVQAYSAYPHSPGQVITGCQLLVYNYQEYPTYPDSAFQVTTGYQLPVYNYQPFPAYPRSPFQVTAGYQLPVYNYQAFPAYPNSPFQVATGYQFPVYNYQPFPAYPSSPFQVTAGYQLPVYNYQAFPAYPNSPFQVATGYQFPVYNYQAFPAYPNSPVQVTTGYQLPVYNYQAFPAYPSSPFQVTTGYQLPVYNYQAFPAYPSSPFQVTTGYQLPVYNYQAFPAYPSSPFQVTTGYQLPVYNYQAFPAYPSSPFQVTTGYQLPVYNYQAFPAYPSSPFQVTTGYQLPVYNYQAFPAYPSSPFQVTTGYQLPVYNYQAFPAYPNSAVQVTTGYQFHVYNYQMPPQCPVGEQRRNLWTEAYKWWYLVCLIQRRD

SEQ ID NO: 11260 - protein, 243 aa, Homo sapiens
MARLWGALSLWPLWAAVPWGGAAAVGVRACSSTAAPDGVEGPALRRSYWRHLRRLVLGPPEPPFSHVCQVGDPVLRGVAAPVERAQLGGPELQRLTQRLVQVMRRRRCVGLSAPQLGVPRQVLALELPEALCRECPPRQRALRQMEPFPLRVFVNPSLRVLDSRLVTFPEGCESVAGFLACVPRFQAVQISGLDPNGEQVVWQASGWAARIIQHEMDHLQGCLFIDKMDSRTFTNVYWMKVND

SEQ ID NO: 11261 - protein, 486 aa, Homo sapiens
MSAANPETPNSTISREASTQSSSAAASQGWVLPEGKIVPNTVFVGGIDARMDETEIGSCFGRYGSVKEVKIITNRTGVSKGYGFVSFVNDVDVQKIVGSQIHFHGKKLKLGPAIRKQKLCARHVQPRPLVVNPPPPPQFQNVWRNPNTETYLQPQITPNPVTQHVQAYSAYPHSPGQVITGCQLLVYNYQEYPTYPDSAFQVTTGYQLPVYNYQPFPAYPRSPFQVTAGYQLPVYNYQAFPAYPNSPFQVATGYQFPVYNYQPFPAYPSSPFQVTAGYQLPVYNYQAFPAYPNSPFQVATGYQFPVYNYQAFPAYPNSPVQVTTGYQLPVYNYQAFPAYPNSPFQVATGYQFPVYNYQAFPAYPNSPVQVTTGYQLPVYNYQAFPAYPNSPFQVATGYQFPVYNYQAFPAYPNSPVQVTTGYQLPVYNYQAFPAYPNSAVQVTTGYQFHVYNYQMPPQCPVGEQRRNLWTEAYKWWYLVCLIQRRD

SEQ ID NO: 11262 - protein, 438 aa, Homo sapiens
MSAANPETPNSTISREASTQSSSAAASQGWVLPEGKIVPNTVFVGGIDARMDETEIGSCFGRYGSVKEVKIITNRTGVSKGYGFVSFVNDVDVQKIVGSQIHFHGKKLKLGPAIRKQKLCARHVQPRPLVVNPPPPPQFQNVWRNPNTETYLQPQITPNPVTQHVQAYSAYPHSPGQVITGCQLLVYNYQEYPTYPDSAFQVTTGYQLPVYNYQPFPAYPRSPFQVTAGYQLPVYNYQAFPAYPNSPFQVATGYQFPVYNYQAFPAYPNSPVQVTTGYQLPVYNYQAFPAYPNSPFQVATGYQFPVYNYQAFPAYPNSPVQVTTGYQLPVYNYQAFPAYPNSPFQVATGYQFPVYNYQAFPAYPNSPVQVTTGYQLPVYNYQAFPAYPNSAVQVTTGYQFHVYNYQMPPQCPVGEQRRNLWTEAYKWWYLVCLIQRRD

SEQ ID NO: 11263 - protein, 579 aa, Homo sapiens
MSAANPETPNSTISREASTQSSSAAASQGWVLPEGKIVPNTVFVGGIDARMDETEIGSCFGRYGSVKEVKIITNRTGVSKGYGFVSFVNDVDVQKIVGSQIHFHGKKLKLGPAIRKQKLCARHVQPRPLVVNPPPPPQFQNVWRNPNTETYLQPQITPNPVTQHVQSAANPETPNSTISREASTQSSSAAASQGWVLPEGKIVPNTVFVGGIDARMDETEIGSCFGRYGSVKEVKIITNRTGVSKGYGFVSFVNDVDVQKIVGSQIHFHGKKLKLGPAIRKQKLCARHVQPRPLVVNPPPPPQFQNVWRNPNTETYLQPQITPNPVTQHVQAYSAYPHSPGQVITGCQLLVYNYQEYPTYPDSAFQVTTGYQLPVYNYQPFPAYPRSPFQVTAGYQLPVYNYQAFPAYPNSPFQVATGYQFPVYNYQPFPAYPSSPFQVTAGYQLPVYNYQAFPAYPNSPFQVATGYQFPVYNYQAFPAYPNSPVQVTTGYQLPVYNYQAFPAYPSSPFQVTTGYQLPVYNYQAFPAYPNSAVQVTTGYQFHVYNYQMPPQCPVGEQRRNLWTEAYKWWYLVCLIQRRD

SEQ ID NO: 11264 - protein, 390 aa, Homo sapiens
MSAANPETPNSTISREASTQSSSAAASQGWVLPEGKIVPNTVFVGGIDARMDETEIGSCFGRYGSVKEVKIITNRTGVSKGYGFVSFVNDVDVQKIVGSQIHFHGKKLKLGPAIRKQKLCARHVQPRPLVVNPPPPPQFQNVWRNPNTETYLQPQITPNPVTQHVQAYSAYPHSPGQVITGCQLLVYNYQEYPTYPDSAFQVTTGYQLPVYNYQPFPAYPRSPFQVTAGYQLPVYNYQAFPAYPNSPFQVATGYQFPVYNYQPFPAYPSSPFQVTAGYQLPVYNYQAFPAYPNSPFQVATGYQFPVYNYQAFPAYPNSPVQVTTGYQLPVYNYQAFPAYPNSAVQVTTGYQFHVYNYQMPPQCPVGEQRRNLWTEAYKWWYLVCLIQRRD

SEQ ID NO: 11265 - protein, 295 aa, Homo sapiens
MSTANPETPNSTISREASTQSSSAATSQGYILPEGKIMPNTVFVGGIDVRMDETEIRSFFARYGSVKEVKIITDRTGVSKGYGFVSFFNDVDVQKIVESQINFHGKKLKLGPAIRKQNLCAYHVQPRPLVFNHPPPPQFQNVWTNPNTETYMQPTTTMNPITQYVQAYPTYPNSPVQVITGYQLPVYNYQMPPQWPVGEQRSYVVPPAYSAVNYHCNEVDPGAEVVPNECSVHEATPPSGNGPQKKSVDRSIQTVVSCLFNPENRLRNSVVTQDDYFKDKRVHHFRRSRAMLKSV

SEQ ID NO: 11266 - protein, 315 aa, Homo sapiens
MAAPSCGGDRKARLTPSLPHESTANPETPNSTISREASTQSSSAATSQGYILPEGKIMPNTVFVGGIDVRMDETEIRSFFARYGSVKEVKIITDRTGVSKGYGFVSFFNDVDVQKIVESQINFHGKKLKLGPAIRKQNLCAYHVQPRPLVFNHPPPPQFQNVWTNPNTETYMQPTTTMNPITQYVQAYPTYPNSPVQVITGYQLPVYNYQMPPQWPVGEQRSYVVPPAYSAVNYHCNEVDPGAEVVPNECSVHEATPPSGNGPQKKSVDRSIQTVVSCLFNPENRLRNSVVTQDDYFKDKRVHHFRRSRAMLKSV

SEQ ID NO: 11267 - protein, 407 aa, Homo sapiens
MNNSGADEIGKLFVGGLDWSTTQETLRSYFSQYGEVVDCVIMKDKTTNQSRGFGFVKFKDPNCVGTVLASRPHTLDGRNIDPKPCTPRGMQPERTRPKEGWQKGPRSDNSKSNKIFVGGIPHNCGETELREYFKKFGVVTEVVMIYDAEKQRPRGFGFITFEDEQSVDQAVNMHFHDIMGKKVEVKRAEPRDSKSQAPGQPGASQWGSRVVPNAANGWAGQPPPTWQQGYGPQGMWVPAGQAIGGYGPPPAGRGAPPPPPPFTSYIVSTPPGGFPPPQGFPQGYGAPPQFSFGYGPPPPPPDQFAPPGVPPPPATPGAAPLAFPPPPSQAAPDMSKPPTAQPDFPYGQYAGYGQDLSGFGQGFSDPSQQPPSYGGPSVPGSGGPPAGGSGFGRGQNHNVQGFHPYRR

SEQ ID NO: 11268 - protein, 378 aa, Homo sapiens
MNNSGADEIGKLFVGGLDWSTTQETLRSYFSQYGEVVDCVIMKDKTTNQSRGFGFVKFKDPNCVGTVLASRPHTLDGRNIDPKPCTPRGMQPERTRPKEGWQKGPRSDNSKSNKIFVGGIPHNCGETELREYFKKFGVVTEVVMIYDAEKQRPRGFGFITFEDEQSVDQAVNMHFHDIMGKKVEVKRAEPRDSKSQAPGQPGASQWGSRVVPNAANGWAGQPPPTWQQGYGPQGMWVPAGQAIGGYGPPPAGRGAPPPPPPFTSYIVSTPPGGFPPPQGFPQGYGAPPQFSFGYGPPPPPPDQFAPPGVPPPPATPGAAPLAFPPPPSQAAPDMSKPPTAQPDFPYGQYGLGSYSPAPPGCGPHFVYSLMVRLSSDVA

SEQ ID NO: 11269 - protein, 168 aa, Homo sapiens
MNSKGQYPTQPTYPVQPPGNPVYPQTLHLPQAPPYTDAPPAYSELYRPSFVHPGAATVPTMSAAFPGASLYLPMAQSVAVGPLGSTIPMAYYPVGPIYPPGSTVLVEGGYDAGARFGAGATAGNIPPPPPGCPPNAAQLAVMQGANVLVTQRKGNFFMGGSDGGYTIW

SEQ ID NO: 11270 - protein, 153 aa, Homo sapiens
MNSKGQYPTQPTYPVQPPGNPVYPQTLHLPQAPPYTDAPPAYSELYRPSFVHPGAATVPTMSAAFPGASLYLPMAQSVAVGPLGSTIPMAYYPVGPIYPPGSTVLVEGGYDAGARFGAGATAGNIPVKEDQDHDREQGEEDNGDNNLERRGKM

SEQ ID NO: 11271 - protein, 146 aa, Homo sapiens
MNSKGQYPTQPTYPVQPPGNPVYPQTLHLPQAPPYTDAPPAYSELYRPSFVHPGAATVPTMSAAIPMAYYPVGPIYPPGSTVLVEGGYDAGARFGAGATAGNIPPPPPGCPPNAAQLAVMQGANVLVTQRKGNFFMGGSDGGYTIW

SEQ ID NO: 11272 - protein, 136 aa, Homo sapiens
MNSKGQYPTQPTYPVQPPGNPVYPQTLHLPQAPPYTDAPPAYSESVAVGPLGSTIPMAYYPVGPIYPPGSTVLVEGGYDAGARFGAGATAGNIPPPPPGCPPNAAQLAVMQGANVLVTQRKGNFFMGGSDGGYTIW

SEQ ID NO: 11273 - protein, 86 aa, Homo sapiens
MNSKGQYPTQPTYPVQPPGNPVYPQTLHLPQAPPYTDAPPAYSEPPPPGCPPNAAQLAVMQGANVLVTQRKGNFFMGGSDGGYTIW

SEQ ID NO: 11274 - protein, 207 aa, Homo sapiens
MNSKGQYPTQPTYPVQPPGNPVYPQTLHLPQAPPYTDAPPAYSELYRPSFVHPGAATVPTMSAAFPGASLYLPMAQSVAVGPLGSTIPMAYYPVGPIYPPASTSWMPSQCCSACSHAGSQRPRNSAEGELLHGWFRWWLHHLVRNQGHLCAGKDITYLQHFSQCNCFSHINLKLQFRHMLLGCLSGAQTFRHFSNLIRNHVMVAVPP

SEQ ID NO: 11275 - protein, 292 aa, Homo sapiens
MAQPPPDVEGDDCLPAYRHLFCPDLLRDKVAFITGGGSGIGFRIAEIFMRHGCHTVIASRSLPRVLTAARKLAGATGRRCLPLSMDVRAPPAVMAAVDQALKEFGRIDILINCAAGNFLCPAGALSFNAFKTVMDIDTSGTFNVSRVLYEKFFRDHGGVIVNITATLGNRGQALQVHAGSAKAAVDAMTRHLAVEWGPQNIRVNSLAPGPISGTEGLRRLGGPQASLSTKVTASPLQRLGNKTEIAHSVLYLASPLASYVTGAVLVADGGAWLTFPNGVKGLPDFASFSAKL

SEQ ID NO: 11276 - protein, 211 aa, Homo sapiens
MAQPPPDVEGDDCLPAYRHLFCPDLLRDKVAFITGGGSGIGFRIAEIFMRASEDQMGHCSSSGTCLAGVATFMVIVGKQPPNQKSRETKEQGRQIPFVCVRHGCHTVIASRSLPRVLTAARKLAGATGRRCLPLSMDVRAPPAVMAAVDQALKEFGRIDILINCSSSSCGLPFCRCGRELPVPRWRLVLQRLQDRDGHRYQRHLQCVSCAL

SEQ ID NO: 11277 - protein, 244 aa, Homo sapiens
MRHGCHTVIASRSLPRVLTAARKLAGATGRRCLPLSMDVRAPPAVMAAVDQALKEFGRIDILINCAAGNFLCPAGALSFNAFKTVMDIDTSGTFNVSRVLYEKFFRDHGGVIVNITATLGNRGQALQVHAGSAKAAVDAMTRHLAVEWGPQNIRVNSLAPGPISGTEGLRRLGGPQASLSTKVTASPLQRLGNKTEIAHSVLYLASPLASYVTGAVLVADGGAWLTFPNGVKGLPDFASFSAKL

SEQ ID NO: 11278 - protein, 73 aa, Homo sapiens
MRIAVLFFTIFFFMSQVLPAKGKFKEICERPNGSCRDFCLETEIHVGRCLNSRPCCLPLGHQPRIESTTPKKD

SEQ ID NO: 11279 - protein, 87 aa, Homo sapiens
MRLHLLLLILLLFSILLSPVRGGLGPAEGHCLNLFGVCRTDVCNIVEDQIGACRRRMKCCRAWWILMPIPTPLIMSDYQEPLKPNLK

SEQ ID NO: 11280 - protein, 67 aa, Homo sapiens
MKIQLFFFILHFWVTILPAKKKYPEYGSLDLRRECRIGNGQCKNQCHENEIRIAYCIRPGTHCCLQQ

SEQ ID NO: 11281 - protein, 62 aa, Homo sapiens
MKIQLFFFILHFWVTILPARSNFEPKYRFERCEKVRGICKTFCDDVEYDYGYCIKWRSQCCV

SEQ ID NO: 11282 - protein, 113 aa, Homo sapiens
MKLLTTICRLKLEKMYSKTNTSSTIFEKARHGTEKISTARSEGHHITFSRWKSCTAIGGRCKNQCDDSEFRISYCARPTTHCCVTECDPTDPNNWIPKDSVGTQEWYPKDSRH

SEQ ID NO: 11283 - protein, 375 aa, Homo sapiens
MSASAPAAEGEGTPTQPASEKEPEMPGPREESEEEEDEDDEEEEEEEKEKSLIVEGKREKKKVERLTMQVSSLQREPFTIAQGKGQKLCEIERIHFFLSKKKTDELRNLHKLLYNRPGTVSSLKKNVGQFSGFPFEKGSVQYKKKEEMLKKFRNAMLKSICEVLDLERSGVNSELVKRILNFLMHPKPSGKPLPKSKKTCSKGSKKERNSSGMARKAKRTKCPEILSDESSSDEDEKKNKEESSDDEDKESEEEPPKKTAKREKPKQKATSKSKKSVKSANVKKADSSTTKKNQNSSKKESESEDSSDDEPLIKKLKKPPTDEELKETIKKLLASANLEEVTMKQICKKVYENYPTYDLTERKDFIKTTVKELIS

SEQ ID NO: 11284 - protein, 341 aa, Homo sapiens
MSASAPAAEGEGTPTQPASEKEPEMPGPREESEEEEDEDDEEEEEEEKGKGQKLCEIERIHFFLSKKKTDELRNLHKLLYNRPGTVSSLKKNVGQFSGFPFEKGSVQYKKKEEMLKKFRNAMLKSICEVLDLERSGVNSELVKRILNFLMHPKPSGKPLPKSKKTCSKGSKKERNSSGMARKAKRTKCPEILSDESSSDEDEKKNKEESSDDEDKESEEEPPKKTAKREKPKQKATSKSKKSVKSANVKKADSSTTKKNQNSSKKESESEDSSDDEPLIKKLKKPPTDEELKETIKKLLASANLEEVTMKQICKKVYENYPTYDLTERKDFIKTTVKELIS

SEQ ID NO: 11285 - protein, 82 aa, Homo sapiens
MKILCIFLTFVFTVSCGPSVPQKKTREVAERKRECQLVRGACKPECNSWEYVYYYCNVNPCCAVWEYQKPIINKITSKLHQK

SEQ ID NO: 11286 - protein, 69 aa, Homo sapiens
MRIFYYLHFLCYVTFILPATCTLVNADRCTKRYGRCKRDCLESEKQIDICSLPRKICCTEKLYEEDDMF

SEQ ID NO: 11287 - protein, 88 aa, Homo sapiens
MLPDHFSPLSGDIKLSVLALVVLVVLAQTAPDGWIRRCYYGTGRCRKSCKEIERKKEKCGEKHICCVPKEKDKLSHIHDQKETSELYI

SEQ ID NO: 11288 - protein, 913 aa, Homo sapiens
MGPEALSSLLLLLLVASGDADMKGHFDPAKCRYALGMQDRTIPDSDISASSSWSDSTAARHSRLESSDGDGAWCPAGSVFPKEEEYLQVDLQRLHLVALVGTQGRHAGGLGKEFSRSYRLRYSRDGRRWMGWKDRWGQEVISGNEDPEGVVLKDLGPPMVARLVRFYPRADRVMSVCLRVELYGCLWRDGLLSYTAPVGQTMYLSEAVYLNDSTYDGHTVGGLQYGGLGQLADGVVGLDDFRKSQELRVWPGYDYVGWSNHSFSSGYVEMEFEFDRLRAFQAMQVHCNNMHTLGARLPGGVECRFRRGPAMAWEGEPMRHNLGGNLGDPRARAVSVPLGGRVARFLQCRFLFAGPWLLFSEISFISDVVNNSSPALGGTFPPAPWWPPGPPPTNFSSLELEPRGQQPVAKAEGSPTAILIGCLVAIILLLLLIIALMLWRLHWRRLLSKAERRVLEEELTVHLSVPGDTILINNRPGPREPPPYQEPRPRGNPPHSAPCVPNGSALLLSNPAYRLLLATYARPPRGPGPPTPAWAKPTNTQAYSGDYMEPEKPGAPLLPPPPQNSVPHYAEADIVTLQGVTGGNTYAVPALPPGAVGDGPPRVDFPRSRLRFKEKLGEGQFGEVHLCEVDSPQDLVSLDFPLNVRKGHPLLVAVKILRPDATKNARNDFLKEVKIMSRLKDPNIIRLLGVCVQDDPLCMITDYMENGDLNQFLSAHQLEDKAAEGAPGDGQAAQGPTISYPMLLHVAAQIASGMRYLATLNFVHRDLATRNCLVGENFTIKIADFGMSRNLYAGDYYRVQGRAVLPIRWMAWECILMGKFTTASDVWAFGVTLWEVLMLCRAQPFGQLTDEQVIENAGEFFRDQGRQVYLSRPPACPQGLYELMLRCWSRESEQRPPFSQLHRFLAEDALNTV

SEQ ID NO: 11289 - protein, 876 aa, Homo sapiens
MGPEALSSLLLLLLVASGDADMKGHFDPAKCRYALGMQDRTIPDSDISASSSWSDSTAARHSRLESSDGDGAWCPAGSVFPKEEEYLQVDLQRLHLVALVGTQGRHAGGLGKEFSRSYRLRYSRDGRRWMGWKDRWGQEVISGNEDPEGVVLKDLGPPMVARLVRFYPRADRVMSVCLRVELYGCLWRDGLLSYTAPVGQTMYLSEAVYLNDSTYDGHTVGGLQYGGLGQLADGVVGLDDFRKSQELRVWPGYDYVGWSNHSFSSGYVEMEFEFDRLRAFQAMQVHCNNMHTLGARLPGGVECRFRRGPAMAWEGEPMRHNLGGNLGDPRARAVSVPLGGRVARFLQCRFLFAGPWLLFSEISFISDVVNNSSPALGGTFPPAPWWPPGPPPTNFSSLELEPRGQQPVAKAEGSPTAILIGCLVAIILLLLLIIALMLWRLHWRRLLSKAERRVLEEELTVHLSVPGDTILINNRPGPREPPPYQEPRPRGNPPHSAPCVPNGSAYSGDYMEPEKPGAPLLPPPPQNSVPHYAEADIVTLQGVTGGNTYAVPALPPGAVGDGPPRVDFPRSRLRFKEKLGEGQFGEVHLCEVDSPQDLVSLDFPLNVRKGHPLLVAVKILRPDATKNARNDFLKEVKIMSRLKDPNIIRLLGVCVQDDPLCMITDYMENGDLNQFLSAHQLEDKAAEGAPGDGQAAQGPTISYPMLLHVAAQIASGMRYLATLNFVHRDLATRNCLVGENFTIKIADFGMSRNLYAGDYYRVQGRAVLPIRWMAWECILMGKFTTASDVWAFGVTLWEVLMLCRAQPFGQLTDEQVIENAGEFFRDQGRQVYLSRPPACPQGLYELMLRCWSRESEQRPPFSQLHRFLAEDALNTV

SEQ ID NO: 11290 - protein, 243 aa, Homo sapiens
MGPEALSSLLLLLLVASGDADMKGHFDPAKCRYALGMQDRTIPDSDISASSSWSDSTAARHSRLESSDGDGAWCPAGSVFPKEEEYLQVDLQRLHLVALVGTQGRHAGGLGKEFSRSYRLRYSRDGRRWMGWKDRWGQEVISGNEDPEGVVLKDLGPPMVARLVRFYPRADRVMSVCLRVELYGCLWRDCSMGVWASWQMVWWGWMTLGRVRSCGSGQAMTMWDGATTASPVAMWRWSLSLTG

SEQ ID NO: 11291 - protein, 919 aa, Homo sapiens
MGPEALSSLLLLLLVASGDADMKGHFDPAKCRYALGMQDRTIPDSDISASSSWSDSTAARHSRLESSDGDGAWCPAGSVFPKEEEYLQVDLQRLHLVALVGTQGRHAGGLGKEFSRSYRLRYSRDGRRWMGWKDRWGQEVISGNEDPEGVVLKDLGPPMVARLVRFYPRADRVMSVCLRVELYGCLWRDGLLSYTAPVGQTMYLSEAVYLNDSTYDGHTVGGLQYGGLGQLADGVVGLDDFRKSQELRVWPGYDYVGWSNHSFSSGYVEMEFEFDRLRAFQAMQVHCNNMHTLGARLPGGVECRFRRGPAMAWEGEPMRHNLGGNLGDPRARAVSVPLGGRVARFLQCRFLFAGPWLLFSEISFISDVVNNSSPALGGTFPPAPWWPPGPPPTNFSSLELEPRGQQPVAKAEGSPTAILIGCLVAIILLLLLIIALMLWRLHWRRLLSKAERRVLEEELTVHLSVPGDTILINNRPGPREPPPYQEPRPRGNPPHSAPCVPNGSALLLSNPAYRLLLATYARPPRGPGPPTPAWAKPTNTQAYSGDYMEPEKPGAPLLPPPPQNSVPHYAEADIVTLQGVTGGNTYAVPALPPGAVGDGPPRVDFPRSRLRFKEKLGEGQFGEVHLCEVDSPQDLVSLDFPLNVRKGHPLLVAVKILRPDATKNASFSLFSRNDFLKEVKIMSRLKDPNIIRLLGVCVQDDPLCMITDYMENGDLNQFLSAHQLEDKAAEGAPGDGQAAQGPTISYPMLLHVAAQIASGMRYLATLNFVHRDLATRNCLVGENFTIKIADFGMSRNLYAGDYYRVQGRAVLPIRWMAWECILMGKFTTASDVWAFGVTLWEVLMLCRAQPFGQLTDEQVIENAGEFFRDQGRQVYLSRPPACPQGLYELMLRCWSRESEQRPPFSQLHRFLAEDALNTV

SEQ ID NO: 11292 - protein, 894 aa, Homo sapiens
MSLPRCCPHPLRPEGSGAMGPEALSSLLLLLLVASGDADMKGHFDPAKCRYALGMQDRTIPDSDISASSSWSDSTAARHSRLESSDGDGAWCPAGSVFPKEEEYLQVDLQRLHLVALVGTQGRHAGGLGKEFSRSYRLRYSRDGRRWMGWKDRWGQEVISGNEDPEGVVLKDLGPPMVARLVRFYPRADRVMSVCLRVELYGCLWRDGLLSYTAPVGQTMYLSEAVYLNDSTYDGHTVGGLQYGGLGQLADGVVGLDDFRKSQELRVWPGYDYVGWSNHSFSSGYVEMEFEFDRLRAFQAMQVHCNNMHTLGARLPGGVECRFRRGPAMAWEGEPMRHNLGGNLGDPRARAVSVPLGGRVARFLQCRFLFAGPWLLFSEISFISDVVNNSSPALGGTFPPAPWWPPGPPPTNFSSLELEPRGQQPVAKAEGSPTAILIGCLVAIILLLLLIIALMLWRLHWRRLLSKAERRVLEEELTVHLSVPGDTILINNRPGPREPPPYQEPRPRGNPPHSAPCVPNGSAYSGDYMEPEKPGAPLLPPPPQNSVPHYAEADIVTLQGVTGGNTYAVPALPPGAVGDGPPRVDFPRSRLRFKEKLGEGQFGEVHLCEVDSPQDLVSLDFPLNVRKGHPLLVAVKILRPDATKNARNDFLKEVKIMSRLKDPNIIRLLGVCVQDDPLCMITDYMENGDLNQFLSAHQLEDKAAEGAPGDGQAAQGPTISYPMLLHVAAQIASGMRYLATLNFVHRDLATRNCLVGENFTIKIADFGMSRNLYAGDYYRVQGRAVLPIRWMAWECILMGKFTTASDVWAFGVTLWEVLMLCRAQPFGQLTDEQVIENAGEFFRDQGRQVYLSRPPACPQGLYELMLRCWSRESEQRPPFSQLHRFLAEDALNTV

SEQ ID NO: 11293 - protein, 102 aa, Homo sapiens
MSVMKPCLMTIAILMILAQKTPGGLFRSHNGKSREPWNPCELYQGMCRNACREYEIQYLTCPNDQKCCLKLSVKITSSKNVKEDYDSNSNLSVTNSSSYSHI

SEQ ID NO: 11294 - protein, 543 aa, Homo sapiens
MATRRLGVGETLGALNAALGPGGPVWIKETRTRHLRSRDFLAPHRALQARFDDGQVPEHLLHALACLQGPGVAPVLRCAPTPAGLSLQLQRSAVFERVLSAVAAYATPASPASLGQRVLLHCPALRSSPCALRLSQLRTVLVADHLARALRAHGVCVRLVPAVRDPHMLTFLQQLRVDWPAASERASSHTLRSHALEELTSANDGRTLSPGILGRLCLKELVEEQGRTAGYDPNLDNCLVTEDLLSVLAELQEALWHWPEDSHPGLAGASDTGTGGCLVVHVVSCEEEFQQQKLDLLWQKLVDKAPLRQKHLICGPVKVAGAPGTLMTAPEYYEFRHTQVCKASALKHGGDLAQDPAWTEIFGVLSVATIKFEMLSTAPQSQLFLALADSSISTKGTKSGTFVMYNCARLATLFESYKCSMEQGLYPTFPPVSSLDFSLLHDEGEWLLLFNSILPFPDLLSRTAVLDCTAPGLHIAVRTEMICKFLVQLSMDFSSYYNRVHILGEPRPHLFGQMFVRLQLLRAVREVLHTGLAMLGLPPLSHI

SEQ ID NO: 11295 - protein, 516 aa, Homo sapiens
MATRRLGVGETLGALNAALGPGGPVWIKETRTRHLRSRDFLAPHRALQARFDDGQVPEHLLHALACLQGPGVAPVLRCAPTPAGLSLQLQRSAVFERVLSAVAAYATPASPASLGQRVLLHCPALRSSPCALRLSQLRTVLVADHLARALRAHGVCVRLVPAVRDPHMLTFLQQLRVDWPAASERASSHTLRSHALEELTSANDGRTLSPGILGRLCLKELVEEQGRTAGYDPNLDNCLVTEDLLSVLAELQEALWHWPEDSHPGLAGASDTGTGGCLVVHVVSCEEEFQQQKLDLLWQKLVDKAPLRQKHLICGPVKVAGAPGTLMTAPEYYEFRHTQVCKASALKHGGDLAQDPAWTEIFGVLSVATIKFEMLSTAPQSQLFLALADSSISTKGTKSGTFVMYNCARLATLFESYKCSMEQGLYPTFPPVSSLDFSLLHDEYPPLSGSAEPDSSAGLHSPGAPHCCTHRDDMQVPGTAQHGFQLLLQPGTHPGGASTTPLWSDVRPPAASESCA

SEQ ID NO: 11296 - protein, 138 aa, Homo sapiens
MATRRLGVGETLGALNAALGPGGPVWIKETRTRHLRSRDFLAPHRALQARFDDGQVPEHLLHALACLQGPGVAPVLRCAPTPAGLSLQLQRSAVFERVLSAVAAYATPASPASLGQRVLLHCPALRSSPCALTGCACA

SEQ ID NO: 11297 - protein, 376 aa, Homo sapiens
MLTFLQQLRVDWPAASERASSHTLRSHALEELTSANDGRTLSPGILGRLCLKELVEEQGRTAGYDPNLDNCLVTEDLLSVLAELQEALWHWPEDSHPGLAGASDTGTGGCLVVHVVSCEEEFQQQKLDLLWQKLVDKAPLRQKHLICGPVKVAGAPGTLMTAPEYYEFRHTQVCKASALKHGGDLAQDPAWTEIFGVLSVATIKFEMLSTAPQSQLFLALADSSISTKGTKSGTFVMYNCARLATLFESYKCSMEQGLYPTFPPVSSLDFSLLHDEGEWLLLFNSILPFPDLLSRTAVLDCTAPGLHIAVRTEMICKFLVQLSMDFSSYYNRVHILGEPRPHLFGQMFVRLQLLRAVREVLHTGLAMLGLPPLSHI

SEQ ID NO: 11298 - protein, 335 aa, Homo sapiens
MKLPARVFFTLGSRLPCGLAPRRFFSYGTKILYQNTEALQSKFFSPLQKAMLPPNSFQGKVAFITGGGTGLGKGMTTLLSSLGAQCVIASRKMDVLKATAEQISSQTGNKVHAIQCDVRDPDMVQNTVSELIKVAGHPNIVINNAAGNFISPTERLSPNAWKTITDIVLNGTAFVTLEIGKQLIKAQKGAAFLSITTIYAETGSGFVVPSASAKAGVEAMSKSLAAEWGKYGMRFNVIQPGPIKTKGAFSRLDPTGTFEKEMIGRIPCGRLGTVEELANLAAFLCSDYASWINGAVIKFDGGEEVLISGEFNDLRKVTKEQWDTIEELIRKTKGS

SEQ ID NO: 11299 - protein, 326 aa, Homo sapiens
MSGLGKKHLLLMGEFFSYGTKILYQNTEALQSKFFSPLQKAMLPPNSFQGKVAFITGGGTGLGKGMTTLLSSLGAQCVIASRKMDVLKATAEQISSQTGNKVHAIQCDVRDPDMVQNTVSELIKVAGHPNIVINNAAGNFISPTERLSPNAWKTITDIVLNGTAFVTLEIGKQLIKAQKGAAFLSITTIYAETGSGFVVPSASAKAGVEAMSKSLAAEWGKYGMRFNVIQPGPIKTKGAFSRLDPTGTFEKEMIGRIPCGRLGTVEELANLAAFLCSDYASWINGAVIKFDGGEEVLISGEFNDLRKVTKEQWDTIEELIRKTKGS

SEQ ID NO: 11300 - protein, 123 aa, Homo sapiens
MKLLLLALPMLVLLPQVIPAYSGEKKCWNRSGHCRKQCKDGEAVKDTCKNLRACCIPSNEDHRRVPATSPTPLSDSTPGIIDDILTVRFTTDYFEVSSKKDMVEESEAGRGTETSLPNVHHSS

SEQ ID NO: 11301 - protein, 515 aa, Homo sapiens
MWRLPGLLGRALPRTLGPSLWRVTPKSTSPDGPQTTSSTLLVPVPNLDRSGPHGPGTSGGPRSHGWKDAFQWMSSRVSPNTLWDAISWGTLAVLALQLARQIHFQASLPAGPQRVEHCSWHSPLDRFFSSPLWHPCSSLRQHILPSPDGPAPRHTGLREPRLGQEEASAQPRNFSHNSLRGARPQDPSEEGPGDFGFLHASSSIESEAKPAQPQPTGEKEQDKSKTLSLEEAVTSIQQLFQLSVSIAFNFLGTENMKSGDHTAAFSYFQKAAARGYSKAQYNAGLCHEHGRGTPRDISKAVLYYQLAASQGHSLAQYRYARCLLRDPASSWNPERQRAVSLLKQAADSGLREAQAFLGVLFTKEPYLDEQRAVKYLWLAANNGDSQSRYHLGICYEKGLGVQRNLGEALRCYQQSAALGNEAAQERLRALFSMGAAAPGPSDLTVTGLKSFSSPSLCSLNTLLAGTSRLPHASSTGNLGLLCRSGHLGASLEASSRAIPPHPYPLERSVVRLGFG

SEQ ID NO: 11302 - protein, 84 aa, Homo sapiens
MKLLYLFLAILLAIEEPVISGKRHILRCMGNSGICRASCKKNEQPYLYCRNCQSCCLQSYMRISISGKEENTDWSYEKQWPRLP

SEQ ID NO: 11303 - protein, 88 aa, Homo sapiens
MKLLYLFLAILLAIEEPVISVECWMDGHCRLLCKDGEDSIIRCRNRKRCCVPSRYLTIQPVTIHGILGWTTPQMSTTAPKMKTNITNR

SEQ ID NO: 11304 - protein, 43 aa, Homo sapiens
MKLLYLFLAILLAIEEPVISALVRTVGCCLDTARQTPHPSMHG

SEQ ID NO: 11305 - protein, 855 aa, Homo sapiens
MILIPRMLLVLFLLLPILSSAKAQVNPAICRYPLGMSGGQIPDEDITASSQWSESTAAKYGRLDSEEGDGAWCPEIPVEPDDLKEFLQIDLHTLHFITLVGTQGRHAGGHGIEFAPMYKINYSRDGTRWISWRNRHGKQVLDGNSNPYDIFLKDLEPPIVARFVRFIPVTDHSMNVCMRVELYGCVWLDGLVSYNAPAGQQFVLPGGSIIYLNDSVYDGAVGYSMTEGLGQLTDGVSGLDDFTQTHEYHVWPGYDYVGWRNESATNGYIEIMFEFDRIRNFTTMKVHCNNMFAKGVKIFKEVQCYFRSEASEWEPNAISFPLVLDDVNPSARFVTVPLHHRMASAIKCQYHFADTWMMFSEITFQSDAAMYNNSEALPTSPMAPTTYDPMLKVDDSNTRILIGCLVAIIFILLAIIVIILWRQFWQKMLEKASRRMLDDEMTVSLSLPSDSSMFNNNRSSSPSEQGSNSTYDRIFPLRPDYQEPSRLIRKLPEFAPGEEESGCSGVVKPVQPSGPEGVPHYAEADIVNLQGVTGGNTYSVPAVTMDLLSGKDVAVEEFPRKLLTFKEKLGEGQFGEVHLCEVEGMEKFKDKDFALDVSANQPVLVAVKMLRADANKNARNDFLKEIKIMSRLKDPNIIHLLAVCITDDPLCMITEYMENGDLNQFLSRHEPPNSSSSDVRTVSYTNLKFMATQIASGMKYLSSLNFVHRDLATRNCLVGKNYTIKIADFGMSRNLYSGDYYRIQGRAVLPIRWMSWESILLGKFTTASDVWAFGVTLWETFTFCQEQPYSQLSDEQVIENTGEFFRDQGRQTYLPQPAICPDSVYKLMLSCWRRDTKNRPSFQEIHLLLLQQGDE

SEQ ID NO: 11306 - protein, 76 aa, Homo sapiens
MKLLLLLLTVTLLLAQVTPVMKCWGKSGRCRTTCKESEVYYILCKTEAKCCVDPKYVPVKPKLTDTNTSLESTSAV

SEQ ID NO: 11307 - protein, 594 aa, Homo sapiens
MASSTPSSSATSSNAGADPNTTNLRPTTYDTWCGVAHGCTRKLGLKICGFLQRTNSLEEKSRLVSAFKERQSSKNLLSCENSDRDARFRRTETDFSNLFARDLLPAKNGEEQTVQFLLEVVDILLNYVRKTFDRSTKVLDFHHPHQLLEGMEGFNLELSDHPESLEQILVDCRDTLKYGVRTGHPRFFNQLSTGLDIIGLAGEWLTSTANTNMFTYEIAPVFVLMEQITLKKMREIVGWSSKDGDGIFSPGGAISNMYSIMAARYKYFPEVKTKGMAAVPKLVLFTSEQSHYSIKKAGAALGFGTDNVILIKCNERGKIIPADFEAKILEAKQKGYVPFYVNATAGTTVYGAFDPIQEIADICEKYNLWLHVDAAWGGGLLMSRKHRHKLNGIERANSVTWNPHKMMGVLLQCSAILVKEKGILQGCNQMCAGYLFQPDKQYDVSYDTGDKAIQCGRHVDIFKFWLMWKAKGTVGFENQINKCLELAEYLYAKIKNREEFEMVFNGEPEHTNVCFWYIPQSLRGVPDSPQRREKLHKVAPKIKALMMESGTTMVGYQPQGDKANFFRMVISNPAATQSDIDFLIEEIERLGQDL

SEQ ID NO: 11308 - protein, 224 aa, Homo sapiens
MASSTPSSSATSSNAGADPNTTNLRPTTYDTWCGVAHGCTRKLGLKICGFLQRTNSLEEKSRLVSAFKERQSSKNLLSCENSDRDARFRRTETDFSNLFARDLLPAKNGEEQTVQFLLEVVDILLNYVRKTFDRSTKVLDFHHPHQLLEGMEGFNLELSDHPESLEQILVDCRDTLKYGVRTGHPRFFNQLSTGLDIIGLAGEWLTSTANTNMPSDMRECWLLR

SEQ ID NO: 11309 - protein, 425 aa, Homo sapiens
MASSTPSSSATSSNAGADPNTTNLRPTTYDTWCGVAHGCTRKLGLKICGFLQRTNSLEEKSRLVSAFKERQSSKNLLSCENSDRDARFRRTETDFSNLFARDLLPAKNGEEQTVQFLLEVVDILLNYVRKTFDRSTKVLDFHHPHQLLEGMEGFNLELSDHPESLEQILVDCRDTLKYGVRTGHPRFFNQLSTGLDIIGLAGEWLTSTANTNMFTYEIAPVFVLMEQITLKKMREIVGWSSKDGDGIFSPGGAISNMYSIMAARYKYFPEVKTKGMAAVPKLVLFTSEQSHYSIKKAGAALGFGTDNVILIKCNERGKIIPADFEAKILEAKQKGYVPFYVNATAGTTVYGAFDPIQEIADICEKYNLWLHVDGFNFSQLANRIICLATELMTNKGCVTWHPNYSVNMHHGCLGRWAAHVQEAPP

SEQ ID NO: 11310 - protein, 67 aa, Homo sapiens
MKLLLLTLTVLLLLSQLTPGGTQRCWNLYGKCRYRCSKKERVYVYCINNKMCCVKPKYQPKERWWPF

SEQ ID NO: 11311 - protein, 28 aa, Homo sapiens
MKLLLLTLTVLLLLSQLTPDLSNPESTC

SEQ ID NO: 11312 - protein, 640 aa, Homo sapiens
MFSCVKPYEDQNYSALRRDCRRRKVLFEDPLFPATDDSLYYKGTPGPAVRWKRPKGICEDPRLFVDGISSHDLHQGQVGNCWFVAACSSLASRESLWQKVIPDWKEQEWDPEKPNAYAGIFHFHFWRFGEWVDVVIDDRLPTVNNQLIYCHSNSRNEFWCALVEKAYAKLAGCYQALDGGNTADALVDFTGGVSEPIDLTEGDFANDETKRNQLFERMLKVHSRGGLISASIKAVTAADMEARLACGLVKGHAYAVTDVRKVRLGHGLLAFFKSEKLDMIRLRNPWGEREWNGPWSDTSEEWQKVSKSEREKMGVTVQDDGEFWMTFEDVCRYFTDIIKCRVINTSHLSIHKTWEEARLHGAWTLHEDPRQNRGGGCINHKDTFFQNPQYIFEVKKPEDEVLICIQQRPKRSTRREGKGENLAIGFDIYKVEENRQYRMHSLQHKAASSIYINSRSVFLRTDQPEGRYVIIPTTFEPGHTGEFLLRVFTDVPSNCRELRLDEPPHTCWSSLCGYPQLVTQVHVLGAAGLKDSPTGANSYVIIKCEGDKVRSAVQKGTSTPEYNVKGIFYRKKLSQPITVQVWNHRVLKDEFLGQVHLKADPDNLQALHTLHLRDRNSRQPSNLPGTVAVHILSSTSLMAV

SEQ ID NO: 11313 - protein, 343 aa, Homo sapiens
MEAVATATAAKEPDKGCIEPGPGHWGELSRTPVPSKPQDKVEAAEATPVALDSDTSGAENAAVSAMLHAVAASRLPVCSQQQGEPDLTEHEKVAILAQLYHEKPLVFLERFRTGLREEHLACFGHVRGDHRADFYCAEVARQGTARPRTLRTRLRNRRYAALRELIQGGEYFSDEQMRFRAPLLYEQYIGQYLTQEELSARTPTHQPPKPGSPGRPACPLSNLLLQSYEERELQQRLLQQQEEEEACLEEEEEEEDSDEEDQRSGKDSEAWVPDSEERLILREEFTSRMHQRFLDGKDGDFDYSTVDDNPDFDNLDIVARDEEERYFDEEEPEDAPSPELDGD

SEQ ID NO: 11314 - protein, 813 aa, Homo sapiens
MDATALERDAVQFARLAVQRDHEGRYSEAVFYYKEAAQALIYAEMAGSSLENIQEKITEYLERVQALHSAVQSKSADPLKSKHQLDLERAHFLVTQAFDEDEKENVEDAIELYTEAVDLCLKTSYETADKVLQNKLKQLARQALDRAEALSEPLTKPVGKISSTSVKPKPPPVRAHFPLGANPFLERPQSFISPQSCDAQGQRYTAEEIEVLRTTSKINGIEYVPFMNVDLRERFAYPMPFCDRWGKLPLSPKQKTTFSKWVRPEDLTNNPTMIYTVSSFSIKQTIVSDCSFVASLAISAAYERRFNKKLITGIIYPQNKDGEPEYNPCGKYMVKLHLNGVPRKVIIDDQLPVDHKGELLCSYSNNKSELWVSLIEKAYMKVMGGYDFPGSNSNIDLHALTGWIPERIAMHSDSQTFSKDNSFRMLYQRFHKGDVLITASTGMMTEAEGEKWGLVPTHAYAVLDIREFKGLRFIQLKNPWSHLRWKGRYSENDVKNWTPELQKYLNFDPRTAQKIDNGIFWISWDDLCQYYDVIYLSWNPGLFKESTCIHSTWDAKQGPVKDAYSLANNPQYKLEVQCPQGGAAVWVLLSRHITDKDDFANNREFITMVVYKTDGKKVYYPADPPPYIDGIRINSPHYLTKIKLTTPGTHTFTLVVSQYEKQNTIHYTVRVYSACSFTFSKIPSPYTLSKRINGKWSGQSAGGCGNFQETHKNNPIYQFHIEKTGPLLIELRGPRQYSVGFEVVTVSTLGDPGPHGFLRKSSGDYRCGFCYLELENIPSGIFNIIPSTFLPKQEGPFFLDFNSIIPIKITQLQ

SEQ ID NO: 11315 - protein, 452 aa, Homo sapiens
MAAPSAGSWSTFQHKELMAADRGRRILGVCGMHPHHQETLKKNRVVLAKQLLLSELLEHLLEKDIITLEMRELIQAKVGSFSQNVELLNLLPKRGPQAFDAFCEALRETKQGHLEDMLLTTLSGLQHVLPPLSCDYDLSLPFPVCESCPLYKKLRLSTDTVEHSLDNKDGPVCLQVKPCTPEFYQTHFQLAYRLQSRPRGLALVLSNVHFTGEKELEFRSGGDVDHSTLVTLFKLLGYDVHVLCDQTAQEMQEKLQNFAQLPAHRVTDSCIVALLSHGVEGAIYGVDGKLLQLQEVFQLFDNANCPSLQNKPKMFFIQACRGDETDRGVDQQDGKNHAGSPGCEESDAGKEKLPKMRLPTRSDMICGYACLKGTAAMRNTKRGSWYIEALAQVFSERACDMHVADMLVKVNALIKDREGYAPGTEFHRCKEMSEYCSTLCRHLYLFPGHPPT

SEQ ID NO: 11316 - protein, 313 aa, Homo sapiens
MHPHHQETLKKNRVVLAKQLLLSELLEHLLEKDIITLEMRELIQAKVGSFSQNVELLNLLPKRGPQAFDAFCEALRETKQGHLEDMLLTTLSGLQHVLPPLSCDYDLSLPFPVCESCPLYKKLRLSTDTVEHSLDNKDGPVCLQVKPCTPEFYQTHFQLAYRLQSRPRGLALVLSNVHFTGEKELEFRSGGDVDHSTLVTLFKLLGYDVHVLCDQTAQEMQEKLQNFAQLPAHRVTDSCIVALLSHGVEGAIYGVDGKLLQLQEVFQLFDNANCPSLQNKPKMFFIQACRGGGAIGSLGHLLLFTAATASLAL

SEQ ID NO: 11317 - protein, 91 aa, Homo sapiens
MAADRGRRILGVCGMHPHHQETLKKNRVVLAKQLLLSELLEHLLEKDIITLEMRELIQAKVGSFSQNVELLNLLPKRGPQAFDAFCEALHS

SEQ ID NO: 11318 - protein, 703 aa, Homo sapiens
MAAQAAGVSRQRAATQGLGSNQNALKYLGQDFKTLRQQCLDSGVLFKDPEFPACPSALGYKDLGPGSPQTQGIIWKRPTELCPSPQFIVGGATRTDICQGGLGDCWLLAAIASLTLNEELLYRVVPRDQDFQENYAGIFHFQFWQYGEWVEVVIDDRLPTKNGQLLFLHSEQGNEFWSALLEKAYAKLNGCYEALAGGSTVEGFEDFTGGISEFYDLKKPPANLYQIIRKALCAGSLLGCSIDVSSAAEAEAITSQKLVKSHAYSVTGVEEVNFQGHPEKLIRLRNPWGEVEWSGAWSDDAPEWNHIDPRRKEELDKKVEDGEFWMSLSDFVRQFSRLEICNLSPDSLSSEEVHKWNLVLFNGHWTRGSTAGGCQNYPATYWTNPQFKIRLDEVDEDQEESIGEPCCTVLLGLMQKNRRWRKRIGQGMLSIGYAVYQVPKELESHTDAHLGRDFFLAYQPSARTSTYVNLREVSGRARLPPGEYLVVPSTFEPFKDGEFCLRVFSEKKAQALEIGDVVAGNPYEPHPSEVDQEDDQFRRLFEKLAGKDSEITANALKILLNEAFSKRTDIKFDGFNINTCREMISLLDSNGTGTLGAVEFKTLWLKIQKYLEIYWETDYNHSGTIDAHEMRTALRKAGFTLNSQVQQTIALRYACSKLGINFDSFVACMIRLETLFKLFSLLDEDKDGMVQLSLAEWLCCVLV

SEQ ID NO: 11319 - protein, 1984 aa, Homo sapiens
MELTPGAQQQGINYQELTSGWQDVKSMMLVPEPTRKFPSGPLLTSVRFSNLSPESQQQDVKSLEFTVEPKLQSVKHVKLSSVSLQQTIKSVELAPGSLPQRVKYGEQTPRTNYQIMESSELIPRPGHQFAKYAEMIPQPKYQIPKSANLISIPIYHATESSEMAQGLAYKGIDTVEKSVGLTPKLTGRAKESLGMLLQPDLQVPKFVDLTPMVRDQGSKFLGLTPEKSYQILETMELLSQSRPRVKDVGELYMKPLQQTVEYEGITPELKHYFTEAMGLTAEARIQANEFFGMTPKPTSQATGFAERSPRLCPQNLECVEVISEKRLQGEESVVLIPKSLHHVPDSASGMTPGLGHRVPESVELTSKSGVQVEKTLQLTPKPQHHVGSPGIISGLGHQVPESVNLTCKQWLQMEESLEVPLKQTSQVIGHEESVELTSEARQHREVSMGLTKSKNQSMKSPGTTPGPLGRIVEFMRISPEPLDQVTESARTQLQVAQSEEVILIDVPKVVQSVKVTPGPPFQIVKSVTIPRPTPQMVEYIELTPKLQYVRPSEHHTGPCLQDVKSTKLITKPKHQILETVELTGFQIVKTMLIPGPSLQIVKSEELAPGPIPQVVEPIGVALESGIEAINCVDLLPRPHLQELIVPAELTPSPCTQVKSAELTSPQTSPFEEHTILTHKQGLQAVKSTVIKTEPPKVMETEDLNLGHVCQNRDCQKLTSEELQVGTDFSRFLQSSSTTLISSSVRTASELGGLWDSGIQEVSRALDIKNPGTDILQPEETYIDPTMIQSLTFPLALHNQSSDKTANIVENPCPEILGVDVISKETTKRKQMEELENSLQRHLPQSWRSRSRTFQAESGVQKGLIKSFPGRQHNVWESHAWRQRLPRKYLSTMLMLGNILGTTMERKLCSQTSLAERATADTCQSIQNLFGIPAELMEPSQSLPEKGPVTISQPSVVKNYIQRHTFYHGHKKRMALRIWTRGSTSSIIQQYSGTRVRIKKTNSTFNGISQEVIQHMPVSCAGGQLPVLVKSESSLSIFYDREDLVPMEESEDSQSDSQTRISESQHSLKPNYLSQAKTDFSEQFQLLEDLQLKIAAKLLRSQIPPDVPPPLASGLVLKYPICLQCGRCSGLNCHHKLQTTSGPYLLIYPQLHLVRTPEGHGEVRLHLGFRLRIGKRSQISKYRERDRPVIRRSPISPSQRKAKIYTQASKSPTSTIDLQSGPSQSPAPVQVYIRRGQRSRPDLVEKTKTRAPGHYEFTQVHNLPESDSESTQNEKRAKVRTKKTSDSKYPMKRITKRLRKHRKFYTNSRTTIESPSRELAAHLRRKRIGATQTSTASLKRQPKKPSQPKFMQLLFQSLKRAFQTAHRVIASVGRKPVDGTRPDNLWASKNYYPKQNARDYCLPSSIKRDKRSADKLTPAGSTIKQEDILWGGTVQCRSAQQPRRAYSFQPRPLRLPKPTDSQSGIAFQTASVGQPLRTVQKDSSSRSKKNFYRNETSSQESKNLSTPGTRVQARGRILPGSPVKRTWHRHLKDKLTHKEHNHPSFYRERTPRGPSERTRHNPSWRNHRSPSERSQRSSLERRHHSPSQRSHCSPSRKNHSSPSERSWRSPSQRNHCSPPERSCHSLSERGLHSPSQRSHRGPSQRRHHSPSERSHRSPSERSHRSSSERRHRSPSQRSHRGPSERSHCSPSERRHRSPSQRSHRGPSERRHHSPSKRSHRSPARRSHRSPSERSHHSPSERSHHSPSERRHHSPSERSHCSPSERSHCSPSERRHRSPSERRHHSPSEKSHHSPSERSHHSPSERRRHSPLERSRHSLLERSHRSPSERRSHRSFERSHRRISERSHSPSEKSHLSPLERSRCSPSERRGHSSSGKTCHSPSERSHRSPSGMRQGRTSERSHRSSCERTRHSPSEMRPGRPSGRNHCSPSERSRRSPLKEGLKYSFPGERPSHSLSRDFKNQTTLLGTTHKNPKAGQVWRPEATR

SEQ ID NO: 11320 - protein, 783 aa, Homo sapiens
MPGKLRSDAGLESDTAMKKGETLRKQTEEKEKKEKPKSDKTEEIAEEEETVFPKAKQVKKKAEPSEVDMNSPKSKKAKKKEEPSQNDISPKTKSLRKKKEPIEKKVVSSKTKKVTKNEEPSEEEIDAPKPKKMKKEKEMNGETREKSPKLKNGFPHPEPDCNPSEAASEESNSEIEQEIPVEQKEGAFSNFPISEETIKLLKGRGVTFLFPIQAKTFHHVYSGKDLIAQARTGTGKTFSFAIPLIEKLHGELQDRKRGRAPQVLVLAPTRELANQVSKDFSDITKKLSVACFYGGTPYGGQFERMRNGIDILVGTPGRIKDHIQNGKLDLTKLKHVVLDEVDQMLDMGFADQVEEILSVAYKKDSEDNPQTLLFSATCPHWVFNVAKKYMKSTYEQVDLIGKKTQKTAITVEHLAIKCHWTQRAAVIGDVIRVYSGHQGRTIIFCETKKEAQELSQNSAIKQDAQSLHGDIPQKQREITLKGFRNGSFGVLVATNVAARGLDIPEVDLVIQSSPPKDVESYIHRSGRTGRAGRTGVCICFYQHKEEYQLVQVEQKAGIKFKRIGVPSATEIIKASSKDAIRLLDSVPPTAISHFKQSAEKLIEEKGAVEALAAALAHISGATSVDQRSLINSNVGFVTMILQCSIEMPNISYAWKELKEQLGEEIDSKVKGMVFLKGKLGVCFDVPTASVTEIQEKWHDSRRWQLSVATEQPELEGPREGYGGFRGQREGSRGFRGQRDGNRRFRGQREGSRGPRGQRSGGGNKSNRSQNKGQKRSFSKAFGQ

SEQ ID NO: 11321 - protein, 715 aa, Homo sapiens
MNSPKSKKAKKKEEPSQNDISPKTKSLRKKKEPIEKKVVSSKTKKVTKNEEPSEEEIDAPKPKKMKKEKEMNGETREKSPKLKNGFPHPEPDCNPSEAASEESNSEIEQEIPVEQKEGAFSNFPISEETIKLLKGRGVTFLFPIQAKTFHHVYSGKDLIAQARTGTGKTFSFAIPLIEKLHGELQDRKRGRAPQVLVLAPTRELANQVSKDFSDITKKLSVACFYGGTPYGGQFERMRNGIDILVGTPGRIKDHIQNGKLDLTKLKHVVLDEVDQMLDMGFADQVEEILSVAYKKDSEDNPQTLLFSATCPHWVFNVAKKYMKSTYEQVDLIGKKTQKTAITVEHLAIKCHWTQRAAVIGDVIRVYSGHQGRTIIFCETKKEAQELSQNSAIKQDAQSLHGDIPQKQREITLKGFRNGSFGVLVATNVAARGLDIPEVDLVIQSSPPKDVESYIHRSGRTGRAGRTGVCICFYQHKEEYQLVQVEQKAGIKFKRIGVPSATEIIKASSKDAIRLLDSVPPTAISHFKQSAEKLIEEKGAVEALAAALAHISGATSVDQRSLINSNVGFVTMILQCSIEMPNISYAWKELKEQLGEEIDSKVKGMVFLKGKLGVCFDVPTASVTEIQEKWHDSRRWQLSVATEQPELEGPREGYGGFRGQREGSRGFRGQRDGNRRFRGQREGSRGPRGQRSGGGNKSNRSQNKGQKRSFSKAFGQ

SEQ ID NO: 11322 - protein, 166 aa, Homo sapiens
MEAGPHPRPGHCCKPGGRLDMNHGFVHHIRRNQIARDDYDKKVKQAAKEKVRRRHTPAPTRPRKPDLQVYLPRHRDVSAHPRNPDYEESGESSSSGGSELEPSGHQLFCLEYEADSGEVTSVIVYQGDDPGKVSEKVSAHTPLDPPMREALKLRIQEEIAKRQSQH

SEQ ID NO: 11323 - protein, 127 aa, Homo sapiens
MEAGPHPRPGHCCKPGGRLDMNHGFVHHIRRNQIARDDYDKKVKQAAKEKVRRRHTPAPTRPRKPDLQVYLPRHRGEAARPACLQPARSSCNALPFSIGKNHFLLLRFSSSRLFPEPPPQRSQISAE

SEQ ID NO: 11324 - protein, 270 aa, Homo sapiens
MLRQLLLAALCLAGPPAPARACQLPSEWRPLSEGCRAELAETIVYARVLALHPEAPGLYNHLPWQYHAGQGGLFYSAEVEMLCDQAWGSMLEVPAGSRLNLTGLGYFSCHSHTVVQDYSYFFFLRMDENYNLLPHGVNFQDAIFPDTQENRRMFSSLFQFSNCSQGQQLATFSSDWEIQEDSRLMCSSVQKALFEEEDHVKKLQQKVATLEKRNRQLRERVKKVKRSLRQARKKGRHLELANQKLSEKLAAGALPHINARGPVRPPYLRG

SEQ ID NO: 11325 - protein, 145 aa, Homo sapiens
MDENYNLLPHGVNFQDAIFPDTQENRRMFSSLFQFSNCSQGQQLATFSSDWEIQEDSRLMCSSVQKALFEEEDHVKKLQQKVATLEKRNRQLRERVKKVKRSLRQARKKGRHLELANQKLSEKLAAGALPHINARGPVRPPYLRG

SEQ ID NO: 11326 - protein, 527 aa, Homo sapiens
MADSRDPASDQMQHWKEQRAAQKADVLTTGAGNPVGDKLNVITVGPRGPLLVQDVVFTDEMAHFDRERIPERVVHAKGAGAFGYFEVTHDITKYSKAKVFEHIGKKTPIAVRFSTVAGESGSADTVRDPRGFAVKFYTEDGNWDLVGNNTPIFFIRDPILFPSFIHSQKRNPQTHLKDPDMVWDFWSLRPESLHQVSFLFSDRGIPDGHRHMNGYGSHTFKLVNANGEAVYCKFHYKTDQGIKNLSVEDAARLSQEDPDYGIRDLFNAIATGKYPSWTFYIQVMTFNQAETFPFNPFDLTKVWPHKDYPLIPVGKLVLNRNPVNYFAEVEQIAFDPSNMPPGIEASPDKMLQGRLFAYPDTHRHRLGPNYLHIPVNCPYRARVANYQRDGPMCMQDNQGGAPNYYPNSFGAPEQQPSALEHSIQYSGEVRRFNTANDDNVTQVRAFYVNVLNEEQRKRLCENIAGHLKDAQIFIQKKAVKNFTEVHPDYGSHIQALLDKYNAEKPKNAIHTFVQSGSHLAAREKANL

SEQ ID NO: 11327 - protein, 228 aa, Homo sapiens
MTDQTYCDRLVQDTPFLTGHGRLSEQQVDRIILQLNRYYPQILTNKEAEKFRNPKASLRVRLCDLLSHLQRSGERDCQEFYRALYIHAQPLHSRLPSRHALRKFHITNHACLVLARGGHPSLPLMAWMSSMTTQVCCSPGLASPLASAPPQRPPSGPEGRVWQAQAVQMLVSVSHFLPLPPSLSHGSFHTAWGILYVHSCPSFSNLIPRGSLHVCVDSNLVPTAAWRS

SEQ ID NO: 11328 - protein, 183 aa, Homo sapiens
MTDQTYCDRLVQDTPFLTGHGRLSEQQVDRIILQLNRYYPQILTNKEAEKFRNPKASLRVRLCDLLSHLQRSGERDCQEFYRALYIHAQPLHSRLPSRHALQNSDCTELDSGSQSGELSNRGPMSFLAGLGLAVGLALLLYCYPPDPKGLPGTRRVLGFSPVIIDRHVSRYLLAFLADDLGGL

SEQ ID NO: 11329 - protein, 483 aa, Homo sapiens
MASLLWGGDAGAAESERLNSHFSNLSQPRKNLWGIKSTAVRNIDGSINNINEDDEEDVVDLAANSLLNKLIHQSLVESSHRVEVLQKDPSSPLYSVKTFEELRLKEELLKGIYAMGFNRPSKIQEMALPMMLAHPPQNLIAQSQSGTGKTAAFVLAMLSRVNALELFPQCLCLAPTYELALQTGRVVEQMGKFCVDVQVMYAIRGNRIPRGTDITKQIIIGTPGTVLDWCFKLKLIDLTKIRVFVLDEADVMIDTQGFSDHSIRIQRALPSECQMLLFSATFEDSVWHFAERIIPDPNVIKLRKEELTLNNIRQYYVLCEHRKDKYQALCNIYGSITIGQAIIFCQTRRNAKWLTVEMIQDGHQVSLLSGELTVEQRASIIQRFRDGKEKVLITTNVCARGIDVKQVTIVVNFDLPVKQGEEPDYETYLHRIGRTGRFGKKGLAFNMIEVDELPSLMKIQDHFNSSIKQLNAEDMDEIEKIDY

SEQ ID NO: 11330 - protein, 369 aa, Homo sapiens
MGFNRPSKIQEMALPMMLAHPPQNLIAQSQSGTGKTAAFVLAMLSRVNALELFPQCLCLAPTYELALQTGRVVEQMGKFCVDVQVMYAIRGNRIPRGTDITKQIIIGTPGTVLDWCFKLKLIDLTKIRVFVLDEADVMIDTQGFSDHSIRIQRALPSECQMLLFSATFEDSVWHFAERIIPDPNVIKLRKEELTLNNIRQYYVLCEHRKDKYQALCNIYGSITIGQAIIFCQTRRNAKWLTVEMIQDGHQVSLLSGELTVEQRASIIQRFRDGKEKVLITTNVCARGIDVKQVTIVVNFDLPVKQGEEPDYETYLHRIGRTGRFGKKGLAFNMIEVDELPSLMKIQDHFNSSIKQLNAEDMDEIEKIDY

SEQ ID NO: 11331 - protein, 785 aa, Homo sapiens
MKLGKVEFCHFLQLIALFLCFSGMSQAELSRSRSKPYFQSGRSRTKRSWVWNQFFVLEEYMGSDPLYVGKLHSDVDKGDGSIKYILSGEGASSIFIIDENTGDIHATKRLDREEQAYYTLRAQALDRLTNKPVEPESEFVIKIQDINDNEPKFLDGPYTAGVPEMSPVGTSVVQVTATDADDPTYGNSARVVYSILQGQPYFSVEPKTGVIKTALPNMDREAKDQYLLVIQAKDMVGQNGGLSGTTSVTVTLTDVNDNPPRFPRRSYQYNVPESLPVASVVARIKAADADIGANAEMEYKIVDGDGLGIFKISVDKETQEGIITIQKELDFEAKTSYTLRIEAANKDADPRFLSLGPFSDTTTVKIIVEDVDEPPVFSSPLYPMEVSEATQVGNIIGTVAAHDPDSSNSPVRYSIDRNTDLERYFNIDANSGVITTAKSLDRETNAIHNITVLAMESQNPSQVGRGYVAITILDINDNAPEFAMDYETTVCENAQPGQVIQKISAVDKDEPSNGHQFYFSLTTDATNNHNFSLKDNKDNTASILTRRNGFRRQEQSVYYLPIFIVDSGSPSLSSTNTLTIRVCDCDADGVAQTCNAEAYVLPAGLSTGALIAILACVLTLLVLILLIVTMRRRKKEPLIFDEERDIRENIVRYDDEGGGEEDTEAFDMAALRNLNVIRDTKTRRDVTPEIQFLSRPAFKSIPDNVIFREFIWERLKEADVDPGAPPYDSLQTYAFEGNGSVAESLSSLDSISSNSDQNYDYLSDWGPRFKRLADMYGTGQESLYS

SEQ ID NO: 11332 - protein, 766 aa, Homo sapiens
MASTRSIELEHFEERDKRPRPGSRRGAPSSSGGSSSSGPKGNGLIPSPAHSAHCSFYRTRTLQALSSEKKAKKARFYRNGDRYFKGLVFAISSDRFRSFDALLIELTRSLSDNVNLPQGVRTIYTIDGSRKVTSLDELLEGESYVCASNEPFRKVDYTKNINPNWSVNIKGGTSRALAAASSVKSEVKESKDFIKPKLVTVIRSGVKPRKAVRILLNKKTAHSFEQVLTDITEAIKLDSGVVKRLCTLDGKQVTCLQDFFGDDDVFIACGPEKFRYAQDDFVLDHSECRVLKSSYSRSSAVKYSGSKSPGPSRRSKSPASVNGTPSSQLSTPKSTKSSSSSPTSPGSFRGLKQISAHGRSSSNVNGGPELDRCISPEGVNGNRCSESSTLLEKYKIGKVIGDGNFAVVKECIDRSTGKEFALKIIDKAKCCGKEHLIENEVSILRRVKHPNIIMLVEEMETATELFLVMELVKGGDLFDAITSSTKYTERDGSAMVYNLANALRYLHGLSIVHRDIKPENLLVCEYPDGTKSLKLGDFGLATVVEGPLYTVCGTPTYVAPEIIAETGYGLKVDIWAAGVITYILLCGFPPFRSENNLQEDLFDQILAGKLEFPAPYWDNITDSAKELISQMLQVNVEARCTAGQILSHPWVSDDASQENNMQAEVTGKLKQHFNNALPKQNSTTTGVSVIMNTALDKEGQIFCSKHCQDSGRPGMEPISPVPPSVEEIPVPGEAVPAPTPPESPTPHPPPAAPGGERAGTWRRHRD

SEQ ID NO: 11333 - protein, 765 aa, Homo sapiens
MASTRSIELEHFEERDKRPRPGSRRGAPSSSGGSSSSGPKGNGLIPSPAHSAHCSFYRTRTLQALSSEKKAKKARFYRNGDRYFKGLVFAISSDRFRSFDALLIELTRSLSDNVNLPQGVRTIYTIDGSRKVTSLDELLEGESYVCASNEPFRKVDYTKNINPNWSVNIKGGTSRALAAASSVKSEVKESKDFIKPKLVTVIRSGVKPRKAVRILLNKKTAHSFEQVLTDITEAIKLDSGVVKRLCTLDGKQVTCLQDFFGDDDVFIACGPEKFRYAQDDFVLDHSECRVLKSSYSRSSAVKYSGSKSPGPSRRSKSPASVNGTPSSQLSTPKSTKSSSSSPTSPGSFRGLKISAHGRSSSNVNGGPELDRCISPEGVNGNRCSESSTLLEKYKIGKVIGDGNFAVVKECIDRSTGKEFALKIIDKAKCCGKEHLIENEVSILRRVKHPNIIMLVEEMETATELFLVMELVKGGDLFDAITSSTKYTERDGSAMVYNLANALRYLHGLSIVHRDIKPENLLVCEYPDGTKSLKLGDFGLATVVEGPLYTVCGTPTYVAPEIIAETGYGLKVDIWAAGVITYILLCGFPPFRSENNLQEDLFDQILAGKLEFPAPYWDNITDSAKELISQMLQVNVEARCTAGQILSHPWVSDDASQENNMQAEVTGKLKQHFNNALPKQNSTTTGVSVIMNTALDKEGQIFCSKHCQDSGRPGMEPISPVPPSVEEIPVPGEAVPAPTPPESPTPHPPPAAPGGERAGTWRRHRD

SEQ ID NO: 11334 - protein, 783 aa, Homo sapiens
MASTRSIELEHFEERDKRPRPGSRRGAPSSSGGSSSSGPKGNGLIPSPAHSAHCSFYRTRTLQALSSEKKAKKARFYRNGDRYFKGLVFAISSDRFRSFDALLIELTRSLSDNVNLPQGVRTIYTIDGSRKVTSLDELLEGESYVCASNEPFRKVDYTKNINPNWSVNIKGGTSRALAAASSVKSEVKESKDFIKPKLVTVIRSGVKPRKAVRILLNKKTAHSFEQVLTDITEAIKLDSGVVKRLCTLDGKQVTCLQDFFGDDDVFIACGPEKFRYAQDDFVLDHSECRVLKSSYSRSSAVKYSGSKSPGPSRRSKSPASVKRGGHYSSAYSTAKSPVNGTPSSQLSTPKSTKSSSSSPTSPGSFRGLKQISAHGRSSSNVNGGPELDRCISPEGVNGNRCSESSTLLEKYKIGKVIGDGNFAVVKECIDRSTGKEFALKIIDKAKCCGKEHLIENEVSILRRVKHPNIIMLVEEMETATELFLVMELVKGGDLFDAITSSTKYTERDGSAMVYNLANALRYLHGLSIVHRDIKPENLLVCEYPDGTKSLKLGDFGLATVVEGPLYTVCGTPTYVAPEIIAETGYGLKVDIWAAGVITYILLCGFPPFRSENNLQEDLFDQILAGKLEFPAPYWDNITDSAKELISQMLQVNVEARCTAGQILSHPWVSDDASQENNMQAEVTGKLKQHFNNALPKQNSTTTGVSVIMNTALDKEGQIFCSKHCQDSGRPGMEPISPVPPSVEEIPVPGEAVPAPTPPESPTPHPPPAAPGGERAGTWRRHRD

SEQ ID NO: 11335 - protein, 851 aa, Homo sapiens
MAPDLASQRHSESFPSVNSRPNVILPGREGRREGLPPGGGTRGSLVPTRPVPPSPAPLGTSPYSWSRSGPGRGGGAGSSRVPRGVPGPAVCAPGSLLHHASPTQTMAAADGSLFDNPRTFSRRPPAQASRQAKATKRKYQASSEAPPAKRRNETSFLPAKKTSVKETQRTFKGNAQKMFSPKKHSVSTSDRNQEERQCIKTSSLFKNNPDIPELHRPVVKQVQEKVFTSAAFHELGLHPHLISTINTVLKMSSMTSVQKQSIPVLLEGRDALVRSQTGSGKTLAYCIPVVQSLQAMESKIQRSDGPYALVLVPTRELALQSFDTVQKLLKPFTWIVPGVLMGGEKRKSEKARLRKGINILISTPGRLVDHIKSTKNIHFSRLRWLVFDEADRILDLGFEKDITVILNAVNAECQKRQNVLLSATLTEGVTRLADISLHDPVSISVLDKSHDQLNPKDKAVQEVCPPPAGDKLDSFAIPESLKQHVTVVPSKLRLVCLAAFILQKCKFEEDQKMVVFFSSCELVEFHYSLFLQTLLSSSGAPASGQLPSASMRLKFLRLHGGMEQEERTAVFQEFSHSRRGVLLCTDVAARGLDLPQVTWIVQYNAPSSPAEYIHRIGRTARIGCHGSSLLILAPSEAEYVNSLASHKINVSEIKMEDILCVLTRDDCFKGKRWGAQKSHAVGPQEIRERATVLQTVFEDYVHSSERRVSWAKKALQSFIQAYATYPRELKHIFHVRSLHLGHVAKSFGLRDAPRNLSALTRKKRKAHVKRPDLHKKTQSKHSLAEILRSEYSSGMEADIAKVKKQNAPGEPGGRPLQHSLQPTPCFGRGKTLKWRKTQKGVQRDSKTSQKV

SEQ ID NO: 11336 - protein, 778 aa, Homo sapiens
MAPDLASQRHSESFPSVNSRPNVILPGREGRREGLPPGGGTRGSLVPTRPVPPSPAPLGTSPYSWSRSGPGRGGGAGSSRVPRGVPGPAVCAPGSLLHHASPTQTMAAADGSLFDNPRTFSRRPPAQASRQAKATKRKYQASSEAPPAKRRNETSFLPAKKTSVKETQRTFKGNAQKMFSPKKHSVSTSDRNQEERQCIKTSSLFKNNPDIPELHRPVVKQVQEKVFTSAAFHELGLHPHLISTINTVLKMSSMTSVQKQSIPVLLEGRDALVRSQTGSGKTLAYCIPVVQSLQAMESKIQRSDGPYALVLVPTRELALQSFDTVQKLLKPFTWIVPGVLMGGEKRKSEKARLRKGINILISTPGRLVDHIKSTKNIHFSRLRWLVFDEADRILDLGFEKDITVILNAVNAECQKRQNVLLSATLTEGVTRLADISLHDPVSISVLDKSHDQLNPKDKAVQEVCPPPAGDKLDSFAIPESLKQHVTVVPSKLRLVCLAAFILQKCKFEEDQKMVVFFSSCELVEFHYSLFLQTLLSSSGAPASGQLPSASMRLKFLRLHGGMEQEERTAVFQEFSHSRRGVLLCTDVAARGLDLPQVTWIVQNTSTGLEEPPGLAAMGAACSFWLLRRQNMSTRWLLTKSTLQSFIQAYATYPRELKHIFHVRSLHLGHVAKSFGLRDAPRNLSALTRKKRKAHVKRPDLHKKTQSKHSLAEILRSEYSSGMEADIAKVKKQNAPGEPGGRPLQHSLQPTPCFGRGKTLKWRKTQKGVQRDSKTSQKV

SEQ ID NO: 11337 - protein, 319 aa, Homo sapiens
MAPDLASQRHSESFPSVNSRPNVILPGREGRREGLPPGGGTRGSLVPTRPVPPSPAPLGTSPYSWSRSGPGRGGGAGSSRVPRGVPGPAVCAPGSLLHHASPTQTMAAADGSLFDNPRTFSRRPPAQASRQAKATKRKYQASSEAPPAKRRNETSFLPAKKTSVKETQRTFKGNAQKMFSPKKHSVSTSDRNQEERQCIKTSSLFKNNPDIPELHRPVVKQVQEKVFTSAAFHELGLHPHLISTINTVLKMSSMTSVQKQSIPVLLEGRDALVRSQTGSGKTLAYCIPVVQSLQAMESKIQVLLLSTFYEEEQRLRKVK

SEQ ID NO: 11338 - protein, 585 aa, Homo sapiens
MAPDLASQRHSESFPSVNSRPNVILPGREGRREGLPPGGGTRGSLVPTRPVPPSPAPLGTSPYSWSRSGPGRGGGAGSSRVPRGVPGPAVCAPGSLLHHASPTQTMAAADGSLFDNPRTFSRRPPAQASRQAKATKRKYQASSEAPPAKRRNETSFLPAKKTSVKETQRTFKGNAQKMFSPKKHSVSTSDRNQEERQCIKTSSLFKNNPDIPELHRPVVKQVQEKVFTSAAFHELGLHPHLISTINTVLKMSSMTSVQKQSIPVLLEGRDALVRSQTGSGKTLAYCIPVVQSLQAMESKIQRSDGPYALVLVPTRELALQSFDTVQKLLKPFTWIVPGVLMGGEKRKSEKARLRKGINILISTPGRLVDHIKSTKNIHFSRLRWLVFDEADRILDLGFEKDITVILNAVNAECQKRQNVLLSATLTEGVTRLADISLHDPVSISVLDKSHDQLNPKDKAVQEVCPPPAGDKLDSFAIPESLKQHVTVVPSKLRLVCLAAFILQKCKFEEDQKMVVFFSSCELVEFHYSLFLQTLLSSSGAPASGQLPSASMRLKFLRLHGGMEQEERTAVFQEFSHSRRGVLLCT

SEQ ID NO: 11339 - protein, 428 aa, Homo sapiens
MDVVDSLLVNGSNITPPCELGLENETLFCLDQPRPSKEWQPAVQILLYSLIFLLSVLGNTLVITVLIRNKRMRTVTNIFLLSLAVSDLMLCLFCMPFNLIPNLLKDFIFGSAVCKTTTYFMGTSVSVSTFNLVAISLERYGAICKPLQSRVWQTKSHALKVIAATWCLSFTIMTPYPIYSNLVPFTKNNNQTANMCRFLLPNDVMQQSWHTFLLLILFLIPGIVMMVAYGLISLELYQGIKFEASQKKSAKERKPSTTSSGKYEDSDGCYLQKTRPPRKLELRQLSTGSSSRANRIRSNSSAANLMAKKRVIRMLIVIVVLFFLCWMPIFSANAWRAYDTASAERRLSGTPISFILLLSYTSSCVNPIIYCFMNKRFRLGFMATFPCCPNPGPPGARGEVGEEEEGGTTGASLSRFSYSHMSASVPPQ

SEQ ID NO: 11340 - protein, 1226 aa, Homo sapiens
MSKLKVIPEKSLTNNSRIVGLLAQLEKINAEPSESDTARYVTSKILHLAQSQEKTRREMTAKGSTGMEILLSTLENTKDLQTTLNILSILVELVSAGGGRRVSFLVTKGGSQILLQLLMNASKESPPHEDLMVQIHSILAKIGPKDKKFGVKARINGALNITLNLVKQNLQNHRLVLPCLQLLRVYSANSVNSVSLGKNGVVELMFKIIGPFSKKNSSLIKVALDTLAALLKSKTNARRAVDRGYVQVLLTIYVDWHRHDNRHRNMLIRKGILQSLKSVTNIKLGRKAFIDANGMKILYNTSQECLAVRTLDPLVNTSSLIMRKCFPKNRLPLPTIKSSFHFQLPVIPVTGPVAQLYSLPPEVDDVVDESDDNDDIDVEAENETENEDDLDQNFKNDDIETDINKLKPQQEPGRTIEDLKMYEHLFPELVDDFQDYDLISKEPKPFVFEGKVRGPIVVPTAGEETSGNSGNLRKVVMKENISSKGDEGEKKSTFMDLAKEDIKDNDRTLQQQPGDQNRTISSVHGLNNDIVKALDRITLQNIPSQTAPGFTAEMKKDCSLPLTVLTCAKACPHMATCGNVLFEGRTVQLGKLCCTGVETEDDEDTESNSSVEQASVEVPDGPTLHDPDLYIEIVKNTKSVPEYSEVAYPDYFGHIPPPFKEPILERPYGVQRTKIAQDIERLIHQSDIIDRVVYDLDNPNYTIPEEGDILKFNSKFESGNLRKVIQIRKNEYDLILNSDINSNHYHQWFYFEVSGMRPGVAYRFNIINCEKSNSQFNYGMQPLMYSVQEALNARPWWIRMGTDICYYKNHFSRSSVAAGGQKGKSYYTITFTVNFPHKDDVCYFAYHYPYTYSTLQMHLQKLESAHNPQQIYFRKDVLCETLSGNSCPLVTITAMPESNYYEHICHFRNRPYVFLSARVHPGETNASWVMKGTLEYLMSNNPTAQSLRESYIFKIVPMLNPDGVINGNHRCSLSGEDLNRQWQSPSPDLHPTIYHAKGLLQYLAAVKRLPLVYCDYHGHSRKKNVFMYGCSIKETVWHTNDNATSCDVVEDTGYRTLPKILSHIAPAFCMSSCSFVVEKSKESTARVVVWREIGVQRSYTMESTLCGCDQGKYKGLQIGTRELEEMGAKFCVGLLRLKRLTSPLEYNLPSSLLDFENDLIESSCKVTSPTTYVLDEDEPRFLEEVDYSAESNDELDIELAENVGDYEPSAQEEVLSDSELSRTYLP

SEQ ID NO: 11341 - protein, 1186 aa, Homo sapiens
MSKLKVIPEKSLTNNSRIVGLLAQLEKINAEPSESDTARYVTSKILHLAQSQEKTRREMTAKGSTGMEILLSTLENTKDLQTTLNILSILVELVSAGGGRRVSFLVTKGGSQILLQLLMNASKESPPHEDLMVQIHSILAKIGPKDKKFGVKARINGALNITLNLVKQNLQNHRLVLPCLQLLRVYSANSVNSVSLGKNGVVELMFKIIGPFSKKNSSLIKVALDTLAALLKSKTNARRAVDRGYVQVLLTIYVDWHRHDNRHRNMLIRKGILQSLKSVTNIKLGRKAFIDANGMKILYNTSQLPVIPVTGPVAQLYSLPPEVDDVVDESDDNDDIDVEAENETENEDDLDQNFKNDDIETDINKLKPQQEPGRTIEDLKMYEHLFPELVDDFQDYDLISKEPKPFVFEGKVRGPIVVPTAGEETSGNSGNLRKVVMKENISSKGDEGEKKSTFMDLAKEDIKDNDRTLQQQPGDQNRTISSVHGLNNDIVKALDRITLQNIPSQTAPGFTAEMKKDCSLPLTVLTCAKACPHMATCGNVLFEGRTVQLGKLCCTGVETEDDEDTESNSSVEQASVEVPDGPTLHDPDLYIEIVKNTKSVPEYSEVAYPDYFGHIPPPFKEPILERPYGVQRTKIAQDIERLIHQSDIIDRVVYDLDNPNYTIPEEGDILKFNSKFESGNLRKVIQIRKNEYDLILNSDINSNHYHQWFYFEVSGMRPGVAYRFNIINCEKSNSQFNYGMQPLMYSVQEALNARPWWIRMGTDICYYKNHFSRSSVAAGGQKGKSYYTITFTVNFPHKDDVCYFAYHYPYTYSTLQMHLQKLESAHNPQQIYFRKDVLCETLSGNSCPLVTITAMPESNYYEHICHFRNRPYVFLSARVHPGETNASWVMKGTLEYLMSNNPTAQSLRESYIFKIVPMLNPDGVINGNHRCSLSGEDLNRQWQSPSPDLHPTIYHAKGLLQYLAAVKRLPLVYCDYHGHSRKKNVFMYGCSIKETVWHTNDNATSCDVVEDTGYRTLPKILSHIAPAFCMSSCSFVVEKSKESTARVVVWREIGVQRSYTMESTLCGCDQGKYKGLQIGTRELEEMGAKFCVGLLRLKRLTSPLEYNLPSSLLDFENDLIESSCKVTSPTTYVLDEDEPRFLEEVDYSAESNDELDIELAENVGDYEPSAQEEVLSDSELSRTYLP

SEQ ID NO: 11342 - protein, 1238 aa, Homo sapiens
MRTGSAASSAAAAAAAAAASASPATGVCMKTPGGGRRGIRRDPGAEPGAAALRGPRQRPILSRLTNNSRIVGLLAQLEKINAEPSESDTARYVTSKILHLAQSQEKTRREMTAKGSTGMEILLSTLENTKDLQTTLNILSILVELVSAGGGRRVSFLVTKGGSQILLQLLMNASKESPPHEDLMVQIHSILAKIGPKDKKFGVKARINGALNITLNLVKQNLQNHRLVLPCLQLLRVYSANSVNSVSLGKNGVVELMFKIIGPFSKKNSSLIKVALDTLAALLKSKTNARRAVDRGYVQVLLTIYVDWHRHDNRHRNMLIRKGILQSLKSVTNIKLGRKAFIDANGMKILYNTSQLPVIPVTGPVAQLYSLPPEVDDVVDESDDNDDIDVEAENETENEDDLDQNFKNDDIETDINKLKPQQEPGRTIEDLKMYEHLFPELVDDFQDYDLISKEPKPFVFEGKVRGPIVVPTAGEETSGNSGNLRKVVMKENISSKGDEGEKKSTFMDLAKEDIKDNDRTLQQQPGDQNRTISSVHGLNNDIVKALDRITLQNIPSQTAPGFTAEMKKDCSLPLTVLTCAKACPHMATCGNVLFEGRTVQLGKLCCTGVETEDDEDTESNSSVEQASVEVPDGPTLHDPDLYIEIVKNTKSVPEYSEVAYPDYFGHIPPPFKEPILERPYGVQRTKIAQDIERLIHQSDIIDRVVYDLDNPNYTIPEEGDILKFNSKFESGNLRKVIQIRKNEYDLILNSDINSNHYHQWFYFEVSGMRPGVAYRFNIINCEKSNSQFNYGMQPLMYSVQEALNARPWWIRMGTDICYYKNHFSRSSVAAGGQKGKSYYTITFTVNFPHKDDVCYFAYHYPYTYSTLQMHLQKLESAHNPQQIYFRKDVLCETLSGNSCPLVTITAMPESNYYEHICHFRNRPYVFLSARVHPGETNASWVMKGTLEYLMSNNPTAQSLRESYIFKIVPMLNPDGVINGNHRCSLSGEDLNRQWQSPSPDLHPTIYHAKGLLQYLAAVKRLPLVYCDYHGHSRKKNVFMYGCSIKETVWHTNDNATSCDVVEDTGYRTLPKILSHIAPAFCMSSCSFVVEKSKESTARVVVWREIGVQRSYTMESTLCGCDQGKYKGLQIGTRELEEMGAKFCVGLLRLKRLTSPLEYNLPSSLLDFENDLIESSCKVTSPTTYVLDEDEPRFLEEVDYSAESNDELDIELAENVGDYEPSAQEEVLSDSELSRTYLP

SEQ ID NO: 11343 - protein, 902 aa, Homo sapiens
MFPALETHLKQTIPDPYEDFMYRHLQYYGYFKAQRGSLPNSATHQHVRKNNPQCLLNGSLGEKDDLIPDTLQKEKLLWPISLSSAVHRQIEAINRDFHSCLGWMQWRGLSSLQPPPPRFKDSPASAFRVAGITDSHMLSLPHLRSRQLLYDELDEVNPRLREPQELFSILSTKRPLQAPRWPIECEVIKENIHHIEWAPPQPEYFYQPKGNEKVPEIVGEKKGTVVYQLDSVPIEGSYFTSSRVGGKRGIVKELAVTLQGPEDNTLLFESRFESGNLQKAVRVDTYEYELTLRTDLYTNKHTQWFYFRVQNTRKDATYRFTIVNLLKPKSLYTVGMKPLLYSQLDANTRNIGWRREGNEIKYYKNNTDDGQQPFYCLTWTIQFPYDQDTCFFAHFYPYTYTDLQCYLLSVANNPIQSQFCKLQTLCRSLAGNTVYLLTITNPSQTPQEAAAKKAVVLSARVHPGESNGSWVMKGFLDFILSNSPDAQLLRDIFVFKVLPMLNPDGVIVGNYRCSLAGRDLNRHYKTILKESFPCIWYTRNMIKRLLEEREVLLYCDFHGHSRKNNIFLYGCNNNNRKYWLHERVFPLMLCKNAPDKFSFHSCNFKVQKCKEGTGRVVMWRMGILNSYTMESTFGGSTLGNKRDTHFTIEDLKSLGYHVCDTLLDFCDPDQMKFTQCLAELKELLRQEIHKKFHELGQDVDLEGSWSDISLSDIESSTSGSDSSLSDGLPVHLANIADELTQKKKMFKKKKKKSLQTRKQRNEQYQKKNLMQKLKLTEDTSEKAGFASTLQKQPTFFKNSENSSFLPMKNENPRLNETNLNRRDKDTPLDPSMATLILPKNKGRMQNKKPGFTVSCSPKRTINSSQEPAPGMKPNWPRSRYPATKRGCAAMAAYPSLHIYTYP

SEQ ID NO: 11344 - protein, 431 aa, Homo sapiens
MKGFLDFILSNSPDAQLLRDIFVFKVLPMLNPDGVIVGNYRCSLAGRDLNRHYKTILKESFPCIWYTRNMIKRLLEEREVLLYCDFHGHSRKNNIFLYGCNNNNRKYWLHERVFPLMLCKNAPDKFSFHSCNFKVQKCKEGTGRVVMWRMGILNSYTMESTFGGSTLGNKRDTHFTIEDLKSLGYHVCDTLLDFCDPDQMKFTQCLAELKELLRQEIHKKFHELGQDVDLEGSWSDISLSDIESSTSGSDSSLSDGLPVHLANIADELTQKKKMFKKKKKKSLQTRKQRNEQYQKKNLMQKLKLTEDTSEKAGFASTLQKQPTFFKNSENSSFLPMKNENPRLNETNLNRRDKDTPLDPSMATLILPKNKGRMQNKKPGFTVSCSPKRTINSSQEPAPGMKPNWPRSRYPATKRGCAAMAAYPSLHIYTYP

SEQ ID NO: 11345 - protein, 285 aa, Homo sapiens
MWRMGILNSYTMESTFGGSTLGNKRDTHFTIEDLKSLGYHVCDTLLDFCDPDQMKFTQCLAELKELLRQEIHKKFHELGQDVDLEGSWSDISLSDIESSTSGSDSSLSDGLPVHLANIADELTQKKKMFKKKKKKSLQTRKQRNEQYQKKNLMQKLKLTEDTSEKAGFASTLQKQPTFFKNSENSSFLPMKNENPRLNETNLNRRDKDTPLDPSMATLILPKNKGRMQNKKPGFTVSCSPKRTINSSQEPAPGMKPNWPRSRYPATKRGCAAMAAYPSLHIYTYP

SEQ ID NO: 11346 - protein, 158 aa, Homo sapiens
MEPPEGAGTGEIVKEAEVPQAALGVPAQGTGDNGHTPVEEEVGGIPVPAPGLLQVTERRQPLSSVSSLEVHFDLLDLTELTDMSDQELAEVFADSDDENLNTESPAGLHPLPRAGYLRSPSWTRTRAEQSHEKQPLGDPERQATVLDTFLTVERPQED

SEQ ID NO: 11347 - protein, 178 aa, Homo sapiens
MGETWKNICSTVRHGWWLRDHRMAGLPIPPEIVKEAEVPQAALGVPAQGTGDNGHTPVEEEVGGIPVPAPGLLQVTERRQPLSSVSSLEVHFDLLDLTELTDMSDQELAEVFADSDDENLNTESPAGLHPLPRAGYLRSPSWTRTRAEQSHEKQPLGDPERQATVLDTFLTVERPQED

SEQ ID NO: 11348 - protein, 278 aa, Homo sapiens
MTQQWREVNEDREAVAQARSWQSLNLGDRDMGVSFIETALALSAARARRPLLTSHPPSRPFQPPKHTPSPPPAPRVNSRHPGRSVSLSLPSASQAPPVPLASPEGRPHTVGAPHASTWKRTRGRQRARPPKIVKEAEVPQAALGVPAQGTGDNGHTPVEEEVGGIPVPAPGLLQVTERRQPLSSVSSLEVHFDLLDLTELTDMSDQELAEVFADSDDENLNTESPAGLHPLPRAGYLRSPSWTRTRAEQSHEKQPLGDPERQATVLDTFLTVERPQED

SEQ ID NO: 11349 - protein, 662 aa, Homo sapiens
MSHVAVENALGLDQQFAGLDLNSSDNQSGGSTASKGRYIPPHLRNREATKGFYDKDSSGWSSSKDKDAYSSFGSRSDSRGKSSFFSDRGSGSRGRFDDRGRSDYDGIGSRGDRSGFGKFERGGNSRWCDKSDEDDWSKPLPPSERLEQELFSGGNTGINFEKYDDIPVEATGNNCPPHIESFSDVEMGEIIMGNIELTRYTRPTPVQKHAIPIIKEKRDLMACAQTGSGKTAAFLLPILSQIYSDGPGEALRAMKENGRYGRRKQYPISLVLAPTRELAVQIYEEARKFSYRSRVRPCVVYGGADIGQQIRDLERGCHLLVATPGRLVDMMERGKIGLDFCKYLVLDEADRMLDMGFEPQIRRIVEQDTMPPKGVRHTMMFSATFPKEIQMLARDFLDEYIFLAVGRVGSTSENITQKVVWVEESDKRSFLLDLLNATGKDSLTLVFVETKKGADSLEDFLYHEGYACTSIHGDRSQRDREEALHQFRSGKSPILVATAVAARGLDISNVKHVINFDLPSDIEEYVHRIGRTGRVGNLGLATSFFNERNINITKDLLDLLVEAKQEVPSWLENMAYEHHYKGSSRGRSKSSRFSGGFGARDYRQSSGASSSSFSSSRASSSRSGGGGHGSSRGFGGGGYGGFYNSDGYGGNYNSQGVDWWGN

SEQ ID NO: 11350 - protein, 646 aa, Homo sapiens
MSHVAVENALGLDQQFAGLDLNSSDNQSGGSTASSFYDKDSSGWSSSKDKDAYSSFGSRSDSRGKSSFFSDRGSGSRGRFDDRGRSDYDGIGSRGDRSGFGKFERGGNSRWCDKSDEDDWSKPLPPSERLEQELFSGGNTGINFEKYDDIPVEATGNNCPPHIESFSDVEMGEIIMGNIELTRYTRPTPVQKHAIPIIKEKRDLMACAQTGSGKTAAFLLPILSQIYSDGPGEALRAMKENGRYGRRKQYPISLVLAPTRELAVQIYEEARKFSYRSRVRPCVVYGGADIGQQIRDLERGCHLLVATPGRLVDMMERGKIGLDFCKYLVLDEADRMLDMGFEPQIRRIVEQDTMPPKGVRHTMMFSATFPKEIQMLARDFLDEYIFLAVGRVGSTSENITQKVVWVEESDKRSFLLDLLNATGKDSLTLVFVETKKGADSLEDFLYHEGYACTSIHGDRSQRDREEALHQFRSGKSPILVATAVAARGLDISNVKHVINFDLPSDIEEYVHRIGRTGRVGNLGLATSFFNERNINITKDLLDLLVEAKQEVPSWLENMAYEHHYKGSSRGRSKSSRFSGGFGARDYRQSSGASSSSFSSSRASSSRSGGGGHGSSRGFGGGGYGGFYNSDGYGGNYNSQGVDWWGN

SEQ ID NO: 11351 - protein, 259 aa, Homo sapiens
MGAGNFLTALEVPVAALAGAASDRRASCERVSPPPPLPHFRLPPLPRSRLPGPVSRPEPGAPLLGCWLQWGAPSPGPLCLLFRLCSCTCFAPLPAGADMDPNPRAALERQQLRLRERQKFFEDILQPETEFVFPLSHLHLESQRPPIGSISSMEVNVDTLEQVELIDLGDPDAADVFLPCEDPPPTPQSSGMDNHLEELSLPVPTSDRTTSRTSSSSSSDSSTNLHSPNPSDDGADTPLAQSDEEEERGDGGAEPGACS

SEQ ID NO: 11352 - protein, 161 aa, Homo sapiens
MDPNPRAALERQQLRLRERQKFFEDILQPETEFVFPLSHLHLESQRPPIGSISSMEVNVDTLEQVELIDLGDPDAADVFLPCEDPPPTPQSSGMDNHLEELSLPVPTSDRTTSRTSSSSSSDSSTNLHSPNPSDDGADTPLAQSDEEEERGDGGAEPGACS

SEQ ID NO: 11353 - protein, 112 aa, Homo sapiens
MDPNPRAALERQQLRLRERQKFFEDILQPETEFVFPLSHLHLESQRPPIGSISSMEVNVDTLEQVELIDLGDPDAADVFLPCEDPPPTPQSSGMPLCFGDFSASQPEPDVRL

SEQ ID NO: 11354 - protein, 263 aa, Homo sapiens
MESWALAVFPEYRVSLLWCLELASPLWSLGQAPPLHETWFVGHTWFQGRGKRSPRAEVSRPEPGAPLLGCWLQWGAPSPGPLCLLFRLCSCTCFAPLPAGADMDPNPRAALERQQLRLRERQKFFEDILQPETEFVFPLSHLHLESQRPPIGSISSMEVNVDTLEQVELIDLGDPDAADVFLPCEDPPPTPQSSGMDNHLEELSLPVPTSDRTTSRTSSSSSSDSSTNLHSPNPSDDGADTPLAQSDEEEERGDGGAEPGACS

SEQ ID NO: 11355 - protein, 660 aa, Homo sapiens
MSHVVVKNDPELDQQLANLDLNSEKQSGGASTASKGRYIPPHLRNREASKGFHDKDSSGWSCSKDKDAYSSFGSRDSRGKPGYFSERGSGSRGRFDDRGRSDYDGIGNRERPGFGRFERSGHSRWCDKSVEDDWSKPLPPSERLEQELFSGGNTGINFEKYDDIPVEATGSNCPPHIENFSDIDMGEIIMGNIELTRYTRPTPVQKHAIPIIKGKRDLMACAQTGSGKTAAFLLPILSQIYTDGPGEALKAVKENGRYGRRKQYPISLVLAPTRELAVQIYEEARKFSYRSRVRPCVVYGGADIGQQIRDLERGCHLLVATPGRLVDMMERGKIGLDFCKYLVLDEADRMLDMGFEPQIRRIVEQDTMPPKGVRHTMMFSATFPKEIQMLARDFLDEYIFLAVGRVGSTSENITQKVVWVEDLDKRSFLLDILGATGSDSLTLVFVETKKGADSLEDFLYHEGYACTSIHGDRSQRDREEALHQFRSGKSPILVATAVAARGLDISNVRHVINFDLPSDIEEYVHRIGRTGRVGNLGLATSFFNEKNMNITKDLLDLLVEAKQEVPSWLENMAYEHHYKGGSRGRSKSNRFSGGFGARDYRQSSGSSSSGFGASRGSSSRSGGGGYGNSRGFGGGGYGGFYNSDGYGGNYNSQGVDWWGN

SEQ ID NO: 11356 - protein, 657 aa, Homo sapiens
MEIGRPRKDTWKLANLDLNSEKQSGGASTASKGRYIPPHLRNREASKGFHDKDSSGWSCSKDKDAYSSFGSRDSRGKPGYFSERGSGSRGRFDDRGRSDYDGIGNRERPGFGRFERSGHSRWCDKSVEDDWSKPLPPSERLEQELFSGGNTGINFEKYDDIPVEATGSNCPPHIENFSDIDMGEIIMGNIELTRYTRPTPVQKHAIPIIKGKRDLMACAQTGSGKTAAFLLPILSQIYTDGPGEALKAVKENGRYGRRKQYPISLVLAPTRELAVQIYEEARKFSYRSRVRPCVVYGGADIGQQIRDLERGCHLLVATPGRLVDMMERGKIGLDFCKYLVLDEADRMLDMGFEPQIRRIVEQDTMPPKGVRHTMMFSATFPKEIQMLARDFLDEYIFLAVGRVGSTSENITQKVVWVEDLDKRSFLLDILGATGSDSLTLVFVETKKGADSLEDFLYHEGYACTSIHGDRSQRDREEALHQFRSGKSPILVATAVAARGLDISNVRHVINFDLPSDIEEYVHRIGRTGRVGNLGLATSFFNEKNMNITKDLLDLLVEAKQEVPSWLENMAYEHHYKGGSRGRSKSNRFSGGFGARDYRQSSGSSSSGFGASRGSSSRSGGGGYGNSRGFGGGGYGGFYNSDGYGGNYNSQGVDWWGN

SEQ ID NO: 11357 - protein, 291 aa, Homo sapiens
MSHVVVKNDPELDQQLANLDLNSEKQSGGASTASKGRYIPPHLRNREASKGFHDKDSSGWSCSKDKDAYSSFGSRDSRGKPGYFSERGSGSRGRFDDRGRSDYDGIGNRERPGFGRFERSGHSRWCDKSVEDDWSKPLPPSERLEQELFSGGNTGINFEKYDDIPVEATGSNCPPHIENFSDIDMGEIIMGNIELTRYTRPTPVQKHAIPIIKGKRDLMACAQTGSGKTAAFLLPILSQIYTDGPGEALKAVKENGRYGRRKQYPISLVLAPTRELAVQIYEEARKVKYSF

SEQ ID NO: 11358 - protein, 493 aa, Homo sapiens
MRGFGPGLTARRLLPLRLPPRPPGPRLASGQAAGALERAMDELLRRAVPPTPAYELREKTPAPAEGQCADFVSFYGGLAETAQRAELLGRLARGFGVDHGQVAEQSAGVLHLRQQQREAAVLLQAEDRLRYALVPRYRGLFHHISKLDGGVRFLVQLRADLLEAQALKLVEGPDVREMNGVLKGMLSEWFSSGFLNLERVTWHSPCEVLQKISEAEAVHPVKNWMDMKRRVGPYRRCYFFSHCSTPGEPLVVLHVALTGDISSNIQAIVKEHPPSETEEKNKITAAIFYSISLTQQGLQGVELGTFLIKRVVKELQREFPHLGVFSSLSPIPGFTKWLLGLLNSQTKEHGRNELFTDSECKEISEITGGPINETLKLLLSSSEWVQSEKLVRALQTPLMRLCAWYLYGEKHRGYALNPVANFHLQNGAVLWRINWMADVSLRGITGSCGLMANYRYFLEETGPNSTSYLGSKIIKASEQVLSLVAQFQKNSKL

SEQ ID NO: 11359 - protein, 454 aa, Homo sapiens
MDELLRRAVPPTPAYELREKTPAPAEGQCADFVSFYGGLAETAQRAELLGRLARGFGVDHGQVAEQSAGVLHLRQQQREAAVLLQAEDRLRYALVPRYRGLFHHISKLDGGVRFLVQLRADLLEAQALKLVEGPDVREMNGVLKGMLSEWFSSGFLNLERVTWHSPCEVLQKISEAEAVHPVKNWMDMKRRVGPYRRCYFFSHCSTPGEPLVVLHVALTGDISSNIQAIVKEHPPSETEEKNKITAAIFYSISLTQQGLQGVELGTFLIKRVVKELQREFPHLGVFSSLSPIPGFTKWLLGLLNSQTKEHGRNELFTDSECKEISEITGGPINETLKLLLSSSEWVQSEKLVRALQTPLMRLCAWYLYGEKHRGYALNPVANFHLQNGAVLWRINWMADVSLRGITGSCGLMANYRYFLEETGPNSTSYLGSKIIKASEQVLSLVAQFQKNSKL

SEQ ID NO: 11360 - protein, 430 aa, Homo sapiens
MAANLSRNGPALQEAYVRVVTEKSPTDWALFTYEGNSNDIRVAGTGEGGLEEMVEELNSGKVMYAFCRVKDPNSGLPKFVLINWTGEGVNDVRKGACASHVSTMASFLKGAHVTINARAEEDVEPECIMEKVAKASGANYSFHKESGRFQDVGPQAPVGSVYQKTNAVSEIKRVGKDSFWAKAEKEEENRRLEEKRRAEEAQRQLEQERRERELREAARREQRYQEQGGEASPQRTWEQQQEVVSRNRNEQESAVHPREIFKQKERAMSTTSISSPQPGKLRSPFLQKQLTQPETHFGREPAAAISRPRADLPAEEPAPSTPPCLVQAEEEAVYEEPPEQETFYEQPPLVQQQGAGSEHIDHHIQGQGLSGQGLCARALYDYQAADDTEISFDPENLITGIEVIDEGWWRGYGPDGHFGMFPANYVELIE

SEQ ID NO: 11361 - protein, 431 aa, Homo sapiens
MAANLSRNGPALQEAYVRVVTEKSPTDWALFTYEGNSNDIRVAGTGEGGLEEMVEELNSGKVMYAFCRVKDPNSGLPKFVLINWTGEGVNDVRKGACASHVSTMASFLKGAHVTINARAEEDVEPECIMEKVAKASGANYSFHKESGRFQDVGPQAPVGSVYQKTNAVSEIKRVGKDSFWAKAEKEEENRRLEEKRRAEEAQRQLEQERRERELREAARREQRYQEQGGEASPQSRTWEQQQEVVSRNRNEQESAVHPREIFKQKERAMSTTSISSPQPGKLRSPFLQKQLTQPETHFGREPAAAISRPRADLPAEEPAPSTPPCLVQAEEEAVYEEPPEQETFYEQPPLVQQQGAGSEHIDHHIQGQGLSGQGLCARALYDYQAADDTEISFDPENLITGIEVIDEGWWRGYGPDGHFGMFPANYVELIE

SEQ ID NO: 11362 - protein, 439 aa, Homo sapiens
MAANLSRNGPALQEAYVRVVTEKSPTDWALFTYEGNSNDIRVAGTGEGGLEEMVEELNSGKVMYAFCRVKDPNSGLPKFVLINWTGEGVNDVRKGACASHVSTMASFLKGAHVTINARAEEDVEPECIMEKVAKASGANYSFHKESGRFQDVGPQAPVGSVYQKTNAVSEIKRVGKDSFWAKAEKEEENRRLEEKRRAEEAQRQLEQERRERELREAARREQRYQEQGGEASPQSRTWEQQQEVVSRNRNEQGSTCASLQESAVHPREIFKQKERAMSTTSISSPQPGKLRSPFLQKQLTQPETHFGREPAAAISRPRADLPAEEPAPSTPPCLVQAEEEAVYEEPPEQETFYEQPPLVQQQGAGSEHIDHHIQGQGLSGQGLCARALYDYQAADDTEISFDPENLITGIEVIDEGWWRGYGPDGHFGMFPANYVELIE

SEQ ID NO: 11363 - protein, 336 aa, Homo sapiens
MKATAMTSAWLAQGGAHVTINARAEEDVEPECIMEKVAKASGANYSFHKESGRFQDVGPQAPVGSVYQKTNAVSEIKRVGKDSFWAKAEKEEENRRLEEKRRAEEAQRQLEQERRERELREAARREQRYQEQGGEASPQSRTWEQQQEVVSRNRNEQESAVHPREIFKQKERAMSTTSISSPQPGKLRSPFLQKQLTQPETHFGREPAAAISRPRADLPAEEPAPSTPPCLVQAEEEAVYEEPPEQETFYEQPPLVQQQGAGSEHIDHHIQGQGLSGQGLCARALYDYQAADDTEISFDPENLITGIEVIDEGWWRGYGPDGHFGMFPANYVELIE

SEQ ID NO: 11364 - protein, 327 aa, Homo sapiens
MASFLKGAHVTINARAEEDVEPECIMEKVAKASGANYSFHKESGRFQDVGPQAPVGSVYQKTNAVSEIKRVGKDSFWAKAEKEEENRRLEEKRRAEEAQRQLEQERRERELREAARREQRYQEQGGEASPQRTWEQQQEVVSRNRNEQESAVHPREIFKQKERAMSTTSISSPQPGKLRSPFLQKQLTQPETHFGREPAAAISRPRADLPAEEPAPSTPPCLVQAEEEAVYEEPPEQETFYEQPPLVQQQGAGSEHIDHHIQGQGLSGQGLCARALYDYQAADDTEISFDPENLITGIEVIDEGWWRGYGPDGHFGMFPANYVELIE

SEQ ID NO: 11365 - protein, 382 aa, Homo sapiens
MAANLSRNGPALQEAYVRVVTEKSPTDWALFTYEGNSNDIRVAGTGEGGLEEMVEELNSGKVMYAFCRVKDPNSGLPKFVLINWTGEGVNDVRKGACASHVSTMASFLKGSVYQKTNAVSEIKRVGKDSFWAKAEKEEENRRLEEKRRAEEAQRQLEQERRERELREAARREQRYQEQGGEASPQSRTWEQQQEVVSRNRNEQESAVHPREIFKQKERAMSTTSISSPQPGKLRSPFLQKQLTQPETHFGREPAAAISRPRADLPAEEPAPSTPPCLVQAEEEAVYEEPPEQETFYEQPPLVQQQGAGSEHIDHHIQGQGLSGQGLCARALYDYQAADDTEISFDPENLITGIEVIDEGWWRGYGPDGHFGMFPANYVELIE

SEQ ID NO: 11366 - protein, 94 aa, Homo sapiens
MRTLAILAAILLVALQAQAEPLQARADEVAAAPEQIAADIPEVVVSLAWDESLAPKHPGSRKNMDCYCRIPACIAGERRYGTCIYQGRLWAFCC

SEQ ID NO: 11367 - protein, 622 aa, Homo sapiens
MEESEPERKRARTDEVPAGGSRSEAEDEDDEDYVPYVPLRQRRQLLLQKLLQRRRKGAAEEEQQDSGSEPRGDEDDIPLGPQSNVSLLDQHQHLKEKAEARKESAKEKQLKEEEKILESVAEGRALMSVKEMAKGITYDDPIKTSWTPPRYVLSMSEERHERVRKKYHILVEGDGIPPPIKSFKEMKFPAAILRGLKKKGIHHPTPIQIQGIPTILSGRDMIGIAFTGSGKTLVFTLPVIMFCLEQEKRLPFSKREGPYGLIICPSRELARQTHGILEYYCRLLQEDSSPLLRCALCIGGMSVKEQMETIRHGVHMMVATPGRLMDLLQKKMVSLDICRYLALDEADRMIDMGFEGDIRTIFSYFKGQRQTLLFSATMPKKIQNFAKSALVKPVTINVGRAGAASLDVIQEVEYVKEEAKMVYLLECLQKTPPPVLIFAEKKADVDAIHEYLLLKGVEAVAIHGGKDQEERTKAIEAFREGKKDVLVATDVASKGLDFPAIQHVINYDMPEEIENYVHRIGRTGRSGNTGIATTFINKACDESVLMDLKALLLEAKQKVPPVLQVLHCGDESMLDIGGERGCAFCGGLGHRITDCPKLEAMQTKQVSNIGRKDYLAHSSMDF

SEQ ID NO: 11368 - protein, 938 aa, Homo sapiens
MNWNKGGPGTKRGFGFGGFAISAGKKEEPKLPQQSHSAFGATSSSSGFGKSAPPQLPSFYKIGSKRANFDEENAYFEDEEEDSSNVDLPYIPAENSPTRQQFHSKPVDSDSDDDPLEAFMAEVEDQAARDMKRLEEKDKERKNVKGIRDDIEEEDDQEAYFRYMAENPTAGVVQEEEEDNLEYDSDGNPIAPTKKIIDPLPPIDHSEIDYPPFEKNFYNEHEEITNLTPQQLIDLRHKLNLRVSGAAPPRPGSSFAHFGFDEQLMHQIRKSEYTQPTPIQCQGVPVALSGRDMIGIAKTGSGKTAAFIWPMLIHIMDQKELEPGDGPIAVIVCPTRELCQQIHAECKRFGKAYNLRSVAVYGGGSMWEQAKALQEGAEIVVCTPGRLIDHVKKKATNLQRVSYLVFDEADRMFDMGFEYQVRSIASHVRPDRQTLLFSATFRKKIEKLARDILIDPIRVVQGDIGEANEDVTQIVEILHSGPSKWNWLTRRLVEFTSSGSVLLFVTKKANAEELANNLKQEGHNLGLLHGDMDQSERNKVISDFKKKDIPVLVATDVAARGLDIPSIKTVINYDVARDIDTHTHRIGRTGRAGEKGVAYTLLTPKDSNFAGDLVRNLEGANQHVSKELLDLAMQNAWFRKSRFKGGKGKKLNIGGGGLGYRERPGLGSENMDRGNNNVMSNYEAYKPSTGAMGDRLTAMKAAFQSQYKSHFVAASLSNQKAGSSAAGASGWTSAGSLNSVPTNSAQQGHNSPDSPVTSAAKGIPGFGNTGNISGAPVTYPSAGAQGVNNTASGNNSREGTGGSNGKRERYTENRGSSRHSHGETGNRHSDSPRHGDGGRHGDGYRHPESSSRHTDGHRHGENRHGGSAGRHGENRGANDGRNGESRKEAFNRESKMEPKMEPKVDSSKMDKVDSKTDKTADGFAVPEPPKRKKSRWDS

SEQ ID NO: 11369 - protein, 819 aa, Homo sapiens
MAEVEDQAARDMKRLEEKDKERKNVKGIRDDIEEEDDQEAYFRYMAENPTAGVVQEEEEDNLEYDSDGNPIAPTKKIIDPLPPIDHSEIDYPPFEKNFYNEHEEITNLTPQQLIDLRHKLNLRVSGAAPPRPGSSFAHFGFDEQLMHQIRKSEYTQPTPIQCQGVPVALSGRDMIGIAKTGSGKTAAFIWPMLIHIMDQKELEPGDGPIAVIVCPTRELCQQIHAECKRFGKAYNLRSVAVYGGGSMWEQAKALQEGAEIVVCTPGRLIDHVKKKATNLQRVSYLVFDEADRMFDMGFEYQVRSIASHVRPDRQTLLFSATFRKKIEKLARDILIDPIRVVQGDIGEANEDVTQIVEILHSGPSKWNWLTRRLVEFTSSGSVLLFVTKKANAEELANNLKQEGHNLGLLHGDMDQSERNKVISDFKKKDIPVLVATDVAARGLDIPSIKTVINYDVARDIDTHTHRIGRTGRAGEKGVAYTLLTPKDSNFAGDLVRNLEGANQHVSKELLDLAMQNAWFRKSRFKGGKGKKLNIGGGGLGYRERPGLGSENMDRGNNNVMSNYEAYKPSTGAMGDRLTAMKAAFQSQYKSHFVAASLSNQKAGSSAAGASGWTSAGSLNSVPTNSAQQGHNSPDSPVTSAAKGIPGFGNTGNISGAPVTYPSAGAQGVNNTASGNNSREGTGGSNGKRERYTENRGSSRHSHGETGNRHSDSPRHGDGGRHGDGYRHPESSSRHTDGHRHGENRHGGSAGRHGENRGANDGRNGESRKEAFNRESKMEPKMEPKVDSSKMDKVDSKTDKTADGFAVPEPPKRKKSRWDS

SEQ ID NO: 11370 - protein, 470 aa, Homo sapiens
MGIWTSGTDIFLSLWEIYVSPRSPGWMDFIQHLGVCCLVALISVGLLSVAACWFLPSIIAAAASWIITCVLLCCSKHARCFILLVFLSCGLREGRNALIAAGTGIVILGHVENIFHNFKGLLDGMTCNLRAKSFSIHFPLLKKYIEAIQWIYGLATPLSVFDDLVSWNQTLAVSLFSPSHVLEAQLNDSKGEVLSVLYQMATTTEVLSSLGQKLLAFAGLSLVLLGTGLFMKRFLGPCGWKYENIYITRQFVQFDERERHQQRPCVLPLNKEERRKYVIIPTFWPTPKERKNLGLFFLPILIHLCIWVLFAAVDYLLYRLIFSVSKQFQSLPGFEVHLKLHGEKQGTQDIIHDSSFNISVFEPNCIPKPKFLLSETWVPLSVILLILVMLGLLSSILMQLKILVSASFYPSVERKRIQYLHAKLLKKRSKQPLGEVKRRLSLYLTKIHFWLPVLKMIRKKQMDMASADKS

SEQ ID NO: 11371 - protein, 283 aa, Homo sapiens
MGIWTSGTDIFLSLWEIYVSPRSPGWMDFIQHLGVCCLVALISVGLLSVAACWFLPSIIAAAASWIITCVLLCCSKHARCFILLVFLSCGLREGRNALIAAGTGIVILGHVENIFHNFKGLLDGMTCNLRAKSFSIHFPLLKKYIEAIQWIYGLATPLSVFDDLVSWNQTLAVSLFSPSHVLEAQLNDSKGEVLSVLYQMATTTEVLSSLGQKLLAFAGLSLVLLGTGLFMKRFLGPCGWKYENIYITRQFVQFDERERHQQRPCVLPLNKEERRKFISGFQS

SEQ ID NO: 11372 - protein, 1031 aa, Homo sapiens
MGRESRHYRKRSASRGRSGSRSRSRSPSDKRSKRGDDRRSRSRDRDRRRERSRSRDKRRSRSRDRKRLRRSRSRERDRSRERRRSRSRDRRRSRSRSRGRRSRSSSPGNKSKKTENRSRSKEKTDGGESSKEKKKDKDDKEDEKEKDAGNFDQNKLEEEMRKRKERVEKWREEQRKKAMENIGELKKEIEEMKQGKKWSLEDDDDDEDDPAEAEKEGNEMEGEELDPLDAYMEEVKEEVKKFNMRSVKGGGGNEKKSGPTVTKVVTVVTTKKAVVDSDKKKGELMENDQDAMEYSSEEEEVDLQTALTGYQTKQRKLLEPVDHGKIEYEPFRKNFYVEVPELAKMSQEEVNVFRLEMEGITVKGKGCPKPIKSWVQCGISMKILNSLKKHGYEKPTPIQTQAIPAIMSGRDLIGIAKTGSGKTIAFLLPMFRHIMDQRSLEEGEGPIAVIMTPTRELALQITKECKKFSKTLGLRVVCVYGGTGISEQIAELKRGAEIIVCTPGRMIDMLAANSGRVTNLRRVTYVVLDEADRMFDMGFEPQVMRIVDNVRPDRQTVMFSATFPRAMEALARRILSKPIEVQVGGRSVVCSDVEQQVIVIEEEKKFLKLLELLGHYQESGSVIIFVDKQEHADGLLKDLMRASYPCMSLHGGIDQYDRDSIINDFKNGTCKLLVATSVAARGLDVKHLILVVNYSCPNHYEDYVHRAGRTGRAGNKGYAYTFITEDQARYAGDIIKALELSGTAVPPDLEKLWSDFKDQQKAEGKIIKKSSGFSGKGFKFDETEQALANERKKLQKAALGLQDSDDEDAAVDIDEQIESMFNSKKRVKDMAAPGTSSVPAPTAGNAEKLEIAKRLALRINAQKNLGIESQDVMQQATNAILRGGTILAPTVSAKTIAEQLAEKINAKLNYVPLEKQEEERQDGGQNESFKRYEEELEINDFPQTARWKVTSKEALQRISEYSEAAITIRGTYFPPGKEPKEGERKIYLAIESANELAVQKAKAEITRLIKEELIRLQNSYQPTNKGRYKVL

SEQ ID NO: 11373 - protein, 724 aa, Homo sapiens
MGDEDWEAEINPHMSSYVPIFEKDRYSGENGDNFNRTPASSSEMDDGPSRRDHFMKSGFASGRNFGNRDAGECNKRDNTSTMGGFGVGKSFGNRGFSNSRFEDGDSSGFWRESSNDCEDNPTRNRGFSKRGGYRDGNNSEASGPYRRGGRGSFRGCRGGFGLGSPNNDLDPDECMQRTGGLFGSRRPVLSGTGNGDTSQSRSGSGSERGGYKGLNEEVITGSGKNSWKSEAEGGESSDTQGPKVTYIPPPPPEDEDSIFAHYQTGINFDKYDTILVEVSGHDAPPAILTFEEANLCQTLNNNIAKAGYTKLTPVQKYSIPIILAGRDLMACAQTGSGKTAAFLLPILAHMMHDGITASRFKELQEPECIIVAPTRELVNQIYLEARKFSFGTCVRAVVIYGGTQLGHSIRQIVQGCNILCATPGRLMDIIGKEKIGLKQIKYLVLDEADRMLDMGFGPEMKKLISCPGMPSKEQRQTLMFSATFPEEIQRLAAEFLKSNYLFVAVGQVGGACRDVQQTVLQVGQFSKREKLVEILRNIGDERTMVFVETKKKADFIATFLCQEKISTTSIHGDREQREREQALGDFRFGKCPVLVATSVAARGLDIENVQHVINFDLPSTIDEYVHRIGRTGRCGNTGRAISFFDLESDNHLAQPLVKVLTDAQQDVPAWLEEIAFSTYIPGFSGSTRGNVFASVDTRKGKSTLNTAGFSSSQAPNPVDDESWD

SEQ ID NO: 11374 - protein, 690 aa, Homo sapiens
MGDEDWEAEINPHMSSYVPIFEKDRYSGENGDNFNRTPASSSEMDDGPSRRDHFMKSGFASGRNFGNRDAGECNKRDNTSTMGGFGVGKSFGNRGFSNSRFEDGDSSGFWRESSNDCEDNPTRNRGFSKRGDNDLDPDECMQRTGGLFGSRRPVLSGTGNGDTSQSRSGSGSERGGYKGLNEEVITGSGKNSWKSEAEGGESSDTQGPKVTYIPPPPPEDEDSIFAHYQTGINFDKYDTILVEVSGHDAPPAILTFEEANLCQTLNNNIAKAGYTKLTPVQKYSIPIILAGRDLMACAQTGSGKTAAFLLPILAHMMHDGITASRFKELQEPECIIVAPTRELVNQIYLEARKFSFGTCVRAVVIYGGTQLGHSIRQIVQGCNILCATPGRLMDIIGKEKIGLKQIKYLVLDEADRMLDMGFGPEMKKLISCPGMPSKEQRQTLMFSATFPEEIQRLAAEFLKSNYLFVAVGQVGGACRDVQQTVLQVGQFSKREKLVEILRNIGDERTMVFVETKKKADFIATFLCQEKISTTSIHGDREQREREQALGDFRFGKCPVLVATSVAARGLDIENVQHVINFDLPSTIDEYVHRIGRTGRCGNTGRAISFFDLESDNHLAQPLVKVLTDAQQDVPAWLEEIAFSTYIPGFSGSTRGNVFASVDTRKGKSTLNTAGFSSSQAPNPVDDESWD

SEQ ID NO: 11375 - protein, 575 aa, Homo sapiens
MGSRNLFLTNSPESSNDCEDNPTRNRGFSKRGDNDLDPDECMQRTGGLFGSRRPVLSGTGNGDTSQSRSGSGSERDSWKSEAEGGESSDTQGPKVTYIPPPPPEDEDSIFAHYQTGINFDKYDTILVEVSGHDAPPAILTFEEANLCQTLNNNIAKAGYTKLTPVQKYSIPIILAGRDLMACAQTGSGKTAAFLLPILAHMMHDGITASRFKELQEPECIIVAPTRELVNQIYLEARKFSFGTCVRAVVIYGGTQLGHSIRQIVQGCNILCATPGRLMDIIGKEKIGLKQIKYLVLDEADRMLDMGFGPEMKKLISCPGMPSKEQRQTLMFSATFPEEIQRLAAEFLKSNYLFVAVGQVGGACRDVQQTVLQVGQFSKREKLVEILRNIGDERTMVFVETKKKADFIATFLCQEKISTTSIHGDREQREREQALGDFRFGKCPVLVATSVAARGLDIENVQHVINFDLPSTIDEYVHRIGRTGRCGNTGRAISFFDLESDNHLAQPLVKVLTDAQQDVPAWLEEIAFSTYIPGFSGSTRGNVFASVDTRKGKSTLNTAGFSSSQAPNPVDDESWD

SEQ ID NO: 11376 - protein, 704 aa, Homo sapiens
MGDEDWEAEINPHMSSYVPIFEKDRYSGENGDNFNRTPASSSEMDDGPSRRDHFMKSGFASGRNFGNRDAGECNKRDNTSTMGGFGVGKSFGNRGFSNSRFEDGDSSGFWRGYRDGNNSEASGPYRRGGRGSFRGCRGGFGLGSPNNDLDPDECMQRTGGLFGSRRPVLSGTGNGDTSQSRSGSGSERGGYKGLNEEVITGSGKNSWKSEAEGGESSDTQGPKVTYIPPPPPEDEDSIFAHYQTGINFDKYDTILVEVSGHDAPPAILTFEEANLCQTLNNNIAKAGYTKLTPVQKYSIPIILAGRDLMACAQTGSGKTAAFLLPILAHMMHDGITASRFKELQEPECIIVAPTRELVNQIYLEARKFSFGTCVRAVVIYGGTQLGHSIRQIVQGCNILCATPGRLMDIIGKEKIGLKQIKYLVLDEADRMLDMGFGPEMKKLISCPGMPSKEQRQTLMFSATFPEEIQRLAAEFLKSNYLFVAVGQVGGACRDVQQTVLQVGQFSKREKLVEILRNIGDERTMVFVETKKKADFIATFLCQEKISTTSIHGDREQREREQALGDFRFGKCPVLVATSVAARGLDIENVQHVINFDLPSTIDEYVHRIGRTGRCGNTGRAISFFDLESDNHLAQPLVKVLTDAQQDVPAWLEEIAFSTYIPGFSGSTRGNVFASVDTRKGKSTLNTAGFSSSQAPNPVDDESWD

SEQ ID NO: 11377 - protein, 1507 aa, Homo sapiens
MTTVVVHVDSKAELTTLLEQWEKEHGSGQDMVPILTRMSQLIEKETEEYRKGDPDPFDDRHPGRADPECMLGHLLRILFKNDDFMNALVNAYVMTSREPPLNTAACRLLLDIMPGLETAVVFQEKEGIVENLFKWAREADQPLRTYSTGLLGGAMENQDIAANYRDENSQLVAIVLRRLRELQLQEVALRQENKRPSPRKLSSEPLLPLDEEAVDMDYGDMAVDVVDGDQEEASGDMEISFHLDSGHKTSSRVNSTTKPEDGGLKKNKSAKQGDRENFRKAKQKLGFSSSDPDRMFVELSNSSWSEMSPWVIGTNYTLYPMTPAIEQRLILQYLTPLGEYQELLPIFMQLGSRELMMFYIDLKQTNDVLLTFEALKHLASLLLHNKFATEFVAHGGVQKLLEIPRPSMAATGVSMCLYYLSYNQDAMERVCMHPHNVLSDVVNYTLWLMECSHASGCCHATMFFSICFSFRAVLELFDRYDGLRRLVNLISTLEILNLEDQGALLSDDEIFASRQTGKHTCMALRKYFEAHLAIKLEQVKQSLQRTEGGILVHPQPPYKACSYTHEQIVEMMEFLIEYGPAQLYWEPAEVFLKLSCVQLLLQLISIACNWKTYYARNDTVRFALDVLAILTVVPKIQLQLAESVDVLDEAGSTVSTVGISIILGVAEGEFFIHDAEIQKSALQIIINCVCGPDNRISSIGKFISGTPRRKLPQNPKSSEHTLAKMWNVVQSNNGIKVLLSLLSIKMPITDADQIRALACKALVGLSRSSTVRQIISKLPLFSSCQIQQLMKEPVLQDKRSDHVKFCKYAAELIERVSGKPLLIGTDVSLARLQKADVVAQSRISFPEKELLLLIRNHLISKGLGETATVLTKEADLPMTAASHSSAFTPVTAAASPVSLPRTPRIANGIATRLGSHAAVGASAPSAPTAHPQPRPPQGPLALPGPSYAGNSPLIGRISFIRERPSPCNGRKIRVLRQKSDHGAYSQSPAIKKQLDRHLPSPPTLDSIITEYLREQHARCKNPVATCPPFSLFTPHQCPEPKQRRQAPINFTSRLNRRASFPKYGGVDGGCFDRHLIFSRFRPISVFREANEDESGFTCCAFSARERFLMLGTCTGQLKLYNVFSGQEEASYNCHNSAITHLEPSRDGSLLLTSATWSQPLSALWGMKSVFDMKHSFTEDHYVEFSKHSQDRVIGTKGDIAHIYDIQTGNKLLTLFNPDLANNYKRNCATFNPTDDLVLNDGVLWDVRSAQAIHKFDKFNMNISGVFHPNGLEVIINTEIWDLRTFHLLHTVPALDQCRVVFNHTGTVMYGAMLQADDEDDLMEERMKSPFGSSFRTFNATDYKPIATIDVKRNIFDLCTDTKDCYLAVIENQGSMDALNMDTVCRLYEVGRQRLAEDEDEEEDQEEEEQEEEDDDEDDDDTDDLDELDTDQLLEAELEEDDNNENAGEDGDNDFSPSDEELANLLEEGEDGEDEDSDADEEVELILGDTDSSDNSDLEDDIILSLNE

SEQ ID NO: 11378 - protein, 1506 aa, Homo sapiens
MTTVVVHVDSKAELTTLLEQWEKEHGSGQDMVPILTRMSQLIEKETEEYRKGDPDPFDDRHPGRADPECMLGHLLRILFKNDDFMNLVNAYVMTSREPPLNTAACRLLLDIMPGLETAVVFQEKEGIVENLFKWAREADQPLRTYSTGLLGGAMENQDIAANYRDENSQLVAIVLRRLRELQLQEVALRQENKRPSPRKLSSEPLLPLDEEAVDMDYGDMAVDVVDGDQEEASGDMEISFHLDSGHKTSSRVNSTTKPEDGGLKKNKSAKQGDRENFRKAKQKLGFSSSDPDRMFVELSNSSWSEMSPWVIGTNYTLYPMTPAIEQRLILQYLTPLGEYQELLPIFMQLGSRELMMFYIDLKQTNDVLLTFEALKHLASLLLHNKFATEFVAHGGVQKLLEIPRPSMAATGVSMCLYYLSYNQDAMERVCMHPHNVLSDVVNYTLWLMECSHASGCCHATMFFSICFSFRAVLELFDRYDGLRRLVNLISTLEILNLEDQGALLSDDEIFASRQTGKHTCMALRKYFEAHLAIKLEQVKQSLQRTEGGILVHPQPPYKACSYTHEQIVEMMEFLIEYGPAQLYWEPAEVFLKLSCVQLLLQLISIACNWKTYYARNDTVRFALDVLAILTVVPKIQLQLAESVDVLDEAGSTVSTVGISIILGVAEGEFFIHDAEIQKSALQIIINCVCGPDNRISSIGKFISGTPRRKLPQNPKSSEHTLAKMWNVVQSNNGIKVLLSLLSIKMPITDADQIRALACKALVGLSRSSTVRQIISKLPLFSSCQIQQLMKEPVLQDKRSDHVKFCKYAAELIERVSGKPLLIGTDVSLARLQKADVVAQSRISFPEKELLLLIRNHLISKGLGETATVLTKEADLPMTAASHSSAFTPVTAAASPVSLPRTPRIANGIATRLGSHAAVGASAPSAPTAHPQPRPPQGPLALPGPSYAGNSPLIGRISFIRERPSPCNGRKIRVLRQKSDHGAYSQSPAIKKQLDRHLPSPPTLDSIITEYLREQHARCKNPVATCPPFSLFTPHQCPEPKQRRQAPINFTSRLNRRASFPKYGGVDGGCFDRHLIFSRFRPISVFREANEDESGFTCCAFSARERFLMLGTCTGQLKLYNVFSGQEEASYNCHNSAITHLEPSRDGSLLLTSATWSQPLSALWGMKSVFDMKHSFTEDHYVEFSKHSQDRVIGTKGDIAHIYDIQTGNKLLTLFNPDLANNYKRNCATFNPTDDLVLNDGVLWDVRSAQAIHKFDKFNMNISGVFHPNGLEVIINTEIWDLRTFHLLHTVPALDQCRVVFNHTGTVMYGAMLQADDEDDLMEERMKSPFGSSFRTFNATDYKPIATIDVKRNIFDLCTDTKDCYLAVIENQGSMDALNMDTVCRLYEVGRQRLAEDEDEEEDQEEEEQEEEDDDEDDDDTDDLDELDTDQLLEAELEEDDNNENAGEDGDNDFSPSDEELANLLEEGEDGEDEDSDADEEVELILGDTDSSDNSDLEDDIILSLNE

SEQ ID NO: 11379 - protein, 1058 aa, Homo sapiens
MTTVVVHVDSKAELTTLLEQWEKEHGSGQDMVPILTRMSQLIEKETEEYRKGDPDPFDDRHPGRADPECMLGHLLRILFKNDDFMNALVNAYVMTSREPPLNTAACRLLLDIMPGLETAVVFQEKEGIVENLFKWAREADQPLRTYSTGLLGGAMENQDIAANYRDENSQLVAIVLRRLRELQLQEVALRQENKRPSPRKLSSEPLLPLDEEAVDMDYGDMAVDDAEIQKSALQIIINCVCGPDNRISSIGKFISGTPRRKLPQNPKSSEHTLAKMWNVVQSNNGIKVLLSLLSIKMPITDADQIRALACKALVGLSRSSTVRQIISKLPLFSSCQIQQLMKEPVLQDKRSDHVKFCKYAAELIERVSGKPLLIGTDVSLARLQKADVVAQSRISFPEKELLLLIRNHLISKGLGETATVLTKEADLPMTAASHSSAFTPVTAAASPVSLPRTPRIANGIATRLGSHAAVGASAPSAPTAHPQPRPPQGPLALPGPSYAGNSPLIGRISFIRERPSPCNGRKIRVLRQKSDHGAYSQSPAIKKQLDRHLPSPPTLDSIITEYLREQHARCKNPVATCPPFSLFTPHQCPEPKQRRQAPINFTSRLNRRASFPKYGGVDGGCFDRHLIFSRFRPISVFREANEDESGFTCCAFSARERFLMLGTCTGQLKLYNVFSGQEEASYNCHNSAITHLEPSRDGSLLLTSATWSQPLSALWGMKSVFDMKHSFTEDHYVEFSKHSQDRVIGTKGDIAHIYDIQTGNKLLTLFNPDLANNYKRNCATFNPTDDLVLNDGVLWDVRSAQAIHKFDKFNMNISGVFHPNGLEVIINTEIWDLRTFHLLHTVPALDQCRVVFNHTGTVMYGAMLQADDEDDLMEERMKSPFGSSFRTFNATDYKPIATIDVKRNIFDLCTDTKDCYLAVIENQGSMDALNMDTVCRLYEVGRQRLAEDEDEEEDQEEEEQEEEDDDEDDDDTDDLDELDTDQLLEAELEEDDNNENAGEDGDNDFSPSDEELANLLEEGEDGEDEDSDADEEVELILGDTDSSDNSDLEDDIILSLNE

SEQ ID NO: 11380 - protein, 737 aa, Homo sapiens
MPGKLLWGDIMELEAPLEESESQKKERQKSDRRKSRHHYDSDEKSETRENGVTDDLDAPKAKKSKMKEKLNGDTEEGFNRLSDEFSKSHKSRRKDLPNGDIDEYEKKSKRVSSLDTSTHKSSDNKLEETLTREQKEGAFSNFPISEETIKLLKGRGVTYLFPIQVKTFGPVYEGKDLIAQARTGTGKTFSFAIPLIERLQRNQETIKKSRSPKVLVLAPTRELANQVAKDFKDITRKLSVACFYGGTSYQSQINHIRNGIDILVGTPGRIKDHLQSGRLDLSKLRHVVLDEVDQMLDLGFAEQVEDIIHESYKTDSEDNPQTLLFSATCPQWVYKVAKKYMKSRYEQVDLVGKMTQKAATTVEHLAIQCHWSQRPAVIGDVLQVYSGSEGRAIIFCETKKNVTEMAMNPHIKQNAQCLHGDIAQSQREITLKGFREGSFKVLVATNVAARGLDIPEVDLVIQSSPPQDVESYIHRSGRTGRAGRTGICICFYQPRERGQLRYVEQKAGITFKRVGVPSTMDLVKSKSMDAIRSLASVSYAAVDFFRPSAQRLIEEKGAVDALAAALAHISGASSFEPRSLITSDKGFVTMTLESLEEIQDVSCAWKELNRKLSSNAVSQITRMCLLKGNMGVCFDVPTTESERLQAEWHDSDWILSVPAKLPEIEEYYDGNTSSNSRQRSGWSSGRSGRSGRSGGRSGGRSGRQSRQGSRSGSRQDGRRRSGNRNRSRSGGHKRSFD

SEQ ID NO: 11381 - protein, 666 aa, Homo sapiens
MALFYVARYPGPDAAAAAGPEGAEAGAHGRARALLERLQSRARERQQQREPAQTEAAASTEPATRRRRRPRRRRRVNDAEPGSPEAPQGKRRKADGEDAGAESNEEAPGEPSAGSSEEAPGEPSAGSSEEAPGERSTSASAEAAPDGPALEEAAGPLVPGLVLGGFGKRKAPKVQPFLPRWLAEPNCVRRNVTEDLVPIEDIPDVHPDLQKQLRAHGISSYFPVQAAVIPALLESAACGFLVGRGGYRPSDLCVSAPTGSGKTLAFVIPVVQALLSRVVCHIRALVVLPTKELAQQVSKVFNIYTDATPLRVSLVTGQKSLAKEQESLVQKTADGYRCLADIVVATPGRLVDHIDQTPGFSLQQLRFLIIDEADRMIDSMHQSWLPRVVAAAFQSEDPADPCALLQRRQAQAVTAASTCCPQMPLQKLLFSATLTQNPEKLQQLGLHQPRLFSTGLAHRGLEDTDGDGDSGKYAFPVGLTHHYVPCSLSSKPLVVLHLVLEMGFSRVLCFTNSRENSHRLFLLVQAFGGVDVAEFSSRYGPGQRRMILKQFEQGKIQLLISTDATARGIDVQGVELVVNYDAPQYLRTYVHRVGRTARAGKTGQAFTLLLKVQERRFLRMLTEAGAPELQRHELSSKLLQPLVPRYEEALSQLEESVKEERKQRAA

SEQ ID NO: 11382 - protein, 942 aa, Homo sapiens
MKRRAGLGGSMRSVVGFLSQRGLHGDPLLTQDFQRRRLRGCRNLYKKDLLGHFGCVNAIEFSNNGGQWLVSGGDDRRVLLWHMEQAIHSRVKPIQLKGEHHSNIFCLAFNSGNTKVFSGGNDEQVILHDVESSETLDVFAHEDAVYGLSVSPVNDNIFASSSDDGRVLIWDIRESPHGEPFCLANYPSAFHSVMFNPVEPRLLATANSKEGVGLWDIRKPQSSLLRYGGNLSLQSAMSVRFNSNGTQLLALRRRLPPVLYDIHSRLPVFQFDNQGYFNSCTMKSCCFAGDRDQYILSGSDDFNLYMWRIPADPEAGGIGRVVNGAFMVLKGHRSIVNQVRFNPHTYMICSSGVEKIIKIWSPYKQPGCTGDLDGRIEDDSRCLYTHEEYISLVLNSGSGLSHDYANQSVQEDPRMMAFFDSLVRREIEGWSSDSDSDLSESTILQLHAGVSERSGYTDSESSASLPRSPPPTVDESADNAFHLGPLRVTTTNTVASTPPTPTCEDAASRQQRLSALRRYQDKRLLALSNESDSEENVCEVELDTDLFPRPRSPSPEDESSSSSSSSSSEDEEELNERRASTWQRNAMRRRQKTTREDKPSAPIKPTNTYIGEDNYDYPQIKVDDLSSSPTSSPERSTSTLEIQPSRASPTSDIESVERKIYKAYKWLRYSYISYSNNKDGETSLVTGEADEGRAGTSHKDNPAPSSSKEACLNIAMAQRNQDLPPEGCSKDTFKEETPRTPSNGPGHEHSSHAWAEVPEGTSQDTGNSGSVEHPFETKKLNGKALSSRAEEPPSPPVPKASGSTLNSGSGNCPRTQSDDSEERSLETICANHNNGRLHPRPPHPHNNGQNLGELEVVAYSSPGHSDTDRDNSSLTGTLLHKDCCGSEMACETPNAGTREDPTDTPATDSSRAVHGHSGLKRQRIELEDTDSENSSSEKKLKT

SEQ ID NO: 11383 - protein, 860 aa, Homo sapiens
MEQAIHSRVKPIQLKGEHHSNIFCLAFNSGNTKVFSGGNDEQVILHDVESSETLDVFAHEDAVYGLSVSPVNDNIFASSSDDGRVLIWDIRESPHGEPFCLANYPSAFHSVMFNPVEPRLLATANSKEGVGLWDIRKPQSSLLRYGGNLSLQSAMSVRFNSNGTQLLALRRRLPPVLYDIHSRLPVFQFDNQGYFNSCTMKSCCFAGDRDQYILSGSDDFNLYMWRIPADPEAGGIGRVVNGAFMVLKGHRSIVNQVRFNPHTYMICSSGVEKIIKIWSPYKQPGCTGDLDGRIEDDSRCLYTHEEYISLVLNSGSGLSHDYANQSVQEDPRMMAFFDSLVRREIEGWSSDSDSDLSESTILQLHAGVSERSGYTDSESSASLPRSPPPTVDESADNAFHLGPLRVTTTNTVASTPPTPTCEDAASRQQRLSALRRYQDKRLLALSNESDSEENVCEVELDTDLFPRPRSPSPEDESSSSSSSSSSEDEEELNERRASTWQRNAMRRRQKTTREDKPSAPIKPTNTYIGEDNYDYPQIKVDDLSSSPTSSPERSTSTLEIQPSRASPTSDIESVERKIYKAYKWLRYSYISYSNNKDGETSLVTGEADEGRAGTSHKDNPAPSSSKEACLNIAMAQRNQDLPPEGCSKDTFKEETPRTPSNGPGHEHSSHAWAEVPEGTSQDTGNSGSVEHPFETKKLNGKALSSRAEEPPSPPVPKASGSTLNSGSGNCPRTQSDDSEERSLETICANHNNGRLHPRPPHPHNNGQNLGELEVVAYSSPGHSDTDRDNSSLTGTLLHKDCCGSEMACETPNAGTREDPTDTPATDSSRAVHGHSGLKRQRIELEDTDSENSSSEKKLKT

SEQ ID NO: 11384 - protein, 941 aa, Homo sapiens
MKRRAGLGGSMRSVVGFLSQRGLHGDPLLTQDFQRRRLRGCRNLYKKDLLGHFGCVNAIEFSNNGGQWLVSGGDDRRVLLWHMEQAIHSRVKPIQLKGEHHSNIFCLAFNSGNTKVFSGGNDEQVILHDVESETLDVFAHEDAVYGLSVSPVNDNIFASSSDDGRVLIWDIRESPHGEPFCLANYPSAFHSVMFNPVEPRLLATANSKEGVGLWDIRKPQSSLLRYGGNLSLQSAMSVRFNSNGTQLLALRRRLPPVLYDIHSRLPVFQFDNQGYFNSCTMKSCCFAGDRDQYILSGSDDFNLYMWRIPADPEAGGIGRVVNGAFMVLKGHRSIVNQVRFNPHTYMICSSGVEKIIKIWSPYKQPGCTGDLDGRIEDDSRCLYTHEEYISLVLNSGSGLSHDYANQSVQEDPRMMAFFDSLVRREIEGWSSDSDSDLSESTILQLHAGVSERSGYTDSESSASLPRSPPPTVDESADNAFHLGPLRVTTTNTVASTPPTPTCEDAASRQQRLSALRRYQDKRLLALSNESDSEENVCEVELDTDLFPRPRSPSPEDESSSSSSSSSSEDEEELNERRASTWQRNAMRRRQKTTREDKPSAPIKPTNTYIGEDNYDYPQIKVDDLSSSPTSSPERSTSTLEIQPSRASPTSDIESVERKIYKAYKWLRYSYISYSNNKDGETSLVTGEADEGRAGTSHKDNPAPSSSKEACLNIAMAQRNQDLPPEGCSKDTFKEETPRTPSNGPGHEHSSHAWAEVPEGTSQDTGNSGSVEHPFETKKLNGKALSSRAEEPPSPPVPKASGSTLNSGSGNCPRTQSDDSEERSLETICANHNNGRLHPRPPHPHNNGQNLGELEVVAYSSPGHSDTDRDNSSLTGTLLHKDCCGSEMACETPNAGTREDPTDTPATDSSRAVHGHSGLKRQRIELEDTDSENSSSEKKLKT

SEQ ID NO: 11385 - protein, 599 aa, Homo sapiens
MDVHDLFRRLGAGAKFDTRRFSADAARFQIGKRKYDFDSSEVLQGLDFFGNKKSVPGVCGASQTHQKPQNGEKKEESLTERKREQSKKKRKTMTSEIASQEEGATIQWMSSVEAKIEDKKVQRESKLTSGKLENLRKEKINFLRNKHKIHVQGTDLPDPIATFQQLDQEYKINSRLLQNILDAGFQMPTPIQMQAIPVMLHGRELLASAPTGSGKTLAFSIPILMQLKQPANKGFRALIISPTRELASQIHRELIKISEGTGFRIHMIHKAAVAAKKFGPKSSKKFDILVTTPNRLIYLLKQDPPGIDLASVEWLVVDESDKLFEDGKTGFRDQLASIFLACTSHKVRRAMFSATFAYDVEQWCKLNLDNVISVSIGARNSAVETVEQELLFVGSETGKLLAMRELVKKGFNPPVLVFVQSIERAKELFHELIYEGINVDVIHAERTQQQRDNTVHSFRAGKIWVLICTALLARGIDFKGVNLVINYDFPTSSVEYIHRIGRTGRAGNKGKAITFFTEDDKPLLRSVANVIQQAGCPVPEYIKGFQKLLSKQKKKMIKKPLERESISTTPKCFLEKAKDKQKKVTGQNSKKKVALEDKS

SEQ ID NO: 11386 - protein, 860 aa, Homo sapiens
MSRGGSYPHLLWDVRKRSLGLEDPSRLRSRYLGRREFIQRLKLEATLNVHDGCVNTICWNDTGEYILSGSDDTKLVISNPYSRKVLTTIRSGHRANIFSAKFLPCTNDKQIVSCSGDGVIFYTNVEQDAETNRQCQFTCHYGTTYEIMTVPNDPYTFLSCGEDGTVRWFDTRIKTSCTKEDCKDDILINCRRAATSVAICPPIPYYLAVGCSDSSVRIYDRRMLGTRATGNYAGRGTTGMVARFIPSHLNNKSCRVTSLCYSEDGQEILVSYSSDYIYLFDPKDDTARELKTPSAEERREELRQPPVKRLRLRGDWSDTGPRARPESERERDGEQSPNVSLMQRMSDMLSRWFEEASEVAQSNRGRGRSRPRGGTSQSDISTLPTVPSSPDLEVSETAMEVDTPAEQFLQPSTSSTMSAQAHSTSSPTESPHSTPLLSSPDSEQRQSVEASGHHTHHQSDNNNEKLSPKPGTGEPVLSLHYSTEGTTTSTIKLNFTDEWSSIASSSRGIGSHCKSEGQEESFVPQSSVQPPEGDSETKAPEESSEDVTKYQEGVSAENPVENHINITQSDKFTAKPLDSNSGERNDLNLDRSCGVPEESASSEKAKEPETSDQTSTESATNENNTNPEPQFQTEATGPSAHEETSTRDSALQDTDDSDDDPVLIPGARYRAGPGDRRSAVARIQEFFRRRKERKEMEELDTLNIRRPLVKMVYKGHRNSRTMIKEANFWGANFVMSGSDCGHIFIWDRHTAEHLMLLEADNHVVNCLQPHPFDPILASSGIDYDIKIWSPLEESRIFNRKLADEVITRNELMLEETRNTITVPASFMLRMLASLNHIRADRLEGDRSEGSGQENENEDEE

SEQ ID NO: 11387 - protein, 880 aa, Homo sapiens
MSRGGSYPHLLWDVRKRSLGLEDPSRLRSRYLGRREFIQRLKLEATLNVHDGCVNTICWNDTGEYILSGSDDTKLVISNPYSRKVLTTIRSGHRANIFSAKFLPCTNDKQIVSCSGDGVIFYTNVEQDAETNRQCQFTCHYGTTYEIMTVPNDPYTFLSCGEDGTVRWFDTRIKTSCTKEDCKDDILINCRRAATSVAICPPIPYYLAVGCSDSSVRIYDRRMLGTRATGNYAGRGTTGMVARFIPSHLNNKSCRVTSLCYSEDGQEILVSYSSDYIYLFDPKDDTARELKTPSAEERREELRQPPVKRLRLRGDWSDTGPRARPESERERDGEQSPNVSLMQRMSDMLSRWFEEASEVAQSNRGRGRSRPRGGTSQSDISTLPTVPSSPDLEVSETAMEVDTPAEQFLQPSTSSTMSAQAHSTSSPTESPHSTPLLSSPDSEQRQSVEASGHHTHHQSDSPSSVVNKQLGSMSLDEQQDNNNEKLSPKPGTGEPVLSLHYSTEGTTTSTIKLNFTDEWSSIASSSRGIGSHCKSEGQEESFVPQSSVQPPEGDSETKAPEESSEDVTKYQEGVSAENPVENHINITQSDKFTAKPLDSNSGERNDLNLDRSCGVPEESASSEKAKEPETSDQTSTESATNENNTNPEPQFQTEATGPSAHEETSTRDSALQDTDDSDDDPVLIPGARYRAGPGDRRSAVARIQEFFRRRKERKEMEELDTLNIRRPLVKMVYKGHRNSRTMIKEANFWGANFVMSGSDCGHIFIWDRHTAEHLMLLEADNHVVNCLQPHPFDPILASSGIDYDIKIWSPLEESRIFNRKLADEVITRNELMLEETRNTITVPASFMLRMLASLNHIRADRLEGDRSEGSGQENENEDEE

SEQ ID NO: 11388 - protein, 951 aa, Homo sapiens
MSRGGSYPHLLWDVRKRSLGLEDPSRLRSRYLGRREFIQRLKLEATLNVHDGCVNTICWNDTGEYILSGSDDTKLVISNPYSRKVLTTIRSGHRANIFSAKFLPCTNDKQIVSCSGDGVIFYTNVEQDAETNRQCQFTCHYGTTYEIMTVPNDPYTFLSCGEDGTVRWFDTRIKTSCTKEDCKDDILINCRRAATSVAICPPIPYYLAVGCSDSSVRIYDRRMLGTRATGNYAGRGTTGMVARFIPSHLNNKSCRVTSLCYSEDGQEILVSYSSDYIYLFDPKDDTARELKTPSAEERREELRQPPVKRLRLRGDWSDTGPRARPESERERDGEQSPNVSLMQRMSDMLSRWFEEASEVAQSNRGRGRSRPRGGTSQSDISTLPTVPSSPDLEVSETAMEVDTPAEQFLQPSTSSTMSAQAHSTSSPTESPHSTPLLSSPDSEQRQSVEASGHHTHHQSEFLRGPEIALLRKRLQQLRLKKAEQQRQQELAAHTQQQPSTSDQSSHEGSSQDPHASDSPSSVVNKQLGSMSLDEQQDNNNEKLSPKPGTGEPVLSLHYSTEGTTTSTIKLNFTDEWSSIASSSRGIGSHCKSEGQEESFVPQSSVQPPEGDSETKAPEESSEDVTKYQEGVSAENPVENHINITQSDKFTAKPLDSNSGERNDLNLDRSCGVPEESASSEKAKEPETSDQTSTESATNENNTNPEPQFQTEATGPSAHEETSTRDSALQDTDDSDDDPVLIPGARYRAGPGDRFNIRGTTIGDRIMRRSAVARIQEFFRRRKERKEMEELDTLNIRRPLVKMVYKGHRNSRTMIKEANFWGANFVMSGSDCGHIFIWDRHTAEHLMLLEADNHVVNCLQPHPFDPILASSGIDYDIKIWSPLEESRIFNRKLADEVITRNELMLEETRNTITVPASFMLRMLASLNHIRADRLEGDRSEGSGQENENEDEE

SEQ ID NO: 11389 - protein, 920 aa, Homo sapiens
MSRGGSYPHLLWDVRKRSLGLEDPSRLRSRYLGRREFIQRLKLEATLNVHDGCVLTTIRSGHRANIFSAKFLPCTNDKQIVSCSGDGVIFYTNVEQDAETNRQCQFTCHYGTTYEIMTVPNDPYTFLSCGEDGTVRWFDTRIKTSCTKEDCKDDILINCRRAATSVAICPPIPYYLAVGCSDSSVRIYDRRMLGTRATGNYAGRGTTGMVARFIPSHLNNKSCRVTSLCYSEDGQEILVSYSSDYIYLFDPKDDTARELKTPSAEERREELRQPPVKRLRLRGDWSDTGPRARPESERERDGEQSPNVSLMQRMSDMLSRWFEEASEVAQSNRGRGRSRPRGGTSQSDISTLPTVPSSPDLEVSETAMEVDTPAEQFLQPSTSSTMSAQAHSTSSPTESPHSTPLLSSPDSEQRQSVEASGHHTHHQSEFLRGPEIALLRKRLQQLRLKKAEQQRQQELAAHTQQQPSTSDQSSHEGSSQDPHASDSPSSVVNKQLGSMSLDEQQDNNNEKLSPKPGTGEPVLSLHYSTEGTTTSTIKLNFTDEWSSIASSSRGIGSHCKSEGQEESFVPQSSVQPPEGDSETKAPEESSEDVTKYQEGVSAENPVENHINITQSDKFTAKPLDSNSGERNDLNLDRSCGVPEESASSEKAKEPETSDQTSTESATNENNTNPEPQFQTEATGPSAHEETSTRDSALQDTDDSDDDPVLIPGARYRAGPGDRFNIRGTTIGDRIMRRSAVARIQEFFRRRKERKEMEELDTLNIRRPLVKMVYKGHRNSRTMIKEANFWGANFVMSGSDCGHIFIWDRHTAEHLMLLEADNHVVNCLQPHPFDPILASSGIDYDIKIWSPLEESRIFNRKLADEVITRNELMLEETRNTITVPASFMLRMLASLNHIRADRLEGDRSEGSGQENENEDEE

SEQ ID NO: 11390 - protein, 631 aa, Homo sapiens
MSHWAPEWKRAEANPRDLGASWDVRGSRGSGWSGPFGHQGPRAAGSREPPLCFKIKNNMVGVVIGYSGSKIKDLQHSTNTKIQIINGESEAKVRIFGNREMKAKAKAAIETLIRKQESYNSESSVDNAASQTPIGRNLGRNDIVGEAEPLSNWDRIRAAVVECEKRKWADLPPVKKNFYIESKATSCMSEMQVINWRKENFNITCDDLKSGEKRLIPKPTCRFKDAFQQYPDLLKSIIRVGIVKPTPIQSQAWPIILQGIDLIVVAQTGTGKTLSYLMPGFIHLDSQPISREQRNGPGMLVLTPTRELALHVEAECSKYSYKGLKSICIYGGRNRNGQIEDISKGVDIIIATPGRLNDLQMNNSVNLRSITYLVIDEADKMLDMEFEPQIRKILLDVRPDRQTVMTSATWPDTVRQLALSYLKDPMIVYVGNLNLVAVNTVKQNIIVTTEKEKRALTQEFVENMSPNDKVIMFVSQKHIADDLSSDFNIQGISAESLHGNSEQSDQERAVEDFKSGNIKILITTDIVSRGLDLNDVTHVYNYDFPRNIDVYVHRVGYIGRTGKTGTSVTLITQRDSKMAGELIKILDRANQSVPEDLVVMAEQYKLNQQKRHRETRSRKPGQRRKEFYFLS

SEQ ID NO: 11391 - protein, 342 aa, Homo sapiens
MSLHGKRKEIYKYEAPWTVYAMNWSVRPDKRFRLALGSFVEEYNNKVQLVGLDEESSEFICRNTFDHPYPTTKLMWIPDTKGVYPDLLATSGDYLRVWRVGETETRLECLLNNNKNSDFCAPLTSFDWNEVDPYLLGTSSIDTTCTIWGLETGQVLGRVNLVSGHVKTQLIAHDKEVYDIAFSRAGGGRDMFASVGADGSVRMFDLRHLEHSTIIYEDPQHHPLLRLCWNKQDPNYLATMAMDGMEVVILDVRVPCTPVARLNNHRACVNGIAWAPHSSCHICTAADDHQALIWDIQQMPRAIEDPILAYTAEGEINNVQWASTQPDWIAICYNNCLEILRV

SEQ ID NO: 11392 - protein, 142 aa, Homo sapiens
MSLHGKRKEIYKYEAPWTVYAMNWSVRPDKRFRLALGSFVEEYNNKVVILDVRVPCTPVARLNNHRACVNGIAWAPHSSCHICTAADDHQALIWDIQQMPRAIEDPILAYTAEGEINNVQWASTQPDWIAICYNNCLEILRV

SEQ ID NO: 11393 - protein, 881 aa, Homo sapiens
MAADKGPAAGPRSRAAMAQWRKKKGLRKRRGAASQARGSDSEDGEFEIQAEDDARARKLGPGRPLPTFPTSECTSDVEPDTREMVRAQNKKKKKSGGFQSMGLSYPVFKGIMKKGYKVPTPIQRKTIPVILDGKDVVAMARTGSGKTACFLLPMFERLKTHSAQTGARALILSPTRELALQTLKFTKELGKFTGLKTALILGGDRMEDQFAALHENPDIIIATPGRLVHVAVEMSLKLQSVEYVVFDEADRLFEMGFAEQLQEIIARLPGGHQTVLFSATLPKLLVEFARAGLTEPVLIRLDVDTKLNEQLKTSFFLVREDTKAAVLLHLLHNVVRPQDQTVVFVATKHHAEYLTELLTTQRVSCAHIYSALDPTARKINLAKFTLGKCSTLIVTDLAARGLDIPLLDNVINYSFPAKGKLFLHRVGRVARAGRSGTAYSLVAPDEIPYLLDLHLFLGRSLTLARPLKEPSGVAGVDGMLGRVPQSVVDEEDSGLQSTLEASLELRGLARVADNAQQQYVRSRPAPSPESIKRAKEMDLVGLGLHPLFSSRFEEEELQRLRLVDSIKNYRSRATIFEINASSRDLCSQVMRAKRQKDRKAIARFQQGQQGRQEQQEGPVGPAPSRPALQEKQPEKEEEEEAGESVEDIFSEVVGRKRQRSGPNRGAKRRREEARQRDQEFYIPYRPKDFDSERGLSISGEGGAFEQQAAGAVLDLMGDEAQNLTRGRQQLKWDRKKKRFVGQSGQEDKKKIKTESGRYISSSYKRDLYQKWKQKQKIDDRDSDEEGASDRRGPERRGGKRDRGQGASRPHAPGTPAGRVRPELKTKQQILKQRRRAQKLHFLQRGGLKQLSARNRRRVQELQQGAFGRGARSKKGKMRKRM

SEQ ID NO: 11394 - protein, 882 aa, Homo sapiens
MAADKGPAAGPRSRAAMAQWRKKKGLRKRRGAASQARGSDSEDGEFEIQAEDDARARKLGPGRPLPTFPTSECTSDVEPDTREMVRAQNKKKKKSGGFQSMGLSYPVFKGIMKKGYKVPTPIQRKTIPVILDGKDVVAMARTGSGKTACFLLPMFERLKTHSAQTGARALILSPTRELALQTLKFTKELGKFTGLKTALILGGDRMEDQFAALHENPDIIIATPGRLVHVAVEMSLKLQSVEYVVFDEADRLFEMGFAEQLQEIIARLPGGHQTVLFSATLPKLLVEFARAGLTEPVLIRLDVDTKLNEQLKTSFFLVREDTKAAVLLHLLHNVVRPQDQTVVFVATKHHAEYLTELLTTQRVSCAHIYSALDPTARKINLAKFTLGKCSTLIVTDLAARGLDIPLLDNVINYSFPAKGKLFLHRVGRVARAGRSGTAYSLVAPDEIPYLLDLHLFLGRSLTLARPLKEPSGVAGVDGMLGRVPQSVVDEEDSGLQSTLEASLELRGLARVADNAQQQYVRSRPAPSPESIKRAKEMDLVGLGLHPLFSSRFEEEELQRLRLVDSIKNYRSRATIFEINASSRDLCSQVMRAKRQKDRKAIARFQQGQQGRQEQQEGPVGPAPSRPALQEKQPEKEEEEEAGESVEDIFSEVVGRKRQRSGPNRGAKRRREEARQRDQEFYIPYRPKDFDSERGLSISGEGGAFEQQAAGAVLDLMGDEAQNLTRGRQQLKWDRKKKRFVGQSGQEDKKKIKTESGRYISSSYKRDLYQKWKQKQKIDDRDSDEEGASDRRGPERRGGKRDRGQAGASRPHAPGTPAGRVRPELKTKQQILKQRRRAQKLHFLQRGGLKQLSARNRRRVQELQQGAFGRGARSKKGKMRKRM

SEQ ID NO: 11395 - protein, 597 aa, Homo sapiens
MSSKGSSTDGRTDLANGSLSSSPEEMSGAEEGRETSSGIEVEASDLSLSLTGDDGGPNRTSTESRGTDTESSGEDKDSDSMEDTGHYSINDENRVHDRSEEEEEEEEEEEEEQPRRRVQRKRANRDQDSSDDERALEDWVSSETSALPRPRWQALPALRERELGSSARFVYEACGARVFVQRFRLQHGLEGHTGCVNTLHFNQRGTWLASGSDDLKVVVWDWVRRQPVLDFESGHKSNVFQAKFLPNSGDSTLAMCARDGQVRVAELSATQCCKNTKRVAQHKGASHKLALEPDSPCTFLSAGEDAVVFTIDLRQDRPASKLVVTKEKEKKVGLYTIYVNPANTHQFAVGGRDQFVRIYDQRKIDENENNGVLKKFCPHHLVNSESKANITCLVYSHDGTELLASYNDEDIYLFNSSHSDGAQYVKRYKGHRNNATVKGVNFYGPKSEFVVSGSDCGHIFLWEKSSCQIIQFMEGDKGGVVNCLEPHPHLPVLATSGLDHDVKIWAPTAEASTELTGLKDVIKKNKRERDEDSLHQTDLFDSHMLWFLMHHLRQRRHHRRWREPGVGATDADSDESPSSSDTSDEEEGPDRVQCMPS

SEQ ID NO: 11396 - protein, 273 aa, Homo sapiens
MSSKGSSTDGRTDLANGSLSSSPEEMSGAEEGRETSSGIEVEASDLSLSLTGDDGGPNRTSTESRGTDTESSGEDKDSDSMEDTGHYSINDENRVHDRSEEEEEEEEEEEEEQPRRRVQRKRANRDQDSSDDERALEDWVSSETSALPRPRWQALPALRERELGSSARFVYEACGARVFVQRFRLQHGLEGHTGCVNTLHFNQRGTWLASGSDDLKVVVWDWVRRQPVLDFESGHKSNVFQVRQGSIIATERIRHELEKSELQHGLGADSELL

SEQ ID NO: 11397 - protein, 231 aa, Homo sapiens
MFLVGLTGGIASGKSSVIQVFQQLGCAVIDVDVMARHVVQPGYPAHRRIVEVFGTEVLLENGDINRKVLGDLIFNQPDRRQLLNAITHPEIRKEMMKETFKYFLRGYRYVILDIPLLFETKKLLKYMKHTVVVYCDRDTQLARLMRRNSLNRKDAEARINAQLPLTDKARMARHVLDNSGEWSVTKRQVILLHTELERSLEYLPLRFGVLTGLAAIASLLYLLTHYLLPYA

SEQ ID NO: 11398 - protein, 132 aa, Homo sapiens
MFLVGLTGGIASGKSSVIQVFQQLGCAVIDVDVMARHVVQPGYPAHRRIVEVFGTEVLLENGDINRKVLGDLIFNQPDRRQLLNAITHPEIRKEMMKETFKYFLREPRTSPRGKKHVPSALKEADSLMRRDT

SEQ ID NO: 11399 - protein, 600 aa, Homo sapiens
MEHVTEGSWESLPVPLHPQVLGALRELGFPYMTPVQSATIPLFMRNKDVAAEAVTGSGKTLAFVIPILEILLRREEKLKKSQVGAIIITPTRELAIQIDEVLSHFTKHFPEFSQILWIGGRNPGEDVERFKQQGGNIIVATPGRLEDMFRRKAEGLDLASCVRSLDVLVLDEADRLLDMGFEASINTILEFLPKQRRTGLFSATQTQEVENLVRAGLRNPVRVSVKEKGVAASSAQKTPSRLENYYMVCKADEKFNQLVHFLRNHKQEKHLVFFSTCACVEYYGKALEVLVKGVKIMCIHGKMKYKRNKIFMEFRKLQSGILVCTDVMARGIDIPEVNWVLQYDPPSNASAFVHRCGRTARIGHGGSALVFLLPMEESYINFLAINQKCPLQEMKPQRNTADLLPKLKSMALADRAVFEKGMKAFVSYVQAYAKHECNLIFRLKDLDFASLARGFALLRMPKMPELRGKQFPDFVPVDVNTDTIPFKDKIREKQRQKLLEQQRREKTENEGRRKFIKNKAWSKQKAKKEKKKKMNEKRKREEGSDIEDEDMEELLNDTRLLKKLKKGKITEEEFEKGLLTTGKRTIKTVDLGISDLEDDC

SEQ ID NO: 11400 - protein, 207 aa, Homo sapiens
MKPQRNTADLLPKLKSMALADRAVFEKGMKAFVSYVQAYAKHECNLIFRLKDLDFASLARGFALLRMPKMPELRGKQFPDFVPVDVNTDTIPFKDKIREKQRQKLLEQQRREKTENEGRRKFIKNKAWSKQKAKKEKKKKMNEKRKREEGSDIEDEDMEELLNDTRLLKKLKKGKITEEEFEKGLLTTGKRTIKTVDLGISDLEDDC

SEQ ID NO: 11401 - protein, 99 aa, Homo sapiens
MKVSAALLCLLLIAATFIPQGLAQPDAINAPVTCCYNFTNRKISVQRLASYRRITSSKCPKEAVIFKTIVAKEICADPKQKWVQDSMDHLDKQTQTPKT

SEQ ID NO: 11402 - protein, 1037 aa, Homo sapiens
MATESTPSEIIERERKKLLEILQHDPDSILDTLTSRRLISEEEYETLENVTDLLKKSRKLLILVQKKGEATCQHFLKCLFSTFPQSAAICGLRHEVLKHENTVPPQSMGASSNSEDAFSPGIKQPEAPEITVFFSEKEHLDLETSEFFRDKKTSYRETALSARKNEKEYDTPEVTLSYSVEKVGCEVPATITYIKDGQRYEELDDSLYLGKEEYLGSVDTPEDAEATVEEEVYDDPEHVGYDGEEDFENSETTEFSGEEPSYEGSETSLSLEEEQEKSIEERKKVFKDVLLCLNMDRSRKVLPDFVKQFSLDRGCKWTPESPGDLAWNFLMKVQARDVTARDSILSHKVLDEDSKEDLLAGVENLEIRDIQTINPLDVLCATMLCSDSSLQRQVMSNMYQCQFALPLLLPDAENNKSILMLGAMKDIVKKQSTQFSGGPTEDTEKFLTLMKMPVISFVRLGYCSFSKSRILNTLLSPAQLKLHKIFLHQDLPLLVLPRQISDGLVEITWCFPDSDDRKENPFFQKPVALANLRGNLESFWTQFGFLMEVSSAVFFFTDCLGEKEWDLLMFLGEAAIERCYFVLSSQARESEEAQIFQRILNLKPAQLLFWERGDAGDRRKNMEGLQAALQEVMFSSCLRCVSVEDMAALARELGIQVDEDFENTQRIQVSSGENMAGTAEGEGQQRHSQLKSSSKSQALMPIQEPGTQCELSQNLQNLYGTPVFRPVLENSWLFPTRIGGNFNHVSLKASWVMGRPFGSEQRPKWFHPLPFQNAGAQGRGKSFGIQSFHPQIFYSGERFMKFSRVARGCHSNGTFGRLPRPICQHVQACPERPQMMGTLERSRAVASKIGHSYSLDSQPARAVGKPWPQQACTRVTELTEATGKLIRTSHIGKPHPQSFQPAAATQKLRPASQQGVQMKTQGGASNPALQIGSHPMCKSSQFKSDQSNPSTVKHSQPKPFHSVPSQPKSSQTKSCQSQPSQTKPSPCKSTQPKPSQPWPPQSKPSQPRPPQPKSSSTNPSQAKAHHSKAGQKRGGKH

SEQ ID NO: 11403 - protein, 91 aa, Homo sapiens
MKVSAAALAVILIATALCAPASASPYSSDTTPCCFAYIARPLPRAHIKEYFYTSGKCSNPAVVFVTRKNRQVCANPEKKWVREYINSLEMS

SEQ ID NO: 11404 - protein, 195 aa, Homo sapiens
MTQPPASTSGIMGTLSSWNLKILQINQLHLVHWNAVKFENFEDAALEENGLAVIGVFLKISETSGSPVSTGRPKPLARKLRPAQKHWVLQSRPFLSSQVQENCKVTYFHRKHWVRIRPLRTTPPSWDYTRICIQREMVPARIRVLREMVPEAWRCFPNRLPLLSNIRPDFSKAPLAYVKRWLWTARHPHSLSAAW

SEQ ID NO: 11405 - protein, 81 aa, Homo sapiens
MPLSDWCCGICEEAPLGRAYTQTWMETGCGPHGVTALGQQELKDCLRARSGGTASSVDWIMEAARGSLNVHNCLIKFGRRD

SEQ ID NO: 11406 - protein, 633 aa, Homo sapiens
MAAAAAAATTAACSSGSAGTDAAGASGLQQPPPQPQPQPAAAAPAQPPPEPPRKPRMDPRRRQAALSFLTNISLDGRLPPQDAEWGGGEEGGAAKPGAGGACGARTRFSLLAAAERGGCIALAAPGTPAAGLAAGSGPCLPQPSSLPPLIPGGHATVSGPGVARGFASPLGAGRASGEQWQPPRPAPLAACAQLQLLDGSGAAGQEELEEDDAFISVQVPAAAFLGSGTPGSGSGSRGRLNSFTQGILPIAFSRPTSQNYCSLEQPGQGGSTSAFEQLQRSRRRLISQRSSLETLEDIEENAPLRRCRTLSGSPRPKNFKKIHFIKNMRQHDTRNGRIVLISGRRSFCSIFSVLPYRDSTQVGDLKLDGGRQSTGAVSLKEIIGLEGVELGADGKTVSYTQFLLPTNAFGARRNTIDSTSSFSQFRNLSHRSLSIGRASGTQGSLDTGSDLGDFMDYDPNLLDDPQWPCGKHKRVLIFPSYMTTVIDYVKPSDLKKDMNETFKEKFPHIKLTLSKIRSLKREMRKLAQEDCGLEEPTVAMAFVYFEKLALKGKLNKQNRKLCAGACVLLAAKIGSDLKKHEVKHLIDKLEEKFRLNRRELIAFEFPVLVALEFALHLPEHEVMPHYRRLVQSS

SEQ ID NO: 11407 - protein, 368 aa, Homo sapiens
MLSKRGCHARIYADFPIRRLISQRSSLETLEDIEENAPLRRCRTLSGSPRPKNFKKIHFIKNMRQHDTRNGRIVLISGRRSFCSIFSVLPYRDSTQVGDLKLDGGRQSTGAVSLKEIIGLEGVELGADGKTVSYTQFLLPTNAFGARRNTIDSTSSFSQFRNLSHRSLSIGRASGTQGSLDTGSDLGDFMDYDPNLLDDPQWPCGKHKRVLIFPSYMTTVIDYVKPSDLKKDMNETFKEKFPHIKLTLSKIRSLKREMRKLAQEDCGLEEPTVAMAFVYFEKLALKGKLNKQNRKLCAGACVLLAAKIGSDLKKHEVKHLIDKLEEKFRLNRRELIAFEFPVLVALEFALHLPEHEVMPHYRRLVQSS

SEQ ID NO: 11408 - protein, 136 aa, Homo sapiens
MNETFKEKFPHIKLTLSKIRSLKREMRKLAQEDCGLEEPTVAMAFVYFEKLALKGKLNKQNRKLCAGACVLLAAKIGSDLKKHEVKHLIDKLEEKFRLNRRELIAFEFPVLVALEFALHLPEHEVMPHYRRLVQSS

SEQ ID NO: 11409 - protein, 306 aa, Homo sapiens
MRQHDTRNGRIVLISGRRSFCSIFSVLPYRDSTQVGDLKLDGGRQSTGAVSLKEIIGLEGVELGADGKTVSYTQFLLPTNAFGARRNTIDSTSSFSQFRNLSHRSLSIGRASGTQGSLDTGSDLGDFMDYDPNLLDDPQWPCGKHKRVLIFPSYMTTVIDYVKPSDLKKDMNETFKEKFPHIKLTLSKIRSLKREMRKLAQEDCGLEEPTVAMAFVYFEKLALKGKLNKQNRKLCAGACVLLAAKIGSDLKKHEVKHLIDKLEEKFRLNRRELIAFEFPVLVALEFALHLPEHEVMPHYRRLVQSS

SEQ ID NO: 11410 - protein, 2442 aa, Homo sapiens
MAENLLDGPPNPKRAKLSSPGFSANDSTDFGSLFDLENDLPDELIPNGGELGLLNSGNLVPDAASKHKQLSELLRGGSGSSINPGIGNVSASSPVQQGLGGQAQGQPNSANMASLSAMGKSPLSQGDSSAPSLPKQAASTSGPTPAASQALNPQAQKQVGLATSSPATSQTGPGICMNANFNQTHPGLLNSNSGHSLINQASQGQAQVMNGSLGAAGRGRGAGMPYPTPAMQGASSSVLAETLTQVSPQMTGHAGLNTAQAGGMAKMGITGNTSPFGQPFSQAGGQPMGATGVNPQLASKQSMVNSLPTFPTDIKNTSVTNVPNMSQMQTSVGIVPTQAIATGPTADPEKRKLIQQQLVLLLHAHKCQRREQANGEVRACSLPHCRTMKNVLNHMTHCQAGKACQVAHCASSRQIISHWKNCTRHDCPVCLPLKNASDKRNQQTILGSPASGIQNTIGSVGTGQQNATSLSNPNPIDPSSMQRAYAALGLPYMNQPQTQLQPQVPGQQPAQPQTHQQMRTLNPLGNNPMNIPAGGITTDQQPPNLISESALPTSLGATNPLMNDGSNSGNIGTLSTIPTAAPPSSTGVRKGWHEHVTQDLRSHLVHKLVQAIFPTPDPAALKDRRMENLVAYAKKVEGDMYESANSRDEYYHLLAEKIYKIQKELEEKRRSRLHKQGILGNQPALPAPGAQPPVIPQAQPVRPPNGPLSLPVNRMQVSQGMNSFNPMSLGNVQLPQAPMGPRAASPMNHSVQMNSMGSVPGMAISPSRMPQPPNMMGAHTNNMMAQAPAQSQFLPQNQFPSSSGAMSVGMGQPPAQTGVSQGQVPGAALPNPLNMLGPQASQLPCPPVTQSPLHPTPPPASTAAGMPSLQHTTPPGMTPPQPAAPTQPSTPVSSSGQTPTPTPGSVPSATQTQSTPTVQAAAQAQVTPQPQTPVQPPSVATPQSSQQQPTPVHAQPPGTPLSQAAASIDNRVPTPSSVASAETNSQQPGPDVPVLEMKTETQAEDTEPDPGESKGEPRSEMMEEDLQGASQVKEETDIAEQKSEPMEVDEKKPEVKVEVKEEEESSSNGTASQSTSPSQPRKKIFKPEELRQALMPTLEALYRQDPESLPFRQPVDPQLLGIPDYFDIVKNPMDLSTIKRKLDTGQYQEPWQYVDDVWLMFNNAWLYNRKTSRVYKFCSKLAEVFEQEIDPVMQSLGYCCGRKYEFSPQTLCCYGKQLCTIPRDAAYYSYQNRYHFCEKCFTEIQGENVTLGDDPSQPQTTISKDQFEKKKNDTLDPEPFVDCKECGRKMHQICVLHYDIIWPSGFVCDNCLKKTGRPRKENKFSAKRLQTTRLGNHLEDRVNKFLRRQNHPEAGEVFVRVVASSDKTVEVKPGMKSRFVDSGEMSESFPYRTKALFAFEEIDGVDVCFFGMHVQEYGSDCPPPNTRRVYISYLDSIHFFRPRCLRTAVYHEILIGYLEYVKKLGYVTGHIWACPPSEGDDYIFHCHPPDQKIPKPKRLQEWYKKMLDKAFAERIIHDYKDIFKQATEDRLTSAKELPYFEGDFWPNVLEESIKELEQEEEERKKEESTAASETTEGSQGDSKNAKKKNNKKTNKNKSSISRANKKKPSMPNVSNDLSQKLYATMEKHKEVFFVIHLHAGPVINTLPPIVDPDPLLSCDLMDGRDAFLTLARDKHWEFSSLRRSKWSTLCMLVELHTQGQDRFVYTCNECKHHVETRWHCTVCEDYDLCINCYNTKSHAHKMVKWGLGLDDEGSSQGEPQSKSPQESRRLSIQRCIQSLVHACQCRNANCSLPSCQKMKRVVQHTKGCKRKTNGGCPVCKQLIALCCYHAKHCQENKCPVPFCLNIKHKLRQQQIQHRLQQAQLMRRRMATMNTRNVPQQSLPSPTSAPPGTPTQQPSTPQTPQPPAQPQPSPVSMSPAGFPSVARTQPPTTVSTGKPTSQVPAPPPPAQPPPAAVEAARQIEREAQQQQHLYRVNINNSMPPGRTGMGTPGSQMAPVSLNVPRPNQVSGPVMPSMPPGQWQQAPLPQQQPMPGLPRPVISMQAQAAVAGPRMPSVQPPRSISPSALQDLLRTLKSPSSPQQQQQVLNILKSNPQLMAAFIKQRTAKYVANQPGMQPQPGLQSQPGMQPQPGMHQQPSLQNLNAMQAGVPRPGVPPQQQAMGGLNPQGQALNIMNPGHNPNMASMNPQYREMLRRQLLQQQQQQQQQQQQQQQQQQGSAGMAGGMAGHGQFQQPQGPGGYPPAMQQQQRMQQHLPLQGSSMGQMAAQMGQLGQMGQPGLGADSTPNIQQALQQRILQQQQMKQQIGSPGQPNPMSPQQHMLSGQPQASHLPGQQIATSLSNQVRSPAPVQSPRPQSQPPHSSPSPRIQPQPSPHHVSPQTGSPHPGLAVTMASSIDQGHLGNPEQSAMLPQLNTPSRSALSSELSLVGDTTGDTLEKFVEGL

SEQ ID NO: 11411 - protein, 2404 aa, Homo sapiens
MAENLLDGPPNPKRAKLSSPGFSANDSTDFGSLFDLENDLPDELIPNGGELGLLNSGNLVPDAASKHKQLSELLRGGSGSSINPGIGNVSASSPVQQGLGGQAQGQPNSANMASLSAMGKSPLSQGDSSAPSLPKQAASTSGPTPAASQALNPQAQKQVGLATSSPATSQTGPGICMNANFNQTHPGLLNSNSGHSLINQASQGQAQVMNGSLGAAGRGRGAGMPYPTPAMQGASSSVLAETLTQVSPQMTGHAGLNTAQAGGMAKMGITGNTSPFGQPFSQAGGQPMGATGVNPQLASKQSMVNSLPTFPTDIKNTSVTNVPNMSQMQTSVGIVPTQAIATGPTADPEKRKLIQQQLVLLLHAHKCQRREQANGEVRACSLPHCRTMKNVLNHMTHCQAGKACQAILGSPASGIQNTIGSVGTGQQNATSLSNPNPIDPSSMQRAYAALGLPYMNQPQTQLQPQVPGQQPAQPQTHQQMRTLNPLGNNPMNIPAGGITTDQQPPNLISESALPTSLGATNPLMNDGSNSGNIGTLSTIPTAAPPSSTGVRKGWHEHVTQDLRSHLVHKLVQAIFPTPDPAALKDRRMENLVAYAKKVEGDMYESANSRDEYYHLLAEKIYKIQKELEEKRRSRLHKQGILGNQPALPAPGAQPPVIPQAQPVRPPNGPLSLPVNRMQVSQGMNSFNPMSLGNVQLPQAPMGPRAASPMNHSVQMNSMGSVPGMAISPSRMPQPPNMMGAHTNNMMAQAPAQSQFLPQNQFPSSSGAMSVGMGQPPAQTGVSQGQVPGAALPNPLNMLGPQASQLPCPPVTQSPLHPTPPPASTAAGMPSLQHTTPPGMTPPQPAAPTQPSTPVSSSGQTPTPTPGSVPSATQTQSTPTVQAAAQAQVTPQPQTPVQPPSVATPQSSQQQPTPVHAQPPGTPLSQAAASIDNRVPTPSSVASAETNSQQPGPDVPVLEMKTETQAEDTEPDPGESKGEPRSEMMEEDLQGASQVKEETDIAEQKSEPMEVDEKKPEVKVEVKEEEESSSNGTASQSTSPSQPRKKIFKPEELRQALMPTLEALYRQDPESLPFRQPVDPQLLGIPDYFDIVKNPMDLSTIKRKLDTGQYQEPWQYVDDVWLMFNNAWLYNRKTSRVYKFCSKLAEVFEQEIDPVMQSLGYCCGRKYEFSPQTLCCYGKQLCTIPRDAAYYSYQNRYHFCEKCFTEIQGENVTLGDDPSQPQTTISKDQFEKKKNDTLDPEPFVDCKECGRKMHQICVLHYDIIWPSGFVCDNCLKKTGRPRKENKFSAKRLQTTRLGNHLEDRVNKFLRRQNHPEAGEVFVRVVASSDKTVEVKPGMKSRFVDSGEMSESFPYRTKALFAFEEIDGVDVCFFGMHVQEYGSDCPPPNTRRVYISYLDSIHFFRPRCLRTAVYHEILIGYLEYVKKLGYVTGHIWACPPSEGDDYIFHCHPPDQKIPKPKRLQEWYKKMLDKAFAERIIHDYKDIFKQATEDRLTSAKELPYFEGDFWPNVLEESIKELEQEEEERKKEESTAASETTEGSQGDSKNAKKKNNKKTNKNKSSISRANKKKPSMPNVSNDLSQKLYATMEKHKEVFFVIHLHAGPVINTLPPIVDPDPLLSCDLMDGRDAFLTLARDKHWEFSSLRRSKWSTLCMLVELHTQGQDRFVYTCNECKHHVETRWHCTVCEDYDLCINCYNTKSHAHKMVKWGLGLDDEGSSQGEPQSKSPQESRRLSIQRCIQSLVHACQCRNANCSLPSCQKMKRVVQHTKGCKRKTNGGCPVCKQLIALCCYHAKHCQENKCPVPFCLNIKHKLRQQQIQHRLQQAQLMRRRMATMNTRNVPQQSLPSPTSAPPGTPTQQPSTPQTPQPPAQPQPSPVSMSPAGFPSVARTQPPTTVSTGKPTSQVPAPPPPAQPPPAAVEAARQIEREAQQQQHLYRVNINNSMPPGRTGMGTPGSQMAPVSLNVPRPNQVSGPVMPSMPPGQWQQAPLPQQQPMPGLPRPVISMQAQAAVAGPRMPSVQPPRSISPSALQDLLRTLKSPSSPQQQQQVLNILKSNPQLMAAFIKQRTAKYVANQPGMQPQPGLQSQPGMQPQPGMHQQPSLQNLNAMQAGVPRPGVPPQQQAMGGLNPQGQALNIMNPGHNPNMASMNPQYREMLRRQLLQQQQQQQQQQQQQQQQQQGSAGMAGGMAGHGQFQQPQGPGGYPPAMQQQQRMQQHLPLQGSSMGQMAAQMGQLGQMGQPGLGADSTPNIQQALQQRILQQQQMKQQIGSPGQPNPMSPQQHMLSGQPQASHLPGQQIATSLSNQVRSPAPVQSPRPQSQPPHSSPSPRIQPQPSPHHVSPQTGSPHPGLAVTMASSIDQGHLGNPEQSAMLPQLNTPSRSALSSELSLVGDTTGDTLEKFVEGL

SEQ ID NO: 11412 - protein, 191 aa, Homo sapiens
MGKKTKRTADSSSSEDEEEYVVEKVLDRRVVKGQVEYLLKWKGFSEEHNTWEPEKNLDCPELISEFMKKYKKMKEGENNKPREKSESNKRKSNFSNSADDIKSKKKREQSNDIARGFERGLEPEKIIGATDSCGDLMFLMKWKDTDEADLVLAKEANVKCPQIVIAFYEERLTWHAYPEDAENKEKETAKS

SEQ ID NO: 11413 - protein, 395 aa, Homo sapiens
MAEDGLPKIYSHPPTESSKTPTAATIFFGADNAIPKSETTITSEGDHVTSVNEYMLESDFSTTTDNKLTAKKEKLKSEDDMGTDFIKSTTHLQKEITSLTGTTNSITRDSITEHFMPVKIGNISSPVTTVSLIDFSTDIAKEDILLATIDTGDAEISITSEVSGTLKDSSAGVADAPAFPRKKDEADMSNYNSSIKSNVPADEAVQVTDSTIPEAEIPPAPEESFTTIPDITALEEEKITEIDLSVLEDDTSAVATLTDSDEKFITVFELTTSAEKDKDKREDTLLTDEETTEGASIWMERDTANEAETHSVLLTAVESRYDFVVPASIATNLVEESSTEEDLSETDNTETVPKITEPFSGTTSVLDTPDYKEDTSTTETDIFELLKEEPDEFMI

SEQ ID NO: 11414 - protein, 627 aa, Homo sapiens
MEEADRILIHSLRQAGTAVPPDVQTLRAFTTELVVEAVVRCLRVINPAVGSGLSPLLPLAMSARFRLAMSLAQACMDLGYPLELGYQNFLYPSEPDLRDLLLFLAERLPTDASEDADQPAGDSAILLRAIGSQIRDQLALPWVPPHLRTPKLQHLQGSALQKPFHASRLVVPELSSRGEPREFQASPLLLPVPTQVPQPVGRVASLLEHHALQLCQQTGRDRPGDEDWVHRTSRLPPQEDTRAQRQRLQKQLTEHLRQSWGLLGAPIQARDLGELLQAWGAGAKTGAPKGSRFTHSEKFTFHLEPQAQATQVSDVPATSRRPEQVTWAAQEQELESLREQLEGVNRSIEEVEADMKTLGVSFVQAESECRHSKLSTAEREQALRLKSRAVELLPDGTANLAKLQLVVENSAQRVIHLAGQWEKHRVPLLAEYRHLRKLQDCRELESSRRLAEIQELHQSVRAAAEEARRKEEVYKQLMSELETLPRDVSRLAYTQRILEIVGNIRKQKEEITKILSDTKELQKEINSLSGKLDRTFAVTDELVFKDAKKDDAVRKAYKYLAALHENCSQLIQTIEDTGTIMREVRDLEEQIETELGKKTLSNLEKIREDYRALRQENAGLLGRVREA

SEQ ID NO: 11415 - protein, 261 aa, Homo sapiens
MRLPEQPGEGKPENEKKGDGGALGGGEEPPRSQAPDFPTWEKMPFHHVTAGLLYKGNYLNRSLSAGSDSEQLANISVEELDEIREAFRVLDRDGNGFISKQELGMAMRSLGYMPSEVELAIIMQRLDMDGDGQVDFDEFMTILGPKLVSSEGRDGFLGNTIDSIFWQFDMQRITLEELKHILYHAFRDHLTMKDIENIIINEEESLNETSGNCQTEFEGVHSQKQNRQTCVRKSLICAFAMAFIISVMLIAANQILRSGME

SEQ ID NO: 11416 - protein, 219 aa, Homo sapiens
MPFHHVTAGLLYKGNYLNRSLSAGSDSEQLANISVEELDEIREAFRVLDRDGNGFISKQELGMAMRSLGYMPSEVELAIIMQRLDMDGDGQVDFDEFMTILGPKLVSSEGRDGFLGNTIDSIFWQFDMQRITLEELKHILYHAFRDHLTMKDIENIIINEEESLNETSGNCQTEFEGVHSQKQNRQTCVRKSLICAFAMAFIISVMLIAANQILRSGME

SEQ ID NO: 11417 - protein, 437 aa, Homo sapiens
MKCLGKRRGQAAAFLPLCWLFLKILQPGHSHLYNNRYAGDKVIRFIPKTEEEAYALKKISYQLKVDLWQPSSISYVSEGTVTDVHIPQNGSRALLAFLQEANIQYKVLIEDLQKTLEKGSSLHTQRNRRSLSGYNYEVYHSLEEIQNWMHHLNKTHSGLIHMFSIGRSYEGRSLFILKLGRRSRLKRAVWIDCGIHAREWIGPAFCQWFVKEALLTYKSDPAMRKMLNHLYFYIMPVFNVDGYHFSWTNDRFWRKTRSRNSRFRCRGVDANRNWKVKWCDEGASMHPCDDTYCGPFPESEPEVKAVANFLRKHRKHIRAYLSFHAYAQMLLYPYSYKYATIPNFRCVESAAYKAVNALQSVYGVRYRYGPASTTLYVSSGSSMDWAYKNGIPYAFAFELRDTGYFGFLLPEMLIKPTCTETMLAVKNITMHLLKKCP

SEQ ID NO: 11418 - protein, 315 aa, Homo sapiens
MKCLGKRRGQAAAFLPLCWLFLKILQPGHSHLYNNRYAGDKVIRFIPKTEEEAYALKKISYQLKVDLWQPSSISYVSEGTVTDVHIPQNGSRALLAFLQEANIQYKVLIEDLQKTLEKGSSLHTQRNRRSLSGYNYEVYHSLEEIQNWMHHLNKTHSGLIHMFSIGRSYEGRSLFILKLGRRSRLKRAVWIDCGIHAREWIGPAFCQWFVKEALLTYKSDPAMRKMLNHLYFYIMPVFNVDGYHFSWTNDRFWRKTRSRNSRFRCRGVDANRNWKVKWCGKFGTNWDPDPKVSAGFTLQNMSPEDSHGRLMFFCM

SEQ ID NO: 11419 - protein, 92 aa, Homo sapiens
MKCLGKRRGQAAAFLPLCWLFLKILQPGHSHLYNNRYAGDKVIRFIPKTEEEAYALKKISYQLKGPHRRSSENTGEGKQLAHPEKPKIPLWI

SEQ ID NO: 11420 - protein, 493 aa, Homo sapiens
MISSKPRLVVPYGLKTLLEGISRAVLKTNPSNINQFAAAYFQELTMYRGNTTMDIKDLVKQFHQIKVEKWSEGTTPQKKLECLKEPGKTSVESKVPTQMEKSTDTDEDNVTRTEYSDKTTQFPSVYAVPGTEQTEAVGGLSSKPATPKTTTPPSSPPPTAVSPEFAYVPADPAQLAAQMLGKVSSIHSDQSDVLMVDVATSMPVVIKEVPSSEAAEDVMVAAPLVCSGKVLEVQVVNQTSVHVDLGSQPKENEAEPSTASSVPLQDEQEPPAYDQAPEVTLQADIEVMSTVHISSVYNDVPVTEGVVYIEQLPEQIVIPFTDQVACLKENEQSKENEQSPRVSPKSVVEKTTSGMSKKSVESVKLAQLEENAKYSSVYMEAEATALLSDTSLKGQPEVPAQLLDAEGAIKIGSEKSLHLEVEITSIVSDNTGQEESGENSVPQEMEGKPVLSGEAAEAVHSGTSVKSSSGPFPPAPEGLTAPEIEPEGESTAE

SEQ ID NO: 11421 - protein, 475 aa, Homo sapiens
MISSKPRLVVPYGLKTLLEGISRAVLKTNPSNINQFAAAYFQELTMYRVEKWSEGTTPQKKLECLKEPGKTSVESKVPTQMEKSTDTDEDNVTRTEYSDKTTQFPSVYAVPGTEQTEAVGGLSSKPATPKTTTPPSSPPPTAVSPEFAYVPADPAQLAAQMLGKVSSIHSDQSDVLMVDVATSMPVVIKEVPSSEAAEDVMVAAPLVCSGKVLEVQVVNQTSVHVDLGSQPKENEAEPSTASSVPLQDEQEPPAYDQAPEVTLQADIEVMSTVHISSVYNDVPVTEGVVYIEQLPEQIVIPFTDQVACLKENEQSKENEQSPRVSPKSVVEKTTSGMSKKSVESVKLAQLEENAKYSSVYMEAEATALLSDTSLKGQPEVPAQLLDAEGAIKIGSEKSLHLEVEITSIVSDNTGQEESGENSVPQEMEGKPVLSGEAAEAVHSGTSVKSSSGPFPPAPEGLTAPEIEPEGESTAE

SEQ ID NO: 11422 - protein, 379 aa, Homo sapiens
MISSKPRLVVPYGLKTLLEGISRAVLKTNPSNINQFAAAYFQELTMYRGNTTMDIKDLVKQFHQIKVEKWSEGTTPQKKLECLKEPGKTSVESKVPTQMEKSTDTDEDNVTRTEYSDKTTQFPSVYAVPGTEQTEAVGGLSSKPATPKTTTPPSSPPPTAVSPEFAYVPADPAQLAAQMLAMATSERGQPPPCSNMWTLYCLTDKNQQGHPSPPPAPGPFPQATLYLPNPKDPQFQQHPPKVTFPTYVMGDTKKTSAPPFILVGSNVQEAQGWKPLPGHAVVSQSDVLRYVAMQVPIAVPADEKYQKHTLSPQNANPPSGQDVPRPKSPVFLSVAFPVEDVAKKSSGSGDKCAPFGSYGIAGEVTVTTAHKRRKAETEN

SEQ ID NO: 11423 - protein, 221 aa, Homo sapiens
MISSKPRLVVPYGLKTLLEGISRAVLKTNPSNINQFAAAYFQELTMYRGNTTMDIKDLVKQFHQIKVEKWSEGTTPQKKLECLKEPGKTSVESKVPTQMEKSTDTDEDNVTRTEYSDKTTQFPSVYAVPGTEQTEAVGGLSSKPATPKTTTPPSSPPPTAVSPEFAYVPADPAQLAAQMLEDVAKKSSGSGDKCAPFGSYGIAGEVTVTTAHKRRKAETEN

SEQ ID NO: 11424 - protein, 281 aa, Homo sapiens
MEKSTDTDEDNVTRTEYSDKTTQFPSVYAVPGTEQTEAVGGLSSKPATPKTTTPPSSPPPTAVSPEFAYVPADPAQLAAQMLAMATSERGQPPPCSNMWTLYCLTDKNQQGHPSPPPAPGPFPQATLYLPNPKDPQFQQHPPKVTFPTYVMGDTKKTSAPPFILVGSNVQEAQGWKPLPGHAVVSQSDVLRYVAMQVPIAVPADEKYQKHTLSPQNANPPSGQDVPRPKSPVFLSVAFPVEDVAKKSSGSGDKCAPFGSYGIAGEVTVTTAHKRRKAETEN

SEQ ID NO: 11425 - protein, 292 aa, Homo sapiens
MPVVIKEVPSSEAAEDVMVAAPLVCSGKVLEVQVVNQTSVHVDLGSQPKENEAEPSTASSVPLQDEQEPPAYDQAPEVTLQADIEVMSTVHISSVYNDVPVTEGVVYIEQLPEQIVIPFTDQVACLKENEQSKENEQSPRVSPKSVVEKTTSGMSKKSVESVKLAQLEENAKYSSVYMEAEATALLSDTSLKGQPEVPAQLLDAEGAIKIGSEKSLHLEVEITSIVSDNTGQEESGENSVPQEMEGKPVLSGEAAEAVHSGTSVKSSSGPFPPAPEGLTAPEIEPEGESTAE

SEQ ID NO: 11426 - protein, 448 aa, Homo sapiens
MSPLECSECFGDQLLHRTYTWQLTLHSRPNYTRKRDTRSESLEIPISVVLPQRGTAEPFPRLHNLYSTPRCAQQAALPRLSRRMASQHSYPLNRFSSVPLDPMERPMSQADLELDYNPPRVQLSDEMFVFQDGRWVNENCRLQSPYFSPSASFHHKLHHKRLAKECMLQEENKSLREENKALREENRMLSKENKILQVFWEEHKASLGREESRAPSPLLHKDSASLEVVKKDHVALQVPRGKEDSTLQLLREENRALQQLLEQKQAYWAQAEDTAAPAEESKPAPSPHEEPCSPGLLQDQGSGLSSRFEEPKGPPARQEDSKELRALRKMVSNMSGPSGEEEAKVGPGLPDGCQPLQLLREMRQALQALLKENRLLQEENRTLQVLRAEHRGFQEENKALWENNKLKLQQKLVIDTVTEVTARMEMLIEELYAFMPARSQDPKKPSRV

SEQ ID NO: 11427 - protein, 412 aa, Homo sapiens
MQPEGLKCRMEESNAERGTAEPFPRLHNLYSTPRCAQQAALPRLSRRMASQHSYPLNRFSSVPLDPMERPMSQADLELDYNPPRVQLSDEMFVFQDGRWVNENCRLQSPYFSPSASFHHKLHHKRLAKECMLQEENKSLREENKALREENRMLSKENKILQVFWEEHKASLGREESRAPSPLLHKDSASLEVVKKDHVALQVPRGKEDSTLQLLREENRALQQLLEQKQAYWAQAEDTAAPAEESKPAPSPHEEPCSPGLLQDQGSGLSSRFEEPKGPPARQEDSKELRALRKMVSNMSGPSGEEEAKVGPGLPDGCQPLQLLREMRQALQALLKENRLLQEENRTLQVLRAEHRGFQEENKALWENNKLKLQQKLVIDTVTEVTARMEMLIEELYAFMPARSQDPKKPSRV

SEQ ID NO: 11428 - protein, 499 aa, Homo sapiens
MRVLVPPAERSQDTRVGAPAWREAAQAMARTAHILTDRCGQEAVTMWQPKDSVLDPNVAHHLGRAAYIQPWRFRVEMIKGGGTLEKPPPGEGVTLWKGKMKPPAWYARLPLPLHRKARALQTTEVVHAHARGARLTAARLGRAQHQINGRVRQLLRQREVTDHRLSEVRKGLLINQQSVKLRGYRPKSEKVPDKADSMLTWEKEELKSMKRKMERDMEKSEVLLKTLASCRDTLNFCFKERLQAVDLMNQPLDKVLEQARRHSWVNLSRAPTPRTQGQKTPPPDPVGTYNPACALALNEAKRLLVESKDTLVEMAKNEVDVREQQLQISDRVCASLAQKASETLELKERLNMTLGLMRGTILRCTKYNQELYTTHGLIKGPLSKVHLETAEKLDRPLVRMYQRHVGTQLPEAARLAQGTDKLQCHITYLEKNLDELLATHKNLSWGLNCKNIGHEVDGNVVRLRLRQRQPHVCYEQAQRLVKDWDPRTPPPRSKSSADP

SEQ ID NO: 11429 - protein, 375 aa, Homo sapiens
MERASCLLLLLLPLVHVSATTPEPCELDDEDFRCVCNFSEPQPDWSEAFQCVSAVEVEIHAGGLNLEPFLKRVDADADPRQYADTVKALRVRRLTVGAAQVPAQLLVGALRVLAYSRLKELTLEDLKITGTMPPLPLEATGLALSSLRLRNVSWATGRSWLAELQQWLKPGLKVLSIAQAHSPAFSCEQVRAFPALTSLDLSDNPGLGERGLMAALCPHKFPAIQNLALRNTGMETPTGVCAALAAAGVQPHSLDLSHNSLRATVNPSAPRCMWSSALNSLNLSFAGLEQVPKGLPAKLRVLDLSCNRLNRAPQPDELPEVDNLTLDGNPFLVPGTALPHEGSMNSGVVPACARSTLSVGVSGTLVLLQGARGFA

SEQ ID NO: 11430 - protein, 638 aa, Homo sapiens
MSDKSELKAELERKKQRLAQIREEKKRKEEERKKKETDQKKEAVAPVQEESDLEKKRREAEALLQSMGLTPESPIVFSEYWVPPPMSPSSKSVSTPSEAGSQDSGDGAVGSRTLHWDTDPSVLQLHSDSDLGRGPIKLGMAKITQVDFPPREIVTYTKETQTPVMAQPKEDEEEDDDVVAPKPPIEPEEEKTLKKDEENDSKAPPHELTEEEKQQILHSEEFLSFFDHSTRIVERALSEQINIFFDYSGRDLEDKEGEIQAGAKLSLNRQFFDERWSKHRVVSCLDWSSQYPELLVASYNNNEDAPHEPDGVALVWNMKYKKTTPEYVFHCQSAVMSATFAKFHPNLVVGGTYSGQIVLWDNRSNKRTPVQRTPLSAAAHTHPVYCVNVVGTQNAHNLISISTDGKICSWSLDMLSHPQDSMELVHKQSKAVAVTSMSFPVGDVNNFVVGSEEGSVYTACRHGSKAGISEMFEGHQGPITGIHCHAAVGAVDFSHLFVTSSFDWTVKLWTTKNNKPLYSFEDNADYVYDVMWSPTHPALFACVDGMGRLDLWNLNNDTEVPTASISVEGNPALNRVRWTHSGREIAVGDSEGQIVIYDVGEQIAVPRNDEWARFGRTLAEINANRADAEEEAATRIPA

SEQ ID NO: 11431 - protein, 632 aa, Homo sapiens
MSDKSELKAELERKKQRLAQIREEKKRKEEERKKKETDQKKEAVAPVQEESDLEKKRREAEALLQSMGLTPESPIVPPPMSPSSKSVSTPSEAGSQDSGDGAVGSRTLHWDTDPSVLQLHSDSDLGRGPIKLGMAKITQVDFPPREIVTYTKETQTPVMAQPKEDEEEDDDVVAPKPPIEPEEEKTLKKDEENDSKAPPHELTEEEKQQILHSEEFLSFFDHSTRIVERALSEQINIFFDYSGRDLEDKEGEIQAGAKLSLNRQFFDERWSKHRVVSCLDWSSQYPELLVASYNNNEDAPHEPDGVALVWNMKYKKTTPEYVFHCQSAVMSATFAKFHPNLVVGGTYSGQIVLWDNRSNKRTPVQRTPLSAAAHTHPVYCVNVVGTQNAHNLISISTDGKICSWSLDMLSHPQDSMELVHKQSKAVAVTSMSFPVGDVNNFVVGSEEGSVYTACRHGSKAGISEMFEGHQGPITGIHCHAAVGAVDFSHLFVTSSFDWTVKLWTTKNNKPLYSFEDNADYVYDVMWSPTHPALFACVDGMGRLDLWNLNNDTEVPTASISVEGNPALNRVRWTHSGREIAVGDSEGQIVIYDVGEQIAVPRNDEWARFGRTLAEINANRADAEEEAATRIPA

SEQ ID NO: 11432 - protein, 612 aa, Homo sapiens
MSDKSELKAELERKKQRLAQIREEKKRKEEERKKKETDQKKEAVAPVQEESDLEKKRREAEALLQSMGLTPESPIVPPPMSPSSKSVSTPSEAGSQDSGDGAVGSRRGPIKLGMAKITQVDFPPREIVTYTKETQTPVMAQPKEDEEEDDDVVAPKPPIEPEEEKTLKKDEENDSKAPPHELTEEEKQQILHSEEFLSFFDHSTRIVERALSEQINIFFDYSGRDLEDKEGEIQAGAKLSLNRQFFDERWSKHRVVSCLDWSSQYPELLVASYNNNEDAPHEPDGVALVWNMKYKKTTPEYVFHCQSAVMSATFAKFHPNLVVGGTYSGQIVLWDNRSNKRTPVQRTPLSAAAHTHPVYCVNVVGTQNAHNLISISTDGKICSWSLDMLSHPQDSMELVHKQSKAVAVTSMSFPVGDVNNFVVGSEEGSVYTACRHGSKAGISEMFEGHQGPITGIHCHAAVGAVDFSHLFVTSSFDWTVKLWTTKNNKPLYSFEDNADYVYDVMWSPTHPALFACVDGMGRLDLWNLNNDTEVPTASISVEGNPALNRVRWTHSGREIAVGDSEGQIVIYDVGEQIAVPRNDEWARFGRTLAEINANRADAEEEAATRIPA

SEQ ID NO: 11433 - protein, 637 aa, Homo sapiens
MSDKSELKAELERKKQRLAQIREEKKRKEEERKKKETDQKKEAVAPVQEESDLEKKRREAEALLQSMGLTPESPIVFSEYWVPPPMSPSSKSVSTPSEAGSQDSGDGAVGSRTLHWDTDPSVLQLHSDSDLGRGPIKLGMAKITQVDFPPREIVTYTKETQTPVMAQPKEDEEEDDDVVAPKPPIEPEEEKTLKKDEENDSKAPPHELTEEEKQQILHSEEFLSFFDHSTRIVERALSEQINIFFDYSGRDLEDKEGEIQAGAKLSLNRQFFDERWSKHRVVSCLDWSSQYPELLVASYNNNEDAPHEPDGVALVWNMKYKKTTPEYVFHCQSAVMSATFAKFHPNLVVGGTYSGQIVLWDNRSNKRTPVQRTPLSAAAHTHPVYCVNVVGTQNAHNLISISTDGKICSWSLDMLSHPQDSMELVHKQSKAVAVTSMSFPVGDVNNFVVGSEEGSVYTACRHGSKAGISEMFEGHQGPITGIHCHAAVGAVDFSHLFVTSSFDWTVKLWTTKNNKPLYSFEDNADYVYDVMWSPTHPALFACVDGMGRLDLWNLNNDTEVPTASISVEGNPALNRVRWTHSGREIAVGDSEGQIVIYDVGEIAVPRNDEWARFGRTLAEINANRADAEEEAATRIPA

SEQ ID NO: 11434 - protein, 611 aa, Homo sapiens
MSDKSELKAELERKKQRLAQIREEKKRKEEERKKKETDQKKEAVAPVQEESDLEKKRREAEALLQSMGLTPESPIVPPPMSPSSKSVSTPSEAGSQDSGDGAVGSRRGPIKLGMAKITQVDFPPREIVTYTKETQTPVMAQPKEDEEEDDDVVAPKPPIEPEEEKTLKKDEENDSKAPPHELTEEEKQQILHSEEFLSFFDHSTRIVERALSEQINIFFDYSGRDLEDKEGEIQAGAKLSLNRQFFDERWSKHRVVSCLDWSSQYPELLVASYNNNEDAPHEPDGVALVWNMKYKKTTPEYVFHCQSAVMSATFAKFHPNLVVGGTYSGQIVLWDNRSNKRTPVQRTPLSAAAHTHPVYCVNVVGTQNAHNLISISTDGKICSWSLDMLSHPQDSMELVHKQSKAVAVTSMSFPVGDVNNFVVGSEEGSVYTACRHGSKAGISEMFEGHQGPITGIHCHAAVGAVDFSHLFVTSSFDWTVKLWTTKNNKPLYSFEDNADYVYDVMWSPTHPALFACVDGMGRLDLWNLNNDTEVPTASISVEGNPALNRVRWTHSGREIAVGDSEGQIVIYDVGEIAVPRNDEWARFGRTLAEINANRADAEEEAATRIPA

SEQ ID NO: 11435 - protein, 630 aa, Homo sapiens
MSDKSELKAELERKKQRLAQIREEKKRKEEERKKKETDQKKEAVAPVQEESDLEKKRREAEALLQSMGLTPESPIAEQPLRVVTADTCLFHYLVPPPMSPSSKSVSTPSEAGSQDSGDGAVGSRRGPIKLGMAKITQVDFPPREIVTYTKETQTPVMAQPKEDEEEDDDVVAPKPPIEPEEEKTLKKDEENDSKAPPHELTEEEKQQILHSEEFLSFFDHSTRIVERALSEQINIFFDYSGRDLEDKEGEIQAGAKLSLNRQFFDERWSKHRVVSCLDWSSQYPELLVASYNNNEDAPHEPDGVALVWNMKYKKTTPEYVFHCQSAVMSATFAKFHPNLVVGGTYSGQIVLWDNRSNKRTPVQRTPLSAAAHTHPVYCVNVVGTQNAHNLISISTDGKICSWSLDMLSHPQDSMELVHKQSKAVAVTSMSFPVGDVNNFVVGSEEGSVYTACRHGSKAGISEMFEGHQGPITGIHCHAAVGAVDFSHLFVTSSFDWTVKLWTTKNNKPLYSFEDNADYVYDVMWSPTHPALFACVDGMGRLDLWNLNNDTEVPTASISVEGNPALNRVRWTHSGREIAVGDSEGQIVIYDVGEQIAVPRNDEWARFGRTLAEINANRADAEEEAATRIPA

SEQ ID NO: 11436 - protein, 431 aa, Homo sapiens
MRRLRRLAHLVLFCPFSKRLQGRLPGLRVRCIFLAWLGVFAGSWLVYVHYSSYSERCRGHVCQVVICDQYRKGIISGSVCQDLCELHMVEWRTCLSVAPGQQVYSGLWRDKDVTIKCGIEETLDSKARSDAAPRRELVLFDKPTRGTSIKEFREMTLSFLKANLGDLPSLPALVGQVLLMADFNKDNRVSLAEAKSVWALLQRNEFLLLLSLQEKEHASRLLGYCGDLYLTEGVPHGAWHAAALPPLLRPLLPPALQGALQQWLGPAWPWRAKIAIGLLEFVEELFHGSYGTFYMCETTLANVGYTATYDFKMADLQQVAPEATVRRFLQGRRCEHSTDCTYGRDCRAPCDRLMRQCKGDLIQPNLAKVCALLRGYLLPGAPADLREELGTQLRTCTTLSGLASQVEAHHSLVLSHLKTLLWKKISNTKYS

SEQ ID NO: 11437 - protein, 344 aa, Homo sapiens
MVEWRTCLSVAPGQQVYSGLWRDKDVTIKCGIEETLDSKARSDAAPRRELVLFDKPTRGTSIKEFREMTLSFLKANLGDLPSLPALVGQVLLMADFNKDNRVSLAEAKSVWALLQRNEFLLLLSLQEKEHASRLLGYCGDLYLTEGVPHGAWHAAALPPLLRPLLPPALQGALQQWLGPAWPWRAKIAIGLLEFVEELFHGSYGTFYMCETTLANVGYTATYDFKMADLQQVAPEATVRRFLQGRRCEHSTDCTYGRDCRAPCDRLMRQCKGDLIQPNLAKVCALLRGYLLPGAPADLREELGTQLRTCTTLSGLASQVEAHHSLVLSHLKTLLWKKISNTKYS

SEQ ID NO: 11438 - protein, 597 aa, Homo sapiens
MFPVAPKPQDSSQPSDRLMTEKQQEEAEWESINVLLMMHGLKPLSLVKRTDLKDLIIFDKQSSQRMRQNLKLLVEETSCQQNMIQELIETNQQLRNELQLEQSRAANQEQRANDLEQIMESVKSKIGELEDESLSRACHQQNKIKDLQKEQKTLQVKCQHYKKKRTEQEETIASLQMEVCRLKKEEEDRIVTQNRVFAYLCKRVPHTVLDRQLLCLIDYYESKIRKIHTQRQYKEDESQSEEENDYRNLDASPTYKGLLMSLQNQLKESKSKIDALSSEKLNLQKDLETRPTQHELRLYKQQVKKLEKALKKNVKLQELINHKKAEDTEKKDEPSKYNQQQALIDQRYFQVLCSINSIIHNPRAPVIIYKQTKGGVQNFNKDLVQDCGFEHLVPVIEMWADQLTSLKDLYKSLKTLSAELVPWLNLKKQDENEGIKVEDLLFIVDTMLEEVENKEKDSNMPHFQTLQAIVSHFQKLFDVPSLNGVYPRMNEVYTRLGEMNNAVRNLQELLELDSSSSLCVLVSTVGKLCRLINEDVNEQVMQVLGPEDLQSIIYKLEEHEEFFPAFQAFTNDLLEILEIDDLDAIVPAVKKLKVLSY

SEQ ID NO: 11439 - protein, 554 aa, Homo sapiens
MFPVAPKPQDSSQPSDRLMTEKQQEEAEWESINVLLMMHGLKPLSLVKRTDLKDLIIFDKQSSQRMRQNLKLLVEETSCQQNMIQELIETNQQLRNELQLEQSRAANQEQRANDLEQIMESVKSKIGELEDESLSRACHQQNKIKDLQKEQKTLQVKCQHYKKKRTEQEETIASLQMEVCRLKKEEEDRIVTQNRVFAYLCKRVPHTVLDRQLLCLIDYYESKIRKIHTQRQYKEDESQSEEENDYRNLDASPTYKGLLMSLQNQLKESKSKIDALSSEKLNLQKDLETRPTQHELRLYKQQVKKLEKALKKNVKLQELINHKKAEDTEKKDEPSKYNQQQALIDQRYFQVLCSINSIIHNPRAPVIIYKQTKGGVQNFNKDLVQDCGFEHLVPVIEMWADQLTSLKDLYKSLKTLSAELVPWLNLKKQDENEGIKVEDLLFIVDTMLEEVENKEKDSNMPHFQTLQAIVSHFQKLFDVPSLNGVYPRMNEVYTRLGEMNNAVRNLQELLELDSSSSLCVLVSTVGKLCRLINEDVNEQVMQVLGPEDLQRYLF

SEQ ID NO: 11440 - protein, 212 aa, Homo sapiens
MFPVAPKPQDSSQPSDRLMTEKQQEEAEWESINVLLMMHGLKPLSLVKRTDLKDLIIFDKQSSQRMRQNLKLLVEETSCQQNMIQELIETNQQLRNELQLEQSRAANQEQRANDLEQIMESVKSKIGELEDESLSRACHQQNKIKDLQKEQKTLQVKCQHYKKKRTEQEETIASLQMEVCRLKKEEEDRIVTQNRVFAYLCKRVPHTVLDRQ

SEQ ID NO: 11441 - protein, 579 aa, Homo sapiens
MTEKQQEEAEWESINVLLMMHGLKPLSLVKRTDLKDLIIFDKQSSQRMRQNLKLLVEETSCQQNMIQELIETNQQLRNELQLEQSRAANQEQRANDLEQIMESVKSKIGELEDESLSRACHQQNKIKDLQKEQKTLQVKCQHYKKKRTEQEETIASLQMEVCRLKKEEEDRIVTQNRVFAYLCKRVPHTVLDRQLLCLIDYYESKIRKIHTQRQYKEDESQSEEENDYRNLDASPTYKGLLMSLQNQLKESKSKIDALSSEKLNLQKDLETRPTQHELRLYKQQVKKLEKALKKNVKLQELINHKKAEDTEKKDEPSKYNQQQALIDQRYFQVLCSINSIIHNPRAPVIIYKQTKGGVQNFNKDLVQDCGFEHLVPVIEMWADQLTSLKDLYKSLKTLSAELVPWLNLKKQDENEGIKVEDLLFIVDTMLEEVENKEKDSNMPHFQTLQAIVSHFQKLFDVPSLNGVYPRMNEVYTRLGEMNNAVRNLQELLELDSSSSLCVLVSTVGKLCRLINEDVNEQVMQVLGPEDLQSIIYKLEEHEEFFPAFQAFTNDLLEILEIDDLDAIVPAVKKLKVLSY

SEQ ID NO: 11442 - protein, 577 aa, Homo sapiens
MTEQEEAEWESINVLLMMHGLKPLSLVKRTDLKDLIIFDKQSSQRMRQNLKLLVEETSCQQNMIQELIETNQQLRNELQLEQSRAANQEQRANDLEQIMESVKSKIGELEDESLSRACHQQNKIKDLQKEQKTLQVKCQHYKKKRTEQEETIASLQMEVCRLKKEEEDRIVTQNRVFAYLCKRVPHTVLDRQLLCLIDYYESKIRKIHTQRQYKEDESQSEEENDYRNLDASPTYKGLLMSLQNQLKESKSKIDALSSEKLNLQKDLETRPTQHELRLYKQQVKKLEKALKKNVKLQELINHKKAEDTEKKDEPSKYNQQQALIDQRYFQVLCSINSIIHNPRAPVIIYKQTKGGVQNFNKDLVQDCGFEHLVPVIEMWADQLTSLKDLYKSLKTLSAELVPWLNLKKQDENEGIKVEDLLFIVDTMLEEVENKEKDSNMPHFQTLQAIVSHFQKLFDVPSLNGVYPRMNEVYTRLGEMNNAVRNLQELLELDSSSSLCVLVSTVGKLCRLINEDVNEQVMQVLGPEDLQSIIYKLEEHEEFFPAFQAFTNDLLEILEIDDLDAIVPAVKKLKVLSY

SEQ ID NO: 11443 - protein, 783 aa, Homo sapiens
MLLGFRRGRRSHFKHIIHGLLPAASVAPKAAVPRTPPPRSPNPSPERPRSALAAAILATTLTGRTVAIPQPRQRSRSESDVSSVEQDSFIEPYATTSQLRPRPNWQSEMGRRSSLPSFETLDYGDEEDIETQLSSSGKELGDVSAREDRGGHSDDLYAVPHRNQVPLLHEVNSEDDENISHQDGFPGSPPAPQRTQQKDGKHPVLNLKDEKPPLCEKPPPSPDITGRARQRYTEITREKFEALKEENMDLNNMNQSLTLELNTMKQAMKELQLKLKGMEKEKRKLKEAEKASSQEVAAPELLYLRKQAQELVDENDGLKMTVHRLNVELSRYQTKFRHLSKEESLNIEGLPSKGPIPPWLLDIKYLSPLLLAYEDMMKEKDELNATLKEEMRMFRMRVQEVVKENEELHQELNKSSAVTSEEWRQLQTQAKLVLEENKLLLEQLEIQQRKAKDSHQERLQEVSKLTKQLMLLEAKTHGQEKELAENREQLEILRAKCQELKTHSDGKIAVEVHKSIVNELKSQLQKEEEKERAEMEELMEKLTVLQAQKKSLLLEKNSLTEQNKALEAELERAQKINRKSQKKIEVLKKQVEKAMGNEMSAHQYLANLVGLAENITQERDSLMCLAKCLESEKDGVLNKVIKSNIRLGKLEEKVKGYKKQAALKLGDISHRLLEQQEDFAGKTAQYRQEMRHLHQVLKDKQEVLDQALQQNREMEGELEVIWESTFRENRRIRELLQDTLTRTGVQDNPRALVAPSLNGVSQADLLDGCDVCSYDLKSHAPTC

SEQ ID NO: 11444 - protein, 536 aa, Homo sapiens
MDLNNMNQSLTLELNTMKQAMKELQLKLKGMEKEKRKLKEAEKASSQEVAAPELLYLRKQAQELVDENDGLKMTVHRLNVELSRYQTKFRHLSKEESLNIEGLPSKGPIPPWLLDIKYLSPLLLAYEDMMKEKDELNATLKEEMRMFRMRVQEVVKENEELHQELNKSSAVTSEEWRQLQTQAKLVLEENKLLLEQLEIQQRKAKDSHQERLQEVSKLTKQLMLLEAKTHGQEKELAENREQLEILRAKCQELKTHSDGKIAVEVHKSIVNELKSQLQKEEEKERAEMEELMEKLTVLQAQKKSLLLEKNSLTEQNKALEAELERAQKINRKSQKKIEVLKKQVEKAMGNEMSAHQYLANLVGLAENITQERDSLMCLAKCLESEKDGVLNKVIKSNIRLGKLEEKVKGYKKQAALKLGDISHRLLEQQEDFAGKTAQYRQEMRHLHQVLKDKQEVLDQALQQNREMEGELEVIWESTFRENRRIRELLQDTLTRTGVQDNPRALVAPSLNGVSQADLLDGCDVCSYDLKSHAPTC

SEQ ID NO: 11445 - protein, 357 aa, Homo sapiens
MLLGFRRGRRSHFKHIIHGLLPAASVAPKAAVPRTPPPRSPNPSPERPRSALAAAILATTLTGRTVAIPQPRQRSRSESDVSSVEQDSFIEPYATTSQLRPRPNWQSEMGRRSSLPSFETLDYGDEEDIETQLSSSGKELGDVSAREDRGGHSDDLYAVPHRNQVPLLHEVNSEDDENISHQDGFPGSPPAPQRTQQKDGKHPVLNLKDEKPPLCEKPPPSPDITGRARQRYTEITREKFEALKEENMDLNNMNQSLTLELNTMKQAMKELQLKLKGMEKEKRKLKEAEKASSQEVAAPELLYLRKQAQELVDENDGLKMTVHRLNVELSRYQTKFRHLSKEEVTFPIVKISFSDFC

SEQ ID NO: 11446 - protein, 762 aa, Homo sapiens
MAMQEKYPTEGISHVTSPSSDVIQKGSSLGTEWQTPVISEPFRSRFSRCSSVADSGDTAIGTSCSDIAEDFCSSSGSPPFQPIKSHVTIPTAHVMPSTLGTSPAKPNSTPVGPSSSKLPLSGLAESVGMTRNGDLGAMKHSPGLSRDLMYFSGATGENGIEQSWFPAVGHERQEEARKFDIPSMESTLNQSAMMETLYSDPHHRVRFHNPRTSTSKELYRVLPEAKKAPGSGAVFERNGPHSNSSGVLPLGLQPAPGLSKPLPSQVWQPSPDTWHPREQSCELSTCRQQLELIRLQMEQMQLQNGAICHHPAAFGPSLPILEPAQWISILNSNEHLLKEKELLIDKQRKHISQLEQKVRESELQVHSALLGRPAPFGDVCLLRLQELQRENTFLRAQFAQKTEALSREKIDLEKKLSASEVEVQLIRESLKVALQKHSEEVKKQEERVKGRDKHINNLKKKCQKESEQNREKQQRIETLERYLADLPTLEDHQKQSQQLKDSELKSTELQEKVTELESLLEETQAICREKEIQLESLRQREAEFSSAGHSLQDKQSVEETSGEGPEVEMESWQKRYDSLQKIVEKQQQKMDQLRSQVQSLEQEVAQEEGTSQALREEAQRRDSALQQLRTAVKELSVQNQDLIEKNLTLQEHLRQAQPGSPPSPDTAQLALELHQELASCLQDLQAVCSIVTQRAQGHDPNLSLLLGIHSAQHPETQLDLQKPDVIKRKLEEVQQLRRDIEDLRTTMSDRYAQDMGENCVTQ

SEQ ID NO: 11447 - protein, 761 aa, Homo sapiens
MAMQEKYPTEGISHVTSPSSDVIQKGSSLGTEWQTPVISEPFRSRFSRCSSVADSGDTAIGTSCSDIAEDFCSSSGSPPFQPIKSHVTIPTAHVMPSTLGTSPAKPNSTPVGPSSSKLPLSGLAESVGMTRNGDLGAMKHSPGLSRDLMYFSGATGENGIEQSWFPAVGHERQEEARKFDIPSMESTLNQSAMMETLYSDPHHRVRFHNPRTSTSKELYRVLPEAKKAPGSGAVFERNGPHSNSSGVLPLGLQPAPGLSKPLPSQVWQPSPDTWHPREQSCELSTCRQQLELIRLQMEQMQLQNGAICHHPAAFGPSLPILEPAQWISILNSNEHLLKEKELLIDKQRKHISQLEQKVRESELQVHSALLGRPAPFGDVCLLRLQELQRENTFLRAQFAQKTEALSREKIDLEKKLSASEVEVQLIRESLKVALQKHSEEVKKQEERVKGRDKHINNLKKKCQKESEQNREKQQRIETLERYLADLPTLEDHQKQSQQLKDSELKSTELQEKVTELESLLEETQAICREKEIQLESLRQREAEFSSAGHSLQDKQSVEETSGEGPEVEMESWQKRYDSLQKIVEKQQQKMDQLRSQVQSLEQEVAQEEGTSQALREEAQRRDSALQQLRTAVKELSVQNQDLIEKNLTLQEHLRQAQPGSPPSPDTAQLALELHQELASCLQDLQAVCSIVTQRAQGHDPNLSLLLGIHSQHPETQLDLQKPDVIKRKLEEVQQLRRDIEDLRTTMSDRYAQDMGENCVTQ

SEQ ID NO: 11448 - protein, 194 aa, Homo sapiens
MESWQKRYDSLQKIVEKQQQKMDQLRSQVQSLEQEVAQEEGTSQALREEAQRRDSALQQLRTAVKELSVQNQDLIEKNLTLQEHLRQAQPGSPPSPDTAQLALELHQELASCLQDLQAVCSIVTQRAQGHDPNLSLLLGIHSAQHPETQLDLQKPDVIKRKLEEVQQLRRDIEDLRTTMSDRYAQDMGENCVTQ

SEQ ID NO: 11449 - protein, 711 aa, Homo sapiens
MAMQEKYPTEGISHVTSPNFCSSSGSPPFQPIKSHVTIPTAHVMPSTLGTSPAKPNSTPVGPSSSKLPLSGLAESVGMTRNGDLGAMKHSPGLSRDLMYFSGATGENGIEQSWFPAVGHERQEEARKFDIPSMESTLNQSAMMETLYSDPHHRVRFHNPRTSTSKELYRVLPEAKKAPGSGAVFERNGPHSNSSGVLPLGLQPAPGLSKPLPSQVWQPSPDTWHPREQSCELSTCRQQLELIRLQMEQMQLQNGAICHHPAAFGPSLPILEPAQWISILNSNEHLLKEKELLIDKQRKHISQLEQKVRESELQVHSALLGRPAPFGDVCLLRLQELQRENTFLRAQFAQKTEALSREKIDLEKKLSASEVEVQLIRESLKVALQKHSEEVKKQEERVKGRDKHINNLKKKCQKESEQNREKQQRIETLERYLADLPTLEDHQKQSQQLKDSELKSTELQEKVTELESLLEETQAICREKEIQLESLRQREAEFSSAGHSLQDKQSVEETSGEGPEVEMESWQKRYDSLQKIVEKQQQKMDQLRSQVQSLEQEVAQEEGTSQALREEAQRRDSALQQLRTAVKELSVQNQDLIEKNLTLQEHLRQAQPGSPPSPDTAQLALELHQELASCLQDLQAVCSIVTQRAQGHDPNLSLLLGIHSAQHPETQLDLQKPDVIKRKLEEVQQLRRDIEDLRTTMSDRYAQDMGENCVTQ

SEQ ID NO: 11450 - protein, 281 aa, Homo sapiens
MSAQESCLSLIKYFLFVFNLFFFVLGSLIFCFGIWILIDKTSFVSFVGLAFVPLQIWSKVLAISGIFTMGIALLGCVGALKELRCLLGLYFGMLLLLFATQITLGILISTQRAQLERSLRDVVEKTIQKYGTNPEETAAEESWDYVQFQLRCCGWHYPQDWFQVLILRGNGSEAHRVPCSCYNLSATNDSTILDKVILPQLSRLGHLARSRHSADICAVPAESHIYREGCAQGLQKWLHNNLISIVGICLGVGLLELGFMTLSIFLCRNLDHVYNRLARYR

SEQ ID NO: 11451 - protein, 213 aa, Homo sapiens
MGIALLGCVGALKELRCLLGLYFGMLLLLFATQITLGILISTQRAQLERSLRDVVEKTIQKYGTNPEETAAEESWDYVQFQLRCCGWHYPQDWFQVLILRGNGSEAHRVPCSCYNLSATNDSTILDKVILPQLSRLGHLARSRHSADICAVPAESHIYREGCAQGLQKWLHNNLISIVGICLGVGLLELGFMTLSIFLCRNLDHVYNRLARYR

SEQ ID NO: 11452 - protein, 202 aa, Homo sapiens
MGIALLGCVGALKELRCLLGLYFGMLLLLFATQITLGILISTQRAQLERSLRDVVEKTIQKYGTNPEETAAEESWDYVQFQLRCCGWHYPQDWFQVLILRGNGSEAHRVPCSCYNLSATNDSTILDKVILPQLSRLGHLARSRHSADICAVPAESHIYREGCAQGLQKWLHNNLISIVGICLGVGLLEVIWPRPHPRSALNP

SEQ ID NO: 11453 - protein, 960 aa, Homo sapiens
MKIPNIGNVMNKFEILGVVGEGAYGVVLKCRHKETHEIVAIKKFKDSEENEEVKETTLRELKMLRTLKQENIVELKEAFRRRGKLYLVFEYVEKNMLELLEEMPNGVPPEKVKSYIYQLIKAIHWCHKNDIVHRDIKPENLLISHNDVLKLCDFGFARNLSEGNNANYTEYVATRWYRSPELLLGAPYGKSVDMWSVGCILGELSDGQPLFPGESEIDQLFTIQKVLGPLPSEQMKLFYSNPRFHGLRFPAVNHPQSLERRYLGILNSVLLDLMKNLLKLDPADRYLTEQCLNHPTFQTQRLLDRSPSRSAKRKPYHVESSTLSNRNQAGKSTALQSHHRSNSKDIQNLSVGLPRADEGLPANESFLNGNLAGASLSPLHTKTYQASSQPGSTSKDLTNNNIPHLLSPKEAKSKTEFDFNIDPKPSEGPGTKYLKSNSRSQQNRHSFMESSQSKAGTLQPNEKQSRHSYIDTIPQSSRSPSYRTKAKSHGALSDSKSVSNLSEARAQIAEPSTSRYFPSSCLDLNSPTSPTPTRHSDTRTLLSPSGRNNRNEGTLDSRRTTTRHSKTMEELKLPEHMDSSHSHSLSAPHESFSYGLGYTSPFSSQQRPHRHSMYVTRDKVRAKGLDGSLSIGQGMAARANSLQLLSPQPGEQLPPEMTVARSSVKETSREGTSSFHTRQKSEGGVYHDPHSDDGTAPKENRHLYNDPVPRRVGSFYRVPSPRPDNSFHENNVSTRVSSLPSESSSGTNHSKRQPAFDPWKSPENISHSEQLKEKEKQGFFRSMKKKKKKSQTVPNSDSPDLLTLQKSIHSASTPSSRPKEWRPEKISDLQTQSQPLKSLRKLLHLSSASNHPASSDPRFQPLTAQQTKNSFSEIRIHPLSQASGGSSNIRQEPAPKGRPALQLPGQMDPGWHVSSVTRSATEGPSYSEQLGAKSGPNGHPYNRTNRSRMPNLNDLKETAL

SEQ ID NO: 11454 - protein, 1030 aa, Homo sapiens
MKIPNIGNVMNKFEILGVVGEGAYGVVLKCRHKETHEIVAIKKFKDSEENEEVKETTLRELKMLRTLKQENIVELKEAFRRRGKLYLVFEYVEKNMLELLEEMPNGVPPEKVKSYIYQLIKAIHWCHKNDIVHRDIKPENLLISHNDVLKLCDFGFARNLSEGNNANYTEYVATRWYRSPELLLGAPYGKSVDMWSVGCILGELSDGQPLFPGESEIDQLFTIQKVLGPLPSEQMKLFYSNPRFHGLRFPAVNHPQSLERRYLGILNSVLLDLMKNLLKLDPADRYLTEQCLNHPTFQTQRLLDRSPSRSAKRKPYHVESSTLSNRNQAGKSTALQSHHRSNSKDIQNLSVGLPRADEGLPANESFLNGNLAGASLSPLHTKTYQASSQPGSTSKDLTNNNIPHLLSPKEAKSKTEFDFNIDPKPSEGPGTKYLKSNSRSQQNRHSFMESSQSKAGTLQPNEKQSRHSYIDTIPQSSRSPSYRTKAKSHGALSDSKSVSNLSEARAQIAEPSTSRYFPSSCLDLNSPTSPTPTRHSDTRTLLSPSGRNNRNEGTLDSRRTTTRHSKTMEELKLPEHMDSSHSHSLSAPHESFSYGLGYTSPFSSQQRPHRHSMYVTRDKVRAKGLDGSLSIGQGMAARANSLQLLSPQPGEQLPPEMTVARSSVKETSREGTSSFHTRQKSEGGVYHDPHSDDGTAPKENRHLYNDPVPRRVGSFYRVPSPRPDNSFHENNVSTRVSSLPSESSSGTNHSKRQPAFDPWKSPENISHSEQLKEKEKQGFFRSMKKKKKKSQTVPNSDSPDLLTLQKSIHSASTPSSRPKEWRPEKISDLQTQSQPLKSLRKLLHLSSASNHPASSDPRFQPLTAQQTKNSFSEIRIHPLSQASGGSSNIRQEPAPKGRPALQLPDGGCDGRRQRHHSGPQDRRFMLRTTEQQGEYFCCGDPKKPHTPCVPNRALHRPISSPAPYPVLQVRGTSMCPTLQVRGTDAFSCPTQQSGFSFFVRHVMREALIHRAQVNQAALLTYHENAALTGK

SEQ ID NO: 11455 - protein, 476 aa, Homo sapiens [sequence omitted]

SEQ ID NO: 11456 - protein, 368 aa, Homo sapiens
MVSTPENRQTFITSVIKFLRQYEFDGLDFDWEYPGSRGSPPQDKHLFTVLVQEMREAFEQEAKQINKPRLMVTAAVAAGISNIQSGYEIPQLSQYLDYIHVMTYDLHGSWEGYTGENSPLYKYPTDTGSNAYLNVDYVMNYWKDNGAPAEKLIVGFPTYGHNFILSNPSNTGIGAPTSGAGPAGPYAKESGIWAYYEICTFLKNGATQGWDAPQEVPYAYQGNVWVGYDNIKSFDIKAQWLKHNKFGGAMVWAIDLDDFTGTFCNQGKFPLISTLKKALGLQSASCTAPAQPIEPITAAPSGSGNGSGSSSSGGSSGGSGFCAVRANGLYPVANNRNAFWHCVNGVTYQQNCQAGLVFDTSCDCCNWA

SEQ ID NO: 11457 - protein, 315 aa, Homo sapiens
MREAFEQEAKQINKPRLMVTAAVAAGISNIQSGYEIPQLSQYLDYIHVMTYDLHGSWEGYTGENSPLYKYPTDTGSNAYLNVDYVMNYWKDNGAPAEKLIVGFPTYGHNFILSNPSNTGIGAPTSGAGPAGPYAKESGIWAYYEICTFLKNGATQGWDAPQEVPYAYQGNVWVGYDNIKSFDIKAQWLKHNKFGGAMVWAIDLDDFTGTFCNQGKFPLISTLKKALGLQSASCTAPAQPIEPITAAPSGSGNGSGSSSSGGSSGGSGFCAVRANGLYPVANNRNAFWHCVNGVTYQQNCQAGLVFDTSCDCCNWA

SEQ ID NO: 11458 - protein, 469 aa, Homo sapiens
MAEEREPELYLKWKHCETPGVKTLCNLKHCETPGVKTLCNLKKLLNRLQKDHREDVYLYISGHLNPNKLYQPPETILQHWPNAHRPKGERASEVGEPPAGKVARMKEALAHFTIHTALVPSEAQDTPLFRYLNPQASLSHTSEEDFLPVEAVREGKEEKKGGPPGRGPPGWRRREELRLPDLKVLCYQEAGSRGTRDRHHYVSSYLAGATSADRYRMFLRFQKEVLAKQDLLKNDFTGSKAAAGHERKLQQELQKICTCSPQQFNRLHVFGKVFEDICNSSLIFGDLLKKVKDEYELYMATLLESQPAAQYEALLAQLKALGQRPVKTADMDLAREELRMLVTATKAALEQNDRLRSELEMEVALLQSAKERSESSEKHIIDENRLTLTEKVEKKRCEILSKWDEIQALEKEIKTTLVHTGISDITENRIKSIEHEAIQLETENMILKKKIKGPLEIYQGICKIRGNRR

SEQ ID NO: 11459 - protein, 244 aa, Homo sapiens
MNDPFARMETRGPQGAANPMDSSRSLGDLGPFPREVGRGAPLAPGARNPATAGASRSQGGGHEDRTADRALGPRAGEELDRESWVREKVLFLLHPERWLGTRGDPAREEVAGAEDLPHAGGEDHGEEPNYPSVFQRQKRISGRRVAPPRDAADPPKYVLVRVEDYQVTQEVLQTSWAKGRMTTRTEEHFVTALTFRSSREGQPGERWGPAESRALQARTGASRVHAAGRRVSPSPGTWLEEIKL

SEQ ID NO: 11460 - protein, 205 aa, Homo sapiens
MMPRHLLPHSGITSLRRVPRRRLPSRRREDFRRCLFLSFVSTDKDGDPTGQASPAVPVPHFTTWGSLIPIDSQRNKERTRFTWMDGPPHGGLGTRFSGRGSASLTAPPGRCFTRERHPVPRQRKCRRQHSTGRKPHCGTRSAAPRNPKSIHKRSFSAKSLKNKTRNESPPVSALVSRTKTQPGQLHFCCQPSSSQAPASRRAKGR

SEQ ID NO: 11461 - protein, 184 aa, Homo sapiens
MWVFGYGSLIWKVDFPYQDKLVGYITNYSRRFWQGSTDHRGVPGKPGRVVTLVEDPAGCVWGVAYRLPVGKEEEVKAYLDFREKGGYRTTTVIFYPKDPTTKPFSVLLYIGTCDNPDYLGPAPLEDIAEQIFNAAGPSGRNTEYLFELANSIRNLVPEEADEHLFALEKLVKERLEGKQNLNCI

SEQ ID NO: 11462 - protein, 384 aa, Homo sapiens
MDLSRPRWSLWRRVFLMASLLACGICQASGQIFITQTLGIKGYRTVVALDKVPEDVQEYSWYWGANDSAGNMIISHKPPSAQQPGPMYTGRERVNREGSLLIRPTALNDTGNYTVRVVAGNETQRATGWLEVLELGSNLGISVNASSLVENMDSVAADCLTNVTNITWYVNDVPTSSSDRMTISPDGKTLVILRVSRYDRTIQCMIESFPEIFQRSERISLTVAYGPDYVLLRSNPDDFNGIVTAEIGSQVEMECICYSFLDLKYHWIHNGSLLNFSDAKMNLSSLAWEQMGRYRCTVENPVTQLIMYMDVRIQAPHEDLTCCPQRFLHLRIHGDVPHHADSAGWRLHLWSPDPCSDQPLLNQDKSGSMSVHPRPEDKTRRASR

SEQ ID NO: 11463 - protein, 459 aa, Homo sapiens
MALTLFDTDEYRPPVWKSYLYQLQQEAPHPRRITCTCEVENRPKYYGREFHGMISREAADQLLIVAEGSYLIRESQRQPGTYTLALRFGSQTRNFRLYYDGKHFVGEKRFESIHDLVTDGLITLYIETKAAEYIAKMTINPIYEHVGYTTLNREPAYKKHMPVLKETHDERDSTGQDGVSEKRLTSLVRRATLKENEQIPKYEKIHNFKVHTFRGPHWCEYCANFMWGLIAQGVKCADCGLNVHKQCSKMVPNDCKPDLKHVKKVYSCDLTTLVKAHTTKRPMVVDMCIREIESRGLNSEGLYRVSGFSDLIEDVKMAFDRDGEKADISVNMYEDINIITGALKLYFRDLPIPLITYDAYPKFIESAKIMDPDEQLETLHEALKLLPPAHCETLRYLMAHLKRVTLHEKENLMNAENLGIVFGPTLMRSPELDAMAALNDIRYQRLVVELLIKNEDILF

SEQ ID NO: 11464 - protein, 334 aa, Homo sapiens
MPSKESWSGRKTNRAAVHKSKQEGRQQDLLIAALGMKLGSPKSSVTIWQPLKLFAYSQLTSLVRRATLKENEQIPKYEKIHNFKVHTFRGPHWCEYCANFMWGLIAQGVKCADCGLNVHKQCSKMVPNDCKPDLKHVKKVYSCDLTTLVKAHTTKRPMVVDMCIREIESRGLNSEGLYRVSGFSDLIEDVKMAFDRDGEKADISVNMYEDINIITGALKLYFRDLPIPLITYDAYPKFIESAKIMDPDEQLETLHEALKLLPPAHCETLRYLMAHLKRVTLHEKENLMNAENLGIVFGPTLMRSPELDAMAALNDIRYQRLVVELLIKNEDILF

SEQ ID NO: 11465 - protein, 433 aa, Homo sapiens
MALTLFDTDEYRPPVWKSYLYQLQQEAPHPRRITCTCEVENRPKYYGREFHGMISREAADQLLIVAEGSYLIRESQRQPGTYTLALRFGSQTRNFRLYYDGKHFVGEKRFESIHDLVTDGLITLYIETKAAEYIAKMTINPIYEHVGYTTLNREPAYKKHMPVLKETHDERDSTGQDGVSEKRVHTFRGPHWCEYCANFMWGLIAQGVKCADCGLNVHKQCSKMVPNDCKPDLKHVKKVYSCDLTTLVKAHTTKRPMVVDMCIREIESRGLNSEGLYRVSGFSDLIEDVKMAFDRDGEKADISVNMYEDINIITGALKLYFRDLPIPLITYDAYPKFIESAKIMDPDEQLETLHEALKLLPPAHCETLRYLMAHLKRVTLHEKENLMNAENLGIVFGPTLMRSPELDAMAALNDIRYQRLVVELLIKNEDILF

SEQ ID NO: 11466 - protein, 885 aa, Homo sapiens
MQEAIILLALLGAMSGGEALHLILLPATGNVAENSPPGTSVHKFSVKLSASLSPVIPGFPQIVNSNPLTEAFRVNWLSGTYFEVVTTGMEQLDFETGPNIFDLQIYVKDEVGVTDLQVLTVQVTDVNEPPQFQGNLAEGLHLYIVERANPGFIYQVEAFDPEDTSRNIPLSYFLISPPKSFRMSANGTLFSTTELDFEAGHRSFHLIVEVRDSGGLKASTELQVNIVNLNDEVPRFTSPTRVYTVLEELSPGTIVANITAEDPDDEGFPSHLLYSITTVSKYFMINQLTGTIQVAQRIDRDAGELRQNPTISLEVLVKDRPYGGQENRIQITFIVEDVNDNPATCQKFTFSIMVPERTAKGTLLLDLNKFCFDDDSEAPNNRFNFTMPSGVGSGSRFLQDPAGSGKIVLIGDLDYENPSNLAAGNKYTVIIQVQDVAPPYYKNNVYVYILTSPENEFPLIFDRPSYVFDVSERRPARTRVGQVRATDKDLPQSSLLYSISTGGASLQYPNVFWINPKTGELQLVTKVDCETTPIYILRIQATNNEDTSSVTVTVNILEENDEKPICTPNSYFLALPVDLKVGTNIQNFKLTCTDLDSSPRSFRYSIGPGNVNNHFTFSPNAGSNVTRLLLTSRFDYAGGFDKIWDYKLLVYVTDDNLMSDRKKAEALVETGTVTLSIKVIPHPTTIITTTPRPRVTYQVLRKNVYSPSAWYVPFVITLGSILLLGLLVYLVVLLAKAIHRHCPCKTGKNKEPLTKKGETKTAERDVVVETIQMNTIFDGEAIDPVTGETYEFNSKTGARKWKDPLTQMPKWKESSHQGAAPRRVTAGEGMGSLRSANWEEDELSGKAWAEDAGLGSRNEGGKLGNPKNRNPAFMNRAYPKPHPGK

SEQ ID NO: 11467 - protein, 277 aa, Homo sapiens
MINQLTGTIQVAQRIDRDAGELRQNPTISLEVLVKDRPYGGQENRIQITFIVEDVNDNPATCQKFTFSIMVPERTAKGTLLLDLNKFCFDDDSEAPNNRFNFTMPSGVGSGSRFLQDPAGSGKIVLIGDLDYENPSNLAAGNKYTVIIQVQDVAPPYYKNNVYVYILTSPENEFPLIFDRPSYVFDVSERRPAQGHLSGPEEKRLLSICMVRAVCHHFGLHIASGSPRVPGRPIGQSRPQTLPLQDWEEQGTSDKERRNEDCRERRRGGNYPDEHYL

SEQ ID NO: 11468 - protein, 329 aa, Homo sapiens
MIRNSDYKNFVCCAVCNKIIPPAPFGKTFKRIHEYKPLKTRFYTHKDILDIGANILKKEEQFQEDILREHIAKAEAEVWAQANERQKQAVEKALEEANDRHKIEIQILKEEHQKDLQEVTAKTKTEMYQNMDDEMKREHLAAEQRMVHRIQRIMMECHREKVEAVEKARAEERHIAQEAIQAQKSKAVEEIVNTGVTVIKDEKTSVARLMREKEHEMSILYGIAQRQRQEEVQEVLQEAEKTHQATLGNMMDKLANTQGELLSIAKQLGIMTNWKDFLEEELQETRMAFQKYINYTFPKLSPGHADFILPERKKTPSNLVIKENKTTLD

SEQ ID NO: 11469 - protein, 207 aa, Homo sapiens
MAEDLDELLDEVESKFCTPDLLRRGMVEQPKGCGGGTHSSDRNQAKAKETLRSTETFKKEDDLDSLINEILEEPNLDKKPSKLKSKSSGNTSVRASIEGLGKSCSPVYLGGSSIPCGIGTNISWRACDHLRCIACDFLVVSYDDYMWDKSCDYLFFRNNMPEFHKLKAKLIKKKGTRAYACQCSWRTIEEVTDLQTDHQLRWVCGKH

SEQ ID NO: 11470 - protein, 271 aa, Homo sapiens
MLNSPGTRRPVKEAQKYGEDSQKSHSPGTPGPRSSVTTLSASALSDSSSPDTPPRRGPGRPSTPARAPATSAPMMYSRRGVRRTARPAGADTRSSANQLPQPSGACANADSAPPADVSACLRRRSHGDRCVPRSRRRPRPRPRASTAFFQEEGPCGACPGALRPQAGASFRELRGLPPPRPREREQSPPLGAAPSSALSHQGWKNTRCATRGLVNTLVNTGHFLYLQPPAPLIMPYLDDAEVPGNRRSHPSLSFSWLSKALYHVTFLLRIL

SEQ ID NO: 11471 - protein, 361 aa, Homo sapiens
MGNILTCCVCPRASPGLHQHQGLVCHCESEIYEAAAGDLIAGVPVAAAVEPGEVTFVAGEGLHMHHICEREMPEDIPLEPNPSDHPKASTIFLRKSQTDVQEKKKKQLCKVSTEHFTQQYSSCSTIFLDDSIASQPHLTMTLKSCDLGTILSYQAKRDAHRSLGIFDEQLHPLTVRKEVLEEYFKYDPEHKLIFRFVRTLFKAMRLTAEFAIVSLIYIERLVSYADIDICPTNWKRIVLGAILLASKVWSDMAVWNEDYCKLFKNITVEEMNELERQFLKLINYNNSITNSVYSRFYFDLRTLAHNNGLYSPVYLLDRERAWKLEAFSRMEQDKVFYSAAKNGSLSADDLIHLQRAKAILF

SEQ ID NO: 11472 - protein, 265 aa, Homo sapiens
MGSPSACPYRVCIPWQGLLLTASLLTFWNLPNSAQTNIDVVPFNVAEGKEVLLVVHNESQNLYGYNWYKGERVHANYRIIGYVKNISQENAPGPAHNGRETIYPNGTLLIQNVTHNDAGFYTLHVIKENLVNEEVTRQFYVFSEPPKPSITSNNFNPVENKDIVVLTCQPETQNTTYLWWVNNQSLLVSPRLLLSTDNRTLVLLSATKNDIGPYECEIQNPVGASRSDPVTLNVRYESVQASSPDLSAGTAVSIMIGVLAGMALI

SEQ ID NO: 11473 - protein, 172 aa, Homo sapiens [sequence omitted]

SEQ ID NO: 11474 - protein, 140 aa, Homo sapiens
MLSNLHELLPNHLMETLYSRKSEEDKKKCENPELSGLERILARHQLPKEINLTPKPNRMPPWKRKIINNVTDGWKKCHLLKRNTKEPPMSTIVVRKLIQKNVPRRHSLRNTSRKLRNLPTTAKGTQTGKSQCLLGISEPT

SEQ ID NO: 11475 - protein, 131 aa, Homo sapiens
MASGPLGPGARPTRLHPPFPPPAHIKPGAPPGENPELSGLERILARHQLPKEINLTPKPNRMPPWKRKIINNVTDGWKKCHLLKRNTKEPPMSTIVVRKLIQKNVPRRHSLRNTSRKLRNLPTTAKGTQTE

SEQ ID NO: 11476 - protein, 514 aa, Homo sapiens
MYSQRFGTVQREVKGPTPKVVIVRSKPPKGQGAEHHLERIRRSHQKHNAILASIKSSERDRLKAEWDQHNDCKILDSLVRARIKDAVQGFIINIEERRNKLRELLALEENEYFTEMQLKKETIEEKKDRMREKTKLLKEKNEKERQDFVAEKLDQQFRERCEELRVELLSIHQKKVCEERKAQIAFNEELSRQKLVEEQMFSKLWEEDRLAKEKREAQEARRQKELMENTRLGLNAQITSIKAQRQATQLLKEEEARLVESNNAQIKHENEQDMLKKQKAKQETRTILQKALQERIEHIQQEYRDEQDLNMKLVQRALQDLQEEADKKKQKREDMIREQKIYHKYLAQRREEEKAQEKEFDRILEEDKAKKLAEKDKELRLEKEARRQLVDEVMCTRKLQVQEKLQREAKEQEERAMEQKHINESLKELNCEEKENFARRQRLAQEYRKQLQMQIAYQQQSQEAEKEEKRREFEAGVAANKMCLDKVQEVLSTHQVLPQNIHPMRKACPSKLPP

SEQ ID NO: 11477 - protein, 222 aa, Homo sapiens
MSGLGRLFGKGKKEKGPTPEEAIQKLKETEKILIKKQEFLEQKIQQELQTAKKYGTKNKRAALQALRRKKRFEQQLAQTDGTLSTLEFQREAIENATTNAEVLRTMELAAQSMKKAYQDMDIDKVDELMTDITEQQEVAQQISDAISRPMGFGDDVDEDELLEELEELEQEELAQELLNVGDKEEEPSVKLPSVPSTHLPAGPAPKVDEDEEALKQLAEWVS

SEQ ID NO: 11478 - protein, 265 aa, Homo sapiens
MSRRRPEDGLGKAGPCVMRHHPPRSKAEVWRTLRGGGGRGELAMSGLGRLFGKGKKEKGPTPEEAIQKLKETEKILIKKQEFLEQKIQQELQTAKKYGTKNKRAALQALRRKKRFEQQLAQTDGTLSTLEFQREAIENATTNAEVLRTMELAAQSMKKAYQDMDIDKVDELMTDITEQQEVAQQISDAISRPMGFGDDVDEDELLEELEELEQEELAQELLNVGDKEEEPSVKLPSVPSTHLPAGPAPKVDEDEEALKQLAEWVS

SEQ ID NO: 11479 - protein, 299 aa, Homo sapiens
MEEFDSEDFSTSEEDEDYVPSGGEYSEDDVNELVKEDEVDGEEQTQKTQGKKRKAQSIPARKRRQGGLSLEEEEEEDANSESEGSSSEEEDDAAEQEKGIGSEDARKKKEDELWASFLNDVGPKSKVPPSTQVKKGEETEETSSSKLLVKAEELEKPKETEKVKITKVFDFAGEEVRVTKEVDATSKEAKSFFKQNEKEKPQANVPSALPSLPAGSGLKRSSGMSSLLGKIGAKKQKMSTLEKSKLDWESFKEEEGIGEELAIHNRGKEGYIERKAFLDRVDHRQFEIERDLRLSKMKP

SEQ ID NO: 11480 - protein, 217 aa, Homo sapiens
MEEFDSEDFSTSEEDEDYVPSGGEYSEDDVNELVKEDEVDGEEQTQKTQGKKRKAQSIPARKRRQGGLSLEEEEEEDANSESEGSSSEEEDDAAEQEKGIGSEDARKKKEDELWASFLNDVGPKSKVPPSTQVKKGEETEETSSSKLLVKAEELEKPKETEKVKITKVFDFAGEEVRVTKEVDATSKEAKSFFKQNEKEKPQANVPSALPSLPAGSG

SEQ ID NO: 11481 - protein, 1584 aa, Homo sapiens
MEDDGSLLPEDELLADALLLEDERDELEDPEFDIKCLLQEAEDDVDPGHSSSVKELDTDADKLKKKTAEDRTQAFHLRQNLSALDKMHEEQELFTEKMRGELRACRQRRDLIDKQQEAVAAEIATEEEAGNMAAVGRLQAVSRRLFAELENERDLQSRTEAVLKESENTMWHIEIQEGRLEAFRTADREEVEATGRRLQVRAAEQLCREQEALGKVERNRLLRIRKSLNTQKELGLRHQKLLEDARKNHKVAVRFLKASLGRIREQEKKEEMECHEYMRRRMDAVVALKGSISANRDTLRKFQAWDRAKAELAEQRVQAEKKAILAQGRDAFRHLVHQRRRQELEAQKRAFEEEQKLRKQEIISRILKEEAEEEKRKKQHPPTSARHRLTLRDKTWNYISDFCKKTTVPTNTYTLDYEAAAGPGPSRLLEVVSSELIQGDPGASSEEETLAEPEISGLWNEDYKPYQVPKEDVDRKPVGGTKMDKDILERTVERLRSRVVHKQVVWGREFQGRPFNSKPELLHFQDFDIGKVYKKKITLVNTTYTINYCKLVGVEEHLRDFIHVDFDPPGPLSAGMSCEVLVTFKPMINKDLEGNISFLAQTGEFSVPLKCSTKKCSLSLDKELIDFGSYVVGETTSRTITLTNVGGLGTTFKFLPASEPCEMDDSQSALKLSSLLTYEDKSLYDKAATSFSEQQLEGTESSQADMQSRKELEKLDKEQEEEQPAEPERLTTVIPPSEEQTEITLGEVTEGEIGPFSSIKVPIVFTPVVPGDVQARFKVTFKNPQCPTLHFRVVGVAIDVPVWVPKPSVDLKICMYDRLYQDSVLVHTRSKAALRLKFEVCKELRAHLELLPKTGYIQAQSSYSVQLKFLPRHSLPEDAGRYFDKETRVLEAPMTIWVADQNKPVGFTVHAIVTTSDLELSPSEVDFGYCTIYEAIRTEISLHNHSLLPQEFGFVRLPKFVDVQPNDGFGTILPLETLQFCVIFQPTKAEEHRFQLTCKSEINRCFKLSCRAVGVHPPLELSHYQIKFAATALYDTSVATVYVINSHLSMSSPTHSKPRIGSEDASPMGPTSFEFLLPPDSPITISPSVGTVWPGKRCLVQVAFRPVLPEKLIRQEALPLLNKEMETKSFRKNMAPQRKDLHGLSFSVLRAQNRDKLFKVSVPHVLEMRKRELRPSSDEYQAARATLLRAFQAKFDTFVVPCVVASGDIKDRKGSEPLSFSPHNTLYLELWCPTVAPSVVVTSHKGKTIFNFGDVAVGHRSIKKISIQNVSPEDLALDFSLLNPNGPFVLLNHSSLLRAGGTQVLVLSFSPHESILAQETLDIITKRGTLTLTLMGTGVASMITCSIEGSVLNMGYVIAGESVSSGFKLQNNSLLPIKFSMHLDSLSSTRGRGQQQLPQFLSSPSQRTEVVGTQNLNGQSVFSVAPVKGVMDPGKTQDFTVTFSPDHESLYFSDKLQVVLFEKKISHQILLKGAACQHMMFVEGGDPLDVPVESLTAIPVFDPRHREEAEELRPILVTLDYIQFDTDTPAPPATRELQVGCIRTTQPSPKKPDHPLMVSALLQLRGDVKETYKVIFVAQVLTGP

SEQ ID NO: 11482 - protein, 851 aa, Homo sapiens
MEDDGSLLPEDELLADALLLEDERDELEDPEFDIKCLLQEAEDDVDPGHSSSVKELDTDADKLKKKTAEDRTQAFHLRQNLSALDKMHEEQELFTEKMRGELRACRQRRDLIDKQQEAVAAEIATEEEAGNMAAVGRLQAVSRRLFAELENERDLQSRTEAVLKESENTMWHIEIQEGRLEAFRTADREEVEATGRRLQVRAAEQLCREQEALGKVERNRLLRIRKSLNTQKELGLRHQKLLEDARKNHKVAVRFLKASLGRIREQEKKEEMECHEYMRRRMDAVVALKGSISANRDTLRKFQAWDRAKAELAEQRVQAEKKAILAQGRDAFRHLVHQRRRQELEAQKRAFEEEQKLRKQEIISRILKEEAEEEKRKKQHPPTSARHRLTLRDKTWNYISDFCKKTTVPTNTYTLDYEAAAGPGPSRLLEVVSSELIQGDPGASSEEETLAEPEISGLWNEDYKPYQVPKEDVDRKPVGGTKMDKDILERTVERLRSRVVHKQVVWGREFQGRPFNSKPELLHFQDFDIGKVYKKKITLVNTTYTINYCKLVGVEEHLRDFIHVDFDPPGPLSAGMSCEVLVTFKPMINKDLEGNISFLAQTGEFSVPLKCSTKKCSLSLDKELIDFGSYVVGETTSRTITLTNVGGLGTTFKFLPASEPCEMDDSQSALKLSSLLTYEDKSLYDKAATSFSEQQLEGTESSQADMQSRKELEKLDKEQEEEQPAVLFLEWTKMYIHVDANRRLEGTSSIGPAGPARAEPHRAGKRLCGAPWRGRAAGGFCLALQLWLLLDAHQRGEVPRNGRALPSPCLLPCSPPPSGIACVSSLLLLIVFPHTHRDPETSVLLLSVFAW

SEQ ID NO: 11483 - protein, 167 aa, Homo sapiens
MEDDGSLLPEDELLADALLLEDERDELEDPEFDIKCLLQEAEDDVDPGHSSSVKELDTDADKLKKKTAEDRTQAFHLRQNLSALDKMHEEQELFTEKMRGELRACRQRRDLIDKQQEAVAAEIATEEEAGNMAAVGRLQAVSRRLFAELENERDLQSRTEAVLKESE

SEQ ID NO: 11484 - protein, 2997 aa, Homo sapiens
MADPGMMSLFGEDGNIFSEGLEGLGECGYPENPVNPMGQQMPIDQGFASLQPSLHHPSTNQNQTKLTHFDHYNQYEQQKMHLMDQPNRMMSNTPGNGLASPHSQYHTPPVPQVPHGGSGGGQMGVYPGMQNERHGQSFVDSSSMWGPRAVQVPDQIRAPYQQQQPQPQPPQPAPSGPPAQGHPQHMQQMGSYMARGDFSMQQHGQPQQRMSQFSQGQEGLNQGNPFIATSGPGHLSHVPQQSPSMAPSLRHSVQQFHHHPSTALHGESVAHSPRFSPNPPQQGAVRPQTLNFSSRSQTVPSPTINNSGQYSRYPYSNLNQGLVNNTGMNQNLGLTNNTPMNQSVPRYPNAVGFPSNSGQGLMHQQPIHPSGSLNQMNTQTMHPSQPQGTYASPPPMSPMKAMSNPAGTPPPQVRPGSAGIPMEVGSYPNMPHPQPSHQPPGAMGIGQRNMGPRNMQQSRPFIGMSSAPRELTGHMRPNGCPGVGLGDPQAIQERLIPGQQHPGQQPSFQQLPTCPPLQPHPGLHHQSSPPHPHHQPWAQLHPSPQNTPQKVPVHQHSPSEPFLEKPVPDMTQVSGPNAQLVKSDDYLPSIEQQPQQKKKKKKNNHIVAEDPSKGFGKDDFPGGVDNQELNRNSLDGSQEEKKKKKRSKAKKDPKEPKEPKEKKEPKEPKTPKAPKIPKEPKEKKAKTATPKPKSSKKSSNKKPDSEASALKKKVNKGKTEGSENSDLDKTPPPSPPPEEDEDPGVQKRRSSRQVKRKRYTEDLEFKISDEEADDADAAGRDSPSNTSQSEQQESVDAEGPVVEKIMSSRSVKKQKESGEEVEIEEFYVKYKNFSYLHCQWASIEDLEKDKRIQQKIKRFKAKQGQNKFLSEIEDELFNPDYVEVDRIMDFARSTDDRGEPVTHYLVKWCSLPYEDSTWERRQDIDQAKIEEFEKLMSREPETERVERPPADDWKKSESSREYKNNNKLREYQLEGVNWLLFNWYNMRNCILADEMGLGKTIQSITFLYEIYLKGIHGPFLVIAPLSTIPNWEREFRTWTELNVVVYHGSQASRRTIQLYEMYFKDPQGRVIKGSYKFHAIITTFEMILTDCPELRNIPWRCVVIDEAHRLKNRNCKLLEGLKMMDLEHKVLLTGTPLQNTVEELFSLLHFLEPSRFPSETTFMQEFGDLKTEEQVQKLQAILKPMMLRRLKEDVEKNLAPKEETIIEVELTNIQKKYYRAILEKNFTFLSKGGGQANVPNLLNTMMELRKCCNHPYLINGAEEKILEEFKETHNAESPDFQLQAMIQAAGKLVLIDKLLPKLKAGGHRVLIFSQMVRCLDILEDYLIQRRYPYERIDGRVRGNLRQAAIDRFSKPDSDRFVFLLCTRAGGLGINLTAADTCIIFDSDWNPQNDLQAQARCHRIGQSKSVKIYRLITRNSYEREMFDKASLKLGLDKAVLQSMSGRENATNGVQQLSKKEIEDLLRKGAYGALMDEEDEGSKFCEEDIDQILLRRTHTITIESEGKGSTFAKASFVASGNRTDISLDDPNFWQKWAKKAELDIDALNGRNNLVIDTPRVRKQTRLYSAVKEDELMEFSDLESDSEEKPCAKPRRPQDKSQGYARSECFRVEKNLLVYGWGRWTDILSHGRYKRQLTEQDVETICRTILVYCLNHYKGDENIKSFIWDLITPTADGQTRALVNHSGLSAPVPRGRKGKKVKAQSTQPVVQDADWLASCNPDALFQEDSYKKHLKHHCNKVLLRVRMLYYLRQEVIGDQADKILEGADSSEADVWIPEPFHAEVPADWWDKEADKSLLIGVFKHGYEKYNSMRADPALCFLERVGMPDAKAIAAEQRGTDMLADGGDGGEFDREDEDPEYKPTRTPFKDEIDEFANSPSEDKEESMEIHATGKHSESNAELGQLYWPNTSTLTTRLRRLITAYQRSYKRQQMRQEALMKTDRRRRRPREEVRALEAEREAIISEKRQKWTRREEADFYRVVSTFGVIFDPVKQQFDWNQFRAFARLDKKSDESLEKYFSCFVAMCRRVCRMPVKPDDEPPDLSSIIEPITEERASRTLYRIELLRKIREQVLHHPQLGERLKLCQPSLDLPEWWECGRHDRDLLVGAAKHGVSRTDYHILNDPELSFLDAHKNFAQNRGAGNTSSLNPLAVGFVQTPPVISSAHIQDERVLEQAEGKVEEPENPAAKEKCEGKEEEEETDGSGKESKQECEAEASSVKNELKGVEVGADTGSKSISEKGSEEDEEEKLEDDDKSEESSQPEAGAVSRGKNFDEESNASMSTARDETRDGFYMEDGDPSVAQLLHERTFAFSFWPKDRVMINRLDNICEAVLKGKWPVNRRQMFDFQGLIPGYTPTTVDSPLQKRSFAELSMVGQASISGSEDITTSPQLSKEDALNLSVPRQRRRRRRKIEIEAERAAKRRNLMEMVAQLRESQVVSENGQEKVVDLSKASREATSSTSNFSSLSSKFILPNVSTPVSDAFKTQMELLQAGLSRTPTRHLLNGSLVDGEPPMKRRRGRRKNVEGLDLLFMSHKRTSLSAEDAEVTKAFEEDIETPPTRNIPSPGQLDPDTRIPVINLEDGTRLVGEDAPKNKDLVEWLKLHPTYTVDMPSYVPKNADVLFSSFQKPKQKRHRCRNPNKLDINTLTGEERVPVVNKRNGKKMGGAMAPPMKDLPRWLEENPEFAVAPDWTDIVKQSGFVPESMFDRLLTGPVVRGEGASRRGRRPKSEIARAAAAAAAVASTSGINPLLVNSLFAGMDLTSLQNLQNLQSLQLAGLMGFPPGLATAATAGGDAKNPAAVLPLMLPGMAGLPNVFGLGGLLNNPLSAATGNTTTASSQGEPEDSTSKGEEKGNENEDENKDSEKSTDAVSAADSANGSVGAATAPAGLPSNPLAFNPFLLSTMAPGLFYPSMFLPPGLGGLTLPGFPALAGLQNAVGSSEEKAADKAEGGPFKDGETLEGSDAEESLDKTAESSLLEDEIAQGEELDSLDGGDEIENNENDE

SEQ ID NO: 11485 - protein, 1138 aa, Homo sapiens
MADPGMMSLFGEDGNIFSEGLEGLGECGYPENPVNPMGQQMPIDQGFASLQPSLHHPSTNQNQTKLTHFDHYNQYEQQKMHLMDQPNRMMSNTPGNGLASPHSQYHTPPVPQVPHGGSGGGQMGVYPGMQNERHGQSFVDSSSMWGPRAVQVPDQIRAPYQQQQPQPQPPQPAPSGPPAQGHPQHMQQMGSYMARGDFSMQQHGQPQQRMSQFSQGQEGLNQGNPFIATSGPGHLSHVPQQSPSMAPSLRHSVQQFHHHPSTALHGESVAHSPRFSPNPPQQGAVRPQTLNFSSRSQTVPSPTINNSGQYSRYPYSNLNQGLVNNTGMNQNLGLTNNTPMNQSVPRYPNAVGFPSNSGQGLMHQQPIHPSGSLNQMNTQTMHPSQPQGTYASPPPMSPMKAMSNPAGTPPPQVRPGSAGIPMEVGSYPNMPHPQPSHQPPGAMGIGQRNMGPRNMQQSRPFIGMSSAPRELTGHMRPNGCPGVGLGDPQAIQERLIPGQQHPGQQPSFQQLPTCPPLQPHPGLHHQSSPPHPHHQPWAQLHPSPQNTPQKVPVHQHSPSEPFLEKPVPDMTQVSGPNAQLVKSDDYLPSIEQQPQQKKKKKKNNHIVAEDPSKGFGKDDFPGGVDNQELNRNSLDGSQEEKKKKKRSKAKKDPKEPKEPKEKKEPKEPKTPKAPKIPKEPKEKKAKTATPKPKSSKKSSNKKPDSEASALKKKVNKGKTEGSENSDLDKTPPPSPPPEEDEDPGVQKRRSSRQVKRKRYTEDLEFKISDEEADDADAAGRDSPSNTSQSEQQESVDAEGPVVEKIMSSRSVKKQKESGEEVEIEEFYVKYKNFSYLHCQWASIEDLEKDKRIQQKIKRFKAKQGQNKFLSEIEDELFNPDYVEVDRIMDFARSTDDRGEPVTHYLVKWCSLPYEDSTWERRQDIDQAKIEEFEKLMSREPETERVERPPADDWKKSESSREYKNNNKLREYQLEGVNWLLFNWYNMRNCILADEMGLGKTIQSITFLYEIYLKGIHGPFLVIAPLSTIPNWEREFRTWTELNVVVYHGSQASRRTIQLYEMYFKDPQGRVIKGSYKFHAIITTFEMILTDCPELRNIPWRCVVIDEAHRLKNRNCKLLEGLKMMDLVSDHIGDCTEPE

SEQ ID NO: 11486 - protein, 1210 aa, Homo sapiens
MADPGMMSLFGEDGNIFSEGLEGLGECGYPENPVNPMGQQMPIDQGFASLQPSLHHPSTNQNQTKLTHFDHYNQYEQQKMHLMDQPNRMMSNTPGNGLASPHSQYHTPPVPQVPHGGSGGGQMGVYPGMQNERHGQSFVDSSSMWGPRAVQVPDQIRAPYQQQQPQPQPPQPAPSGPPAQGHPQHMQQMGSYMARGDFSMQQHGQPQQRMSQFSQGQEGLNQGNPFIATSGPGHLSHVPQQSPSMAPSLRHSVQQFHHHPSTALHGESVAHSPRFSPNPPQQGAVRPQTLNFSSRSQTVPSPTINNSGQYSRYPYSNLNQGLVNNTGMNQNLGLTNNTPMNQSVPRYPNAVGFPSNSGQGLMHQQPIHPSGSLNQMNTQTMHPSQPQGTYASPPPMSPMKAMSNPAGTPPPQVRPGSAGIPMEVGSYPNMPHPQPSHQPPGAMGIGQRNMGPRNMQQSRPFIGMSSAPRELTGHMRPNGCPGVGLGDPQAIQERLIPGQQHPGQQPSFQQLPTCPPLQPHPGLHHQSSPPHPHHQPWAQLHPSPQNTPQKVPVHQHSPSEPFLEKPVPDMTQVSGPNAQLVKSDDYLPSIEQQPQQKKKKKKNNHIVAEDPSKGFGKDDFPGGVDNQELNRNSLDGSQEEKKKKKRSKAKKDPKEPKEPKEKKEPKEPKTPKAPKIPKEPKEKKAKTATPKPKSSKKSSNKKPDSEASALKKKVNKGKTEGSENSDLDKTPPPSPPPEEDEDPGVQKRRSSRQVKRKRYTEDLEFKISDEEADDADAAGRDSPSNTSQSEQQESVDAEGPVVEKIMSSRSVKKQKESGEEVEIEEFYVKYKNLQKPKQKRHRCRNPNKLDINTLTGEERVPVVNKRNGKKMGGAMAPPMKDLPRWLEENPEFAVAPDWTDIVKQSGFVPESMFDRLLTGPVVRGEGASRRGRRPKSEIARAAAAAAAVASTSGINPLLVNSLFAGMDLTSLQNLQNLQSLQLAGLMGFPPGLATAATAGGDAKNPAAVLPLMLPGMAGLPNVFGLGGLLNNPLSAATGNTTTASSQGEPEDSTSKGEEKGNENEDENKDSEKSTDAVSAADSANGSVGAATAPAGLPSNPLAFNPFLLSTMAPGLFYPSMFLPPGLGGLTLPGFPALAGLQNAVGSSEEKAADKAEGGPFKDGETLEGSDAEESLDKTAESSLLEDEIAQGEELDSLDGGDEIENNENDE

SEQ ID NO: 11487 - protein, 948 aa, Homo sapiens
MADPGMMSLFGEDGNIFSEGLEGLGECGYPENPVNPMGQQMPIDQGFASLQPSLHHPSTNQNQTKLTHFDHYNQYEQQKMHLMDQPNRMMSNTPGNGLASPHSQYHTPPVPQVPHGGSGGGQMGVYPGMQNERHGQSFVDSSSMWGPRAVQVPDQIRAPYQQQQPQPQPPQPAPSGPPAQGHPQHMQQMGSYMARGDFSMQQHGQPQQRMSQFSQGQEGLNQGNPFIATSGPGHLSHVPQQSPSMAPSLRHSVQQFHHHPSTALHGESVAHSPRFSPNPPQQGAVRPQTLNFSSRSQTVPSPTINNSGQYSRYPYSNLNQGLVNNTGMNQNLGLTNNTPMNQSVPRYPNAVGFPSNSGQGLMHQQPIHPSGSLNQMNTQTMHPSQPQGTYASPPPMSPMKAMSNPAGTPPPQVRPGSAGIPMEVGSYPNMPHPQPSHQPPGAMGIGQRNMGPRNMQQSRPFIGMSSAPRELTGHMRPNGCPGVGLGDPQAIQERLIPGQQHPGQQPSFQQLPTCPPLQPHPGLHHQSSPPHPHHQPWAQLHPSPQNTPQKVPVHQHSPSEPFLEKPVPDMTQKPKQKRHRCRNPNKLDINTLTGEERVPVVNKRNGKKMGGAMAPPMKDLPRWLEENPEFAVAPDWTDIVKQSGFVPESMFDRLLTGPVVRGEGASRRGRRPKSEIARAAAAAAAVASTSGINPLLVNSLFAGMDLTSLQNLQNLQSLQLAGLMGFPPGLATAATAGGDAKNPAAVLPLMLPGMAGLPNVFGLGGLLNNPLSAATGNTTTASSQGEPEDSTSKGEEKGNENEDENKDSEKSTDAVSAADSANGSVGAATAPAGLPSNPLAFNPFLLSTMAPGLFYPSMFLPPGLGGLTLPGFPALAGLQNAVGSSEEKAADKAEGGPFKDGETLEGSDAEESLDKTAESSLLEDEIAQGEELDSLDGGDEIENNENDE

SEQ ID NO: 11488 - protein, 1231 aa, Homo sapiens
MRLLAKIICLMLWAICVAEDCNELPPRRNTEILTGSWSDQTYPEGTQAIYKCRPGYRSLGNVIMVCRKGEWVALNPLRKCQKRPCGHPGDTPFGTFTLTGGNVFEYGVKAVYTCNEGYQLLGEINYRECDTDGWTNDIPICEVVKCLPVTAPENGKIVSSAMEPDREYHFGQAVRFVCNSGYKIEGDEEMHCSDDGFWSKEKPKCVEISCKSPDVINGSPISQKIIYKENERFQYKCNMGYEYSERGDAVCTESGWRPLPSCEEKSCDNPYIPNGDYSPLRIKHRTGDEITYQCRNGFYPATRGNTAKCTSTGWIPAPRCTLKPCDYPDIKHGGLYHENMRRPYFPVAVGKYYSYYCDEHFETPSGSYWDHIHCTQDGWSPAVPCLRKCYFPYLENGYNQNYGRKFVQGKSIDVACHPGYALPKAQTTVTCMENGWSPTPRCIRVKTCSKSSIDIENGFISESQYTYALKEKAKYQCKLGYVTADGETSGSITCGKDGWSAQPTCIKSCDIPVFMNARTKNDFTWFKLNDTLDYECHDGYESNTGSTTGSIVCGYNGWSDLPICYERECELPKIDVHLVPDRKKDQYKVGEVLKFSCKPGFTIVGPNSVQCYHFGLSPDLPICKEQVQSCGPPPELLNGNVKEKTKEEYGHSEVVEYYCNPRFLMKGPNKIQCVDGEWTTLPVCIVEESTCGDIPELEHGWAQLSSPPYYYGDSVEFNCSESFTMIGHRSITCIHGVWTQLPQCVAIDKLKKCKSSNLIILEEHLKNKKEFDHNSNIRYRCRGKEGWIHTVCINGRWDPEVNCSMAQIQLCPPPPQIPNSHNMTTTLNYRDGEKVSVLCQENYLIQEGEEITCKDGRWQSIPLCVEKIPCSQPPQIEHGTINSSRSSQESYAHGTKLSYTCEGGFRISEENETTCYMGKWSSPPQCEGLPCKSPPEISHGVVAHMSDSYQYGEEVTYKCFEGFGIDGPAIAKCLGEKWSHPPSCIKTDCLSLPSFENAIPMGEKKDVYKAGEQVTYTCATYYKMDGASNVTCINSRWTGRPTCRDTSCVNPPTVQNAYIVSRQMSKYPSGERVRYQCRSPYEMFGDEEVMCLNGNWTEPPQCKDSTGKCGPPPPIDNGDITSFPLSVYAPASSVEYQCQNLYQLEGNKRITCRNGQWSEPPKCLHPCVISREIMENYNIALRWTAKQKLYSRTGESVEFVCKRGYRLSSRSHTLRTTCWDGKLEYPTCAKR

SEQ ID NO: 11489 - protein, 449 aa, Homo sapiens
MRLLAKIICLMLWAICVAEDCNELPPRRNTEILTGSWSDQTYPEGTQAIYKCRPGYRSLGNVIMVCRKGEWVALNPLRKCQKRPCGHPGDTPFGTFTLTGGNVFEYGVKAVYTCNEGYQLLGEINYRECDTDGWTNDIPICEVVKCLPVTAPENGKIVSSAMEPDREYHFGQAVRFVCNSGYKIEGDEEMHCSDDGFWSKEKPKCVEISCKSPDVINGSPISQKIIYKENERFQYKCNMGYEYSERGDAVCTESGWRPLPSCEEKSCDNPYIPNGDYSPLRIKHRTGDEITYQCRNGFYPATRGNTAKCTSTGWIPAPRCTLKPCDYPDIKHGGLYHENMRRPYFPVAVGKYYSYYCDEHFETPSGSYWDHIHCTQDGWSPAVPCLRKCYFPYLENGYNQNYGRKFVQGKSIDVACHPGYALPKAQTTVTCMENGWSPTPRCIRVSFTL

SEQ ID NO: 11490 - protein, 187 aa, Homo sapiens
MPGERPTDATVIPSAKRERKAITLDLKLEVLRRFEAGEKLSQIAKALDLAISTVATIRDSKEKIKASSQIATPLRASRLTRHRSAVMESMEQLLSLWLEDQSQPNATLSAAIVQEKAEFDDLQREHGEGSQTERFHASQGWLVRFKECHCLPHFKMNSAAPSNKDMYTEMLKSIIEEGEYTPQVSLT

SEQ ID NO: 11491 - protein, 149 aa, Homo sapiens [sequence omitted]

SEQ ID NO: 11492 - protein, 272 aa, Homo sapiens
MGRVRNRATAQRRRRKRPGDPPAACAAIAVTGASRAQCPRVQVGVGSHAAAKRWLGRWRRKRRWRRVRKAGPRDLLPSAPTPDPPGPAPSPKDLDLGAQRERWETFRKLRGLSCEGAAKVLLDTFEYPGLVHHTGGCHCGAVRFAVWAPADLRVVDCSCRLCRKKQHRHFLVPASRFTLLQGAESIVTYRSNTHPALHSFCSRCGVQSFHAAVSDPRVYGVAPHCLDEGTVRSVVIEEVGGGDPGEEAAEEHKAIHKTSSQSAPACPREQEQ

SEQ ID NO: 11493 - protein, 1121 aa, Homo sapiens
MEQVPSAGRLVQITVTEGYDLKGFKGDTPVTFIRAEFNQVVLGDSAKITVSPEGSAKYNFTSSFEFNPEGGITSDDLAHKPVFLTVTEVLPKEKKQKEEKTLILGQAVVDLLPLLEGQSSFQTTVPLHPVQGSPLETPRSSAKQCSLEVKVLVAEPLLTTAQISGGNLLKVTLEAAYSVPESFIPTGPGQNYMVGLQVPSLGEKDYPILFKNGTLKLGGEREPVPRPKKWPIANILAPGANNIPDAFIVGGPYEEEEGELNHPEDSEFRNQAECIKKRIIWDLESRCYLDPSAVVSFQKRIADCRLWPVEITRVPLVTIPKGKAGKTEKTDEEAQLSFHGVAYVNMVPLLYPGVKRIRGAFHVYPYLDSVVHEKTKCLLSLFRDIGHHLIHNNKIGGINSLLSKQAVSKNLKEDKPVKEKDIDGRPRPGDVQAPSIKSQSSDTPLEGEPPLSHNPEGQQYVEAGTYIVLEIQLDKALVPKRMPEELARRVKEMIPPRPPLTRRTGGAQKAMSDYHIQIKNISRAILDEYYRMFGKQVAKLESDMDSETLEEQKCQLSYELNCSGKYFAFKEQLKHAVVKIVRDKYLKTTSFESQEELQTFISELYVFLVDQMHVALNQTMPDDVQGTVATIYTSSEQLQLFAFEAEVNENFEMAAAYYKERLVREPQNLDHWLDYGAFCLLTEDNIKAQECFQKALSLNQSHIHSLLLCGVLAVLLENYEQAEIFFEDATCLEPTNVVAWTLLGLYYEIQNNDIRMEMAFHEASKQLQARMLQAQVTKQKSTGVEDTEERGKRESSLGPWGITNGSATAIKVEAPAGPGAALSILDKFLEESSKLQSDSQEPILTTQTWDPSISQKPSNTFIKEIPTKKEASKCQDSSALLHPGLHYGVSQTTTIFMETIHFLMKVKAVQYVHRVLAHELLCPQGGPSCEYYLVLAQTHILKKNFAKAEEYLQQAAQMDYLNPNVWGLKGHLYFLSGNHSEAKACYERTISFVVDASEMHFIFLRLGLIYLEEKEYEKAKKTYMQACKRSPSCLTWLGLGIACYRLEELTEAEDALSEANALNNYNAEVWAYLALVCLKVGRQLEAEQAYKYMIKLKLKDEALLAEIHTLQETVGFGNPSF

SEQ ID NO: 11494 - protein, 1091 aa, Homo sapiens
MEQVPSAGRLVQITVTEGYDLKGFKGDTPVTFIRAEFNQVVLGDSAKITVSPEGSAKYNFTSSFEFNPEGGITSDDLAHKPVFLTVTEVLPKEKKQKEEKTLILGQAVVDLLPLLEGQSSFQTTVPLHPVQGSPLETPRSSAKQCSLEVKVLVAEPLLTTAQISGGNLLKVTLEAAYSVPESFIPTGPGQNYMVGLQVPSLGEKDYPILFKNGTLKLGGEREPVPRPKKWPIANILAPGANNIPDAFIVGGPYEEEEGELNHPEDSEFRNQAECIKKRIIWDLESRCYLDPSAVVSFQKRIADCRLWPVEITRVPLVTIPKGKAGKTEKTDEEAQLSFHGVAYVNMVPLLYPGVKRIRGAFHVYPYLDSVVHEKTKCLLSLFRDIGHHLIHNNKIGGINSLLSKQAVSKNLKEDKPVKEKDIDGRPRPGDVQAPSIKSQSSDTPLEGEPPLSHNPEGQQYVEAGTYIVLEIQLDKALVPKRMPEELARRVKEMIPPRPPLTRRTGGAQKAMSDYHIQIKNISRAILDEYYRMFGKQVAKLESDMDSETLEEQKCQLSYELNCSGKYFAFKEQLKHAVVKIVRDKYLKTTSFESQEELQTFISELYVFLVDQMHVALNQTMPDDVQGTVATIYTSSEQLQLFAFEAEVNENFEMAAAYYKERLVREPQNLDHWLDYGAFCLLTEDNIKAQECFQKALSLNQSHIHSLLLCGVLAVLLENYEQAEIFFEDATCLEPTNVVAWTLLGLYYEIQNNDIRMEMAFHEASKQLQARMLQAQVTKQKSTGVEDTEERGKRESSLGPWGITNGSATAIKVEAPAGPGAALSILDKFLEESSKLQSDSQEPILTTQTWDPSISQKPSNTFIKEIPTKKEASKCQDSSALLHPGLHYGVSQTTTIFMETIHFLMKVKAVQYVHRVLAHELLCPQGGPSCEYYLVLAQTHILKKNFAKAEEYLQQAAQMDYLNPNVWGLKGHLYFLSGNHSEAKACYERTISFVVDASEMHFIFLRLGLIYLEEKELEELTEAEDALSEANALNNYNAEVWAYLALVCLKVGRQLEAEQAYKYMIKLKLKDEALLAEIHTLQETVGFGNPSF

SEQ ID NO: 11495 - protein, 119 aa, Homo sapiens
MEQVPSAGRLVQITVTEGYDLKGFKGDTPVTFIRAEFNQVVLGDSAKITVSPEGSAKYNFTSSFEFNPEGGITSDDLAHKPVFLTVTEVLPKEKKQKEEKTLILGQAVVDLLPLLEVQS

SEQ ID NO: 11496 - protein, 195 aa, Homo sapiens
METIHFLMKVKAVQYVHRVLAHELLCPQGGPSCEYYLVLAQTHILKKNFAKAEEYLQQAAQMDYLNPNVWGLKGHLYFLSGNHSEAKACYERTISFVVDASEMHFIFLRLGLIYLEEKELEELTEAEDALSEANALNNYNAEVWAYLALVCLKVGRQLEAEQAYKYMIKLKLKDEALLAEIHTLQETVGFGNPSF

SEQ ID NO: 11497 - protein, 225 aa, Homo sapiens
METIHFLMKVKAVQYVHRVLAHELLCPQGGPSCEYYLVLAQTHILKKNFAKAEEYLQQAAQMDYLNPNVWGLKGHLYFLSGNHSEAKACYERTISFVVDASEMHFIFLRLGLIYLEEKEYEKAKKTYMQACKRSPSCLTWLGLGIACYRLEELTEAEDALSEANALNNYNAEVWAYLALVCLKVGRQLEAEQAYKYMIKLKLKDEALLAEIHTLQETVGFGNPSF

SEQ ID NO: 11498 - protein, 140 aa, Homo sapiens
MGPRRRSRKPEAPRRRSPSPTPTPGPSRRGPSLGASSHQHSRRRQGWLKEIRKLQKSTHLLIRKLPFSRLAREICVKFTRGVDFNWQAQALLALQEAAEAFLVHLFEDAYLLTLHAGRVTLFPKDVQLARRIRGLEEGLG

SEQ ID NO: 11499 - protein, 114 aa, Homo sapiens
MGPRRRSRKPEAPRRRSPSPTPTPGPSRRGPSLGASSHQHSRRRQGWLKEIRKLQKSTHLLIRKLPFSRLAAEAFLVHLFEDAYLLTLHAGRVTLFPKDVQLARRIRGLEEGLG

SEQ ID NO: 11500 - protein, 2701 aa, Homo sapiens
MAEEGAVAVCVRVRPLNSREESLGETAQVYWKTDNNVIYQVDGSKSFNFDRVFHGNETTKNVYEEIAAPIIDSAIQGYNGTIFAYGQTASGKTYTMMGSEDHLGVIPRAIHDIFQKIKKFPDREFLLRVSYMEIYNETITDLLCGTQKMKPLIIREDVNRNVYVADLTEEVVYTSEMALKWITKGEKSRHYGETKMNQRSSRSHTIFRMILESREKGEPSNCEGSVKVSHLNLVDLAGSERAAQTGAAGVRLKEGCNINRSLFILGQVIKKLSDGQVGGFINYRDSKLTRILQNSLGGNAKTRIICTITPVSFDETLTALQFASTAKYMKNTPYVNEVSTDEALLKRYRKEIMDLKKQLEEVSLETRAQAMEKDQLAQLLEEKDLLQKVQNEKIENLTRMLVTSSSLTLQQELKAKRKRRVTWCLGKINKMKNSNYADQFNIPTNITTKTHKLSINLLREIDESVCSESDVFSNTLDTLSEIEWNPATKLLNQENIESELNSLRADYDNLVLDYEQLRTEKEEMELKLKEKNDLDEFEALERKTKKDQEMQLIHEISNLKNLVKHAEVYNQDLENELSSKVELLREKEDQIKKLQEYIDSQKLENIKMDLSYSLESIEDPKQMKQTLFDAETVALDAKRESAFLRSENLELKEKMKELATTYKQMENDIQLYQSQLEAKKKMQVDLEKELQSAFNEITKLTSLIDGKVPKDLLCNLELEGKITDLQKELNKEVEENEALREEVILLSELKSLPSEVERLRKEIQDKSEELHIITSEKDKLFSEVVHKESRVQGLLEEIGKTKDDLATTQSNYKSTDQEFQNFKTLHMDFEQKYKMVLEENERMNQEIVNLSKEAQKFDSSLGALKTELSYKTQELQEKTREVQERLNEMEQLKEQLENRDSTLQTVEREKTLITEKLQQTLEEVKTLTQEKDDLKQLQESLQIERDQLKSDIHDTVNMNIDTQEQLRNALESLKQHQETINTLKSKISEEVSRNLHMEENTGETKDEFQQKMVGIDKKQDLEAKNTQTLTADVKDNEIIEQQRKIFSLIQEKNELQQMLESVIAEKEQLKTDLKENIEMTIENQEELRLLGDELKKQQEIVAQEKNHAIKKEGELSRTCDRLAEVEEKLKEKSQQLQEKQQQLLNVQEEMSEMQKKINEIENLKNELKNKELTLEHMETERLELAQKLNENYEEVKSITKERKVLKELQKSFETERDHLRGYIREIEATGLQTKEELKIAHIHLKEHQETIDELRRSVSEKTAQIINTQDLEKSHTKLQEEIPVLHEEQELLPNVKEVSETQETMNELELLTEQSTTKDSTTLARIEMERLRLNEKFQESQEEIKSLTKERDNLKTIKEALEVKHDQLKEHIRETLAKIQESQSKQEQSLNMKEKDNETTKIVSEMEQFKPKDSALLRIEIEMLGLSKRLQESHDEMKSVAKEKDDLQRLQEVLQSESDQLKENIKEIVAKHLETEEELKVAHCCLKEQEETINELRVNLSEKETEISTIQKQLEAINDKLQNKIQEIYEKEEQFNIKQISEVQEKVNELKQFKEHRKAKDSALQSIESKMLELTNRLQESQEEIQIMIKEKEEMKRVQEALQIERDQLKENTKEIVAKMKESQEKEYQFLKMTAVNETQEKMCEIEHLKEQFETQKLNLENIETENIRLTQILHENLEEMRSVTKERDDLRSVEETLKVERDQLKENLRETITRDLEKQEELKIVHMHLKEHQETIDKLRGIVSEKTNEISNMQKDLEHSNDALKAQDLKIQEELRIAHMHLKEQQETIDKLRGIVSEKTDKLSNMQKDLENSNAKLQEKIQELKANEHQLITLKKDVNETQKKVSEMEQLKKQIKDQSLTLSKLEIENLNLAQKLHENLEEMKSVMKERDNLRRVEETLKLERDQLKESLQETKARDLEIQQELKTARMLSKEHKETVDKLREKISEKTIQISDIQKDLDKSKDELQKKIQELQKKELQLLRVKEDVNMSHKKINEMEQLKKQFEAQNLSMQSVRMDNFQLTKKLHESLEEIRIVAKERDELRRIKESLKMERDQFIATLREMIARDRQNHQVKPEKRLLSDGQQHLTESLREKCSRIKELLKRYSEMDDHYECLNRLSLDLEKEIEFQKELSMRVKANLSLPYLQTKHIEKLFTANQRCSMEFHRIMKKLKYVLSYVTKIKEEQHESINKFEMDFIDEVEKQKELLIKIQHLQQDCDVPSRELRDLKLNQNMDLHIEEILKDFSESEFPSIKTEFQQVLSNRKEMTQFLEEWLNTRFDIEKLKNGIQKENDRICQVNNFFNNRIIAIMNESTEFEERSATISKEWEQDLKSLKEKNEKLFKNYQTLKTSLASGAQVNPTTQDNKNPHVTSRATQLTTEKIRELENSLHEAKESAMHKESKIIKMQKELEVTNDIIAKLQAKVHESNKCLEKTKETIQVLQDKVALGAKPYKEEIEDLKMKLVKIDLEKMKNAKEFEKEISATKATVEYQKEVIRLLRENLRRSQQAQDTSVISEHTDPQPSNKPLTCGGGSGIVQNTKALILKSEHIRLEKEISKLKQQNEQLIKQKNELLSNNQHLSNEVKTWKERTLKREAHKQVTCENSPKSPKVTGTASKKKQITPSQCKERNLQDPVPKESPKSCFFDSRSKSLPSPHPVRYFDNSSLGLCPEVQNAGAESVDSQPGPWHASSGKDVPECKTQ

SEQ ID NO: 11501 - protein, 2580 aa, Homo sapiens
MAEEGAVAVCVRVRPLNSREESLGETAQVYWKTDNNVIYQVDGSKSFNFDRVFHGNETTKNVYEEIAAPIIDSAIQGYNGTIFAYGQTASGKTYTMMGSEDHLGVIPRAIHDIFQKIKKFPDREFLLRVSYMEIYNETITDLLCGTQKMKPLIIREDVNRNVYVADLTEEVVYTSEMALKWITKGEKSRHYGETKMNQRSSRSHTIFRMILESREKGEPSNCEGSVKVSHLNLVDLAGSERAAQTGAAGVRLKEGCNINRSLFILGQVIKKLSDGQVGGFINYRDSKLTRILQNSLGGNAKTRIICTITPVSFDETLTALQFASTAKYMKNTPYVNEVSTDEALLKRYRKEIMDLKKQLEEVSLETRAQAMEKDQLAQLLEEKDLLQKVQNEKIENLTRMLVTSSSLTLQQELKAKRKRRVTWCLGKINKMKNSNYADQFNIPTNITTKTHKLSINLLREIDESVCSESDVFSNTLDTLSEIEWNPATKLLNQENIESELNSLRADYDNLVLDYEQLRTEKEEMELKLKEKNDLDEFEALERKTKKDQENELSSKVELLREKEDQIKKLQEYIDSQKLENIKMDLSYSLESIEDPKQMKQTLFDAETVALDAKRESAFLRSENLELKEKMKELATTYKQMENDIQLYQSQLEAKKKMQVDLEKELQSAFNEITKLTSLIDGKVPKDLLCNLELEGKITDLQKELNKEVEENEALREEVILLSELKSLPSEVERLRKEIQDKSEELHIITSEKDKLFSEVVHKESRVQGLLEEIGKTKDDLATTQSNYKSTDQEFQNFKTLHMDFEQKYKMVLEENERMNQEIVNLSKEAQKFDSSLGALKTELSYKTQELQEKTREVQERLNEMEQLKEQLENRDSTLQTVEREKTLITEKLQQTLEEVKTLTQEKDDLKQLQESLQIERDQLKSDIHDTVNMNIDTQEQLRNALESLKQHQETINTLKSKISEEVSRNLHMEENTGETKDEFQQKMVGIDKKQDLEAKNTQTLTADVKDNEIIEQQRKIFSLIQEKNELQQMLESVIAEKEQLKTDLKENIEMTIENQEELRLLGDELKKQQEIVAQEKNHAIKKEGELSRTCDRLAEVEEKLKEKSQQLQEKQQQLLNVQEEMSEMQKKINEIENLKNELKNKELTLEHMETERLELAQKLNENYEEVKSITKERKVLKELQKSFETERDHLRGYIREIEATGLQTKEELKIAHIHLKEHQETIDELRRSVSEKTAQIINTQDLEKSHTKLQEEIPVLHEEQELLPNVKEVSETQETMNELELLTEQSTTKDSTTLARIEMERLRLNEKFQESQEEIKSLTKERDNLKTIKEALEVKHDQLKEHIRETLAKIQESQSKQEQSLNMKEKDNETTKIVSEMEQFKPKDSALLRIEIEMLGLSKRLQESHDEMKSVAKEKDDLQRLQEVLQSESDQLKENIKEIVAKHLETEEELKVAHCCLKEQEETINELRVNLSEKETEISTIQKQLEAINDKLQNKIQEIYEKEEQFNIKQISEVQEKVNELKQFKEHRKAKDSALQSIESKMLELTNRLQESQEEIQIMIKEKEEMKRVQEALQIERDQLKENTKEIVAKMKESQEKEYQFLKMTAVNETQEKMCEIEHLKEQFETQKLNLENIETENIRLTQILHENLEEMRSVTKERDDLRSVEETLKVERDQLKENLRETITRDLEKQEELKIVHMHLKEHQETIDKLRGIVSEKTNEISNMQKDLEHSNDALKAQDLKIQEELRIAHMHLKEQQETIDKLRGIVSEKTDKLSNMQKDLENSNAKLQEKIQELKANEHQLITLKKDVNETQKKVSEMEQLKKQIKDQSLTLSKLEIENLNLAQKLHENLEEMKSVMKERDNLRRVEETLKLERDQLKESLQETKARDLEIQQELKTARMLSKEHKETVDKLREKISEKTIQISDIQKDLDKSKDELQKKQDRQNHQVKPEKRLLSDGQQHLTESLREKCSRIKELLKRYSEMDDHYECLNRLSLDLEKEIEFQKELSMRVKANLSLPYLQTKHIEKLFTANQRCSMEFHRIMKKLKYVLSYVTKIKEEQHESINKFEMDFIDEVEKQKELLIKIQHLQQDCDVPSRELRDLKLNQNMDLHIEEILKDFSESEFPSIKTEFQQVLSNRKEMTQFLEEWLNTRFDIEKLKNGIQKENDRICQVNNFFNNRIIAIMNESTEFEERSATISKEWEQDLKSLKEKNEKLFKNYQTLKTSLASGAQVNPTTQDNKNPHVTSRATQLTTEKIRELENSLHEAKESAMHKESKIIKMQKELEVTNDIIAKLQAKVHESNKCLEKTKETIQVLQDKVALGAKPYKEEIEDLKMKLVKIDLEKMKNAKEFEKEISATKATVEYQKEVIRLLRENLRRSQQAQDTSVISEHTDPQPSNKPLTCGGGSGIVQNTKALILKSEHIRLEKEISKLKQQNEQLIKQKNELLSNNQHLSNEVKTWKERTLKREAHKQVTCENSPKSPKVTGTASKKKQITPSQCKERNLQDPVPKESPKSCFFDSRSKSLPSPHPVRYFDNSSLGLCPEVQNAGAESVDSQPGPWHASSGKDVPECKTQ

SEQ ID NO: 11502 - protein, 289 aa, Homo sapiens
MELLCHEVDPVRRAVRDRNLLRDDRVLQNLLTIEERYLPQCSYFKCVQKDIQPYMRRMVATWMLEVCEEQKCEEEVFPLAMNYLDRFLAGVPTPKSHLQLLGAVCMFLASKLKETSPLTAEKLCIYTDNSIKPQELLEWELVVLGKLKWNLAAVTPHDFIEHILRKLPQQREKLSLIRKHAQTFIALCATDFKFAMYPPSMIATGSVGAAICGLQQDEEVSSLTCDALTELLAKITNTDVDCLKACQEQIEAVLLNSLQQYRQDQRDGSKSEDELDQASTPTDVRDIDL

SEQ ID NO: 11503 - protein, 209 aa, Homo sapiens
MELLCHEVDPVRRAVRDRNLLRDDRVLQNLLTIEERYLPQCSYFKCVQKDIQPYMRRMVATWMLEVCEEQKCEEEVFPLAMNYLDRFLAGVPTPKSHLQLLGAVCMFLASKLKETSPLTAEKLCIYTDNSIKPQELLVMTGPFLPSFLRFPLSPGQQYAFYHHCQSKFLGSRMTPPIEFTHLWAIAHLIGNHCLFFVCSYYVPRLRAQH

SEQ ID NO: 11504 - protein, 238 aa, Homo sapiens
MAVEGGMKCVKFLLYVLLLAFCACAVGLIAVGVGAQLVLSQTIIQGATPGSLLPVVIIAVGVFLFLVAFVGCCGACKENYCLMITFAIFLSLIMLVEVAAAIAGYVFRDKVMSEFNNNFRQQMENYPKNNHTASILDRMQADFKCCGAANYTDWEKIPSMSKNRVPDSCCINVTVGCGINFNEKAIHKEGCVEKIGGWLRKNVLVVAAAALGIAFVEVLGIVFACCLVKSIRSGYEVM

SEQ ID NO: 11505 - protein, 215 aa, Homo sapiens
MAVEGGMKCVKFLLYVLLLAFCGATPGSLLPVVIIAVGVFLFLVAFVGCCGACKENYCLMITFAIFLSLIMLVEVAAAIAGYVFRDKVMSEFNNNFRQQMENYPKNNHTASILDRMQADFKCCGAANYTDWEKIPSMSKNRVPDSCCINVTVGCGINFNEKAIHKEGCVEKIGGWLRKNVLVVAAAALGIAFVEVLGIVFACCLVKSIRSGYEVM

SEQ ID NO: 11506 - protein, 156 aa, Homo sapiens
MITFAIFLSLIMLVEVAAAIAGYVFRDKVMSEFNNNFRQQMENYPKNNHTASILDRMQADFKCCGAANYTDWEKIPSMSKNRVPDSCCINVTVGCGINFNEKAIHKEGCVEKIGGWLRKNVLVVAAAALGIAFVEVLGIVFACCLVKSIRSGYEVM

SEQ ID NO: 11507 - protein, 597 aa, Homo sapiens
MAASTSMVPVAVTAAVAPVLSINSDFSDLREIKKQLLLIAGLTRERGLLHSSKWSAELAFSLPALPLAELQPPPPITEEDAQDMDAYTLAKAYFDVKEYDRAAHFLHGCNSKKAYFLYMYSRYLSGEKKKDDETVDSLGPLEKGQVKNEALRELRVELSKKHQARELDGFGLYLYGVVLRKLDLVKEAIDVFVEATHVLPLHWGAWLELCNLITDKEMLKFLSLPDTWMKEFFLAHIYTELQLIEEALQKYQNLIDVGFSKSSYIVSQIAVAYHNIRDIDKALSIFNELRKQDPYRIENMDTFSNLLYVRSMKSELSYLAHNLCEIDKYRVETCCVIGNYYSLRSQHEKAALYFQRALKLNPRYLGAWTLMGHEYMEMKNTSAAIQAYRHAIEVNKRDYRAWYGLGQTYEILKMPFYCLYYYRRAHQLRPNDSRMLVALGECYEKLNQLVEAKKCYWRAYAVGDVEKMALVKLAKLHEQLTESEQAAQCYIKYIQDIYSCGEIVEHLEESTAFRYLAQYYFKCKLWDEASTCAQKCCAFNDTREEGKALLRQILQLRNQGETPTTEVPAPFFLPASLSANNTPTRRVSPLNLSSVTP

SEQ ID NO: 11508 - protein, 151 aa, Homo sapiens
MAASTSMVPVAVTAAVAPVLSINSDFSDLREIKKQLLLIAGLTRERGLLHSSKWSAELAFSLPALPLAELQPPPPITEEDAQDMDAYTLAKAYFDVKEYDRAAHFLHGCNSKKAYFLYMYSRYLVRAILKCHSAFSETSIFRTNGKVKSFK

SEQ ID NO: 11509 - protein, 479 aa, Homo sapiens
MYSRYLSGEKKKDDETVDSLGPLEKGQVKNEALRELRVELSKKHQARELDGFGLYLYGVVLRKLDLVKEAIDVFVEATHVLPLHWGAWLELCNLITDKEMLKFLSLPDTWMKEFFLAHIYTELQLIEEALQKYQNLIDVGFSKSSYIVSQIAVAYHNIRDIDKALSIFNELRKQDPYRIENMDTFSNLLYVRSMKSELSYLAHNLCEIDKYRVETCCVIGNYYSLRSQHEKAALYFQRALKLNPRYLGAWTLMGHEYMEMKNTSAAIQAYRHAIEVNKRDYRAWYGLGQTYEILKMPFYCLYYYRRAHQLRPNDSRMLVALGECYEKLNQLVEAKKCYWRAYAVGDVEKMALVKLAKLHEQLTESEQAAQCYIKYIQDIYSCGEIVEHLEESTAFRYLAQYYFKCKLWDEASTCAQKCCAFNDTREEGKALLRQILQLRNQGETPTTEVPAPFFLPASLSANNTPTRRVSPLNLSSVTP

SEQ ID NO: 11510 - protein, 458 aa, Homo sapiens
MNRGVPFRHLLLVLQLALLPAATQGKKVVLGKKGDTVELTCTASQKKSIQFHWKNSNQIKILGNQGSFLTKGPSKLNDRADSRRSLWDQGNFPLIIKNLKIEDSDTYICEVEDQKEEVQLLVFGLTANSDTHLLQGQSLTLTLESPPGSSPSVQCRSPRGKNIQGGKTLSVSQLELQDSGTWTCTVLQNQKKVEFKIDIVVLAFQKASSIVYKKEGEQVEFSFPLAFTVEKLTGSGELWWQAERASSSKSWITFDLKNKEVSVKRVTQDPKLQMGKKLPLHLTLPQALPQYAGSGNLTLALEAKTGKLHQEVNLVVMRATQLQKNLTCEVWGPTSPKLMLSLKLENKEAKVSKREKAVWVLNPEAGMWQCLLSDSGQVLLESNIKVLPTWSTPVQPMALIVLGGVAGLLLFIGLGIFFCVRCRHRRRQAERMSQIKRLLSEKKTCQCPHRFQKTCSPI

SEQ ID NO: 11511 - protein, 520 aa, Homo sapiens
MAAAAAAAGAAGSAAPAAAAGAPGSGGAPSGSQGVLIGDRLYSGVLITLENCLLPDDKLRFTPSMSSGLDTDTETDLRVVGCELIQAAGILLRLPQVAMATGQVLFQRFFYTKSFVKHSMEHVSMACVHLASKIEEAPRRIRDVINVFHRLRQLRDKKKPVPLLLDQDYVNLKNQIIKAERRVLKELGFCVHVKHPHKIIVMYLQVLECERNQHLVQTSWNYMNDSLRTDVFVRFQPESIACACIYLAARTLEIPLPNRPHWFLLFGATEEEIQEICLKILQLYARKKVDLTHLEGEVEKRKHAIEEAKAQARGLLPGGTQVLDGTSGFSPAPKLVESPKEGKGSKPSPLSVKNTKRRLEGAKKAKADSPVNGLPKGRESRSRSRSREQSYSRSPSRSASPKRRKSDSGSTSGGSKSQSRSRSRSDSPPRQAPRSAPYKGSEIRGSRKSKDCKYPQKPHKSRSRSSSRSRSRSRERADNPGKYKKKSHYYRDQRRERSRSYERTGRRYERDHPGHSRHRR

SEQ ID NO: 11512 - protein, 227 aa, Homo sapiens
MAAAAAAAGAAGSAAPAAAAGAPGSGGAPSGSQGVLIGDRLYSGVLITLENCLLPDDKLRFTPSMSSGLDTDTETDLRVVGCELIQAAGILLRLPQVAMATGQVLFQRFFYTKSFVKHSMEHVSMACVHLASKIEEAPRRIRDVINVFHRLRQLRDKKKPVPLLLDQDYVNLKNQIIKAERRVLKELGFCVHVKHPHKIIVMYLQVLECERNQHLVQTSWVASEGIT

SEQ ID NO: 11513 - protein, 298 aa, Homo sapiens
MNDSLRTDVFVRFQPESIACACIYLAARTLEIPLPNRPHWFLLFGATEEEIQEICLKILQLYARKKVDLTHLEGEVEKRKHAIEEAKAQARGLLPGGTQVLDGTSGFSPAPKLVESPKEGKGSKPSPLSVKNTKRRLEGAKKAKADSPVNGLPKGRESRSRSRSREQSYSRSPSRSASPKRRKSDSGSTSGGSKSQSRSRSRSDSPPRQAPRSAPYKGSEIRGSRKSKDCKYPQKPHKSRSRSSSRSRSRSRERADNPGKYKKKSHYYRDQRRERSRSYERTGRRYERDHPGHSRHRR

SEQ ID NO: 11514 - protein, 236 aa, Homo sapiens
MAAAAAAAGAAGSAAPAAAAGAPGSGGAPSGSQGVLIGDRLYSGVLITLENCLLPDDKLRFTPSMSSGLDTDTETDLRVVGCELIQAAGILLRLPQVAMATGQVLFQRFFYTKSFVKHSMEHVSMACVHLASKIEEAPRRIRDVINVFHRLRQLRDKKKPVPLLLDQDYVNLKNQIIKAERRVLKELGFCVHVKHPHKIIVMYLQVLECERNQHLVQTSWVASEDPLLKWDSWQRL

SEQ ID NO: 11515 - protein, 226 aa, Homo sapiens
MAAAAAAAGAAGSAAPAAAAGAPGSGGAPSGSQGVLIGDRLYSGVLITLENCLLPDDKLRFTPSMSSGLDTDTETDLRVVGCELIQAAGILLRLPQVAMATGQVLFQRFFYTKSFVKHSMEHVSMACVHLASKIEEAPRRIRDVINVFHRLRQLRDKKKPVPLLLDQDYVNLKNQIIKAERRVLKELGFCVHVKHPHKIIVMYLQVLECERNQHLVQTSWVASEGK

SEQ ID NO: 11516 - protein, 92 aa, Homo sapiens
MNDYKLEEDPVTKERTFKRFAPRKGDKIYQEFKKLYFYSDAYRPLKFACETIIEEYEDEISSLIAQETHYLADKLCSEKSDLCETSANHTEL

SEQ ID NO: 11517 - protein, 472 aa, Homo sapiens
MKSILDGLADTTFRTITTDLLYVGSNDIQYEDIKGDMASKLGYFPQKFPLTSFRGSPFQEKMTAGDNPQLVPADQVNITEFYNKSLSSFKENEENIQCGENFMDIECFMVLNPSQQLAIAVLSLTLGTFTVLENLLVLCVILHSRSLRCRPSYHFIGSLAVADLLGSVIFVYSFIDFHVFHRKDSRNVFLFKLGGVTASFTASVGSLFLTAIDRYISIHRPLAYKRIVTRPKAVVAFCLMWTIAIVIAVLPLLGWNCEKLQSVCSDIFPHIDETYLMFWIGVTSVLLLFIVYAYMYILWKAHSHAVRMIQRGTQKSIIIHTSEDGKVQVTRPDQARMDIRLAKTLVLILVVLIICWGPLLAIMVYDVFGKMNKLIKTVFAFCSMLCLLNSTVNPIIYALRSKDLRHAFRSMFPSCEGTAQPLDNSMGDSDCLHKHANNAASVHRAAESCIKSTVKIAKVTMSVSTDTSAEAL

SEQ ID NO: 11518 - protein, 411 aa, Homo sapiens
MALQIPPSAPSPLTSCTWAQMTFSTKTSKENEENIQCGENFMDIECFMVLNPSQQLAIAVLSLTLGTFTVLENLLVLCVILHSRSLRCRPSYHFIGSLAVADLLGSVIFVYSFIDFHVFHRKDSRNVFLFKLGGVTASFTASVGSLFLTAIDRYISIHRPLAYKRIVTRPKAVVAFCLMWTIAIVIAVLPLLGWNCEKLQSVCSDIFPHIDETYLMFWIGVTSVLLLFIVYAYMYILWKAHSHAVRMIQRGTQKSIIIHTSEDGKVQVTRPDQARMDIRLAKTLVLILVVLIICWGPLLAIMVYDVFGKMNKLIKTVFAFCSMLCLLNSTVNPIIYALRSKDLRHAFRSMFPSCEGTAQPLDNSMGDSDCLHKHANNAASVHRAAESCIKSTVKIAKVTMSVSTDTSAEAL

SEQ ID NO: 11519 - protein, 439 aa, Homo sapiens
MKSILDGLADTTFRTITTDLLGSPFQEKMTAGDNPQLVPADQVNITEFYNKSLSSFKENEENIQCGENFMDIECFMVLNPSQQLAIAVLSLTLGTFTVLENLLVLCVILHSRSLRCRPSYHFIGSLAVADLLGSVIFVYSFIDFHVFHRKDSRNVFLFKLGGVTASFTASVGSLFLTAIDRYISIHRPLAYKRIVTRPKAVVAFCLMWTIAIVIAVLPLLGWNCEKLQSVCSDIFPHIDETYLMFWIGVTSVLLLFIVYAYMYILWKAHSHAVRMIQRGTQKSIIIHTSEDGKVQVTRPDQARMDIRLAKTLVLILVVLIICWGPLLAIMVYDVFGKMNKLIKTVFAFCSMLCLLNSTVNPIIYALRSKDLRHAFRSMFPSCEGTAQPLDNSMGDSDCLHKHANNAASVHRAAESCIKSTVKIAKVTMSVSTDTSAEAL

SEQ ID NO: 11520 - protein, 56 aa, Homo sapiens
MRRPWEKKEATRNPIAEVLARKKRTEELISLQEHGSRKQKIKEASISWAETSRQIG

SEQ ID NO: 11521 - protein, 123 aa, Homo sapiens
MGNRVCCGGSWSCPSTFQKKKKTGSQTRRTLKPQPQQLQQNLPKGHETTGHTYERVLQQQGSQERSPGLMSEDSNLHYADIQVCSRPHAREVKHVHLENATEYATLRFPQATPRYDSKNGTLV

SEQ ID NO: 11522 - protein, 269 aa, Homo sapiens
MQEIIASVDHIKFDLEIAVEQQLGAQPLPFPGMDKSGAAVCEFFLKAACGKGGMCPFRHISGEKTVVCKHWLRGLCKKGDQCEFLHEYDMTKMPECYFYSKFGECSNKECPFLHIDPESKIKDCPWYDRGFCKHGPLCRHRHTRRVICVNYLVGFCPEGPSCKFMHPRFELPMGTTEQPPLPQQTQPPAKQSNNPPLQRSSSLIQLTSQNSSPNQQRTPQVIGVMQSQNSSAGNRGPRPLEQVTCYKCGEKGHYANRCTKGHLAFLSGQ

SEQ ID NO: 11523 - protein, 244 aa, Homo sapiens
MQEIIASVDHIKFDLEIAVEQQLGAQPLPFPGMDKSGAAVCEFFLKAACGKGGMCPFRHISGEKTVVCKHWLRGLCKKGDQCEFLHEYDMTKMPECYFYSKFGECSNKECPFLHIDPESKIKDCPWYDRGFCKHGPLCRHRHTRRVICVNYLVGFCPEGPSCKFMHPRFELPMGTTEQPPLPQQTQPPAKQRTPQVIGVMQSQNSSAGNRGPRPLEQVTCYKCGEKGHYANRCTKGHLAFLSGQ

SEQ ID NO: 11524 - protein, 243 aa, Homo sapiens
MQEIIASVDHIKFDLEIAVEQQLGAQPLPFPGMDKSGAAVCEFFLKAACGKGGMCPFRHISGEKTVVCKHWLRGLCKKGDQCEFLHEYDMTKMPECYFYSKFGECSNKECPFLHIDPESKIKDCPWYDRGFCKHGPLCRHRHTRRVICVNYLVGFCPEGPSCKFMHPRFELPMGTTEQPPLPQQTQPPAKRTPQVIGVMQSQNSSAGNRGPRPLEQVTCYKCGEKGHYANRCTKGHLAFLSGQ

SEQ ID NO: 11525 - protein, 520 aa, Homo sapiens
MSLLSLSWLGLRPVAASPWLLLLVVGASWLLARILAWTYAFYHNGRRLRCFPQPRKQNWFLGHLGLVTPTEEGLRVLTQLVATYPQGFVRWLGPITPIINLCHPDIVRSVINTSDAITDKDIVFYKTLKPWLGDGLLLSVGDKWRHHRRLLTPAFHFNILKPYIKIFSKSANIMHAKWQRLAMEGSTCLDVFEHISLMTLDSLQKCIFSFDSNCQEKPSEYITAIMELSALVVKRNNQFFRYKDFLYFLTPCGRRFHRACRLVHDFTDAVIQERRRTLTSQGVDDFLQAKAKSKTLDFIDVLLLSEDKNGKELSDEDIRAEADTFMFGGHDTTASGLSWVLYNLARHPEYQERCRQEVQELLKDREPKEIEWDDLAQLPFLTMCLKESLRLHPPIPTFARGCTQDVVLPDSRVIPKGNVCNINIFAIHHNPSVWPDPEVYDPFRFDPENAQKRSPMAFIPFSAGPRNCIGQKFAMAEMKVVLALTLLRFRILPDHREPRRTPEIVLRAEDGLWLRVEPLG

SEQ ID NO: 11526 - protein, 299 aa, Homo sapiens [sequence omitted]

SEQ ID NO: 11527 - protein, 134 aa, Homo sapiens
MEFVMKQALGGATKDMGKMLGGDEEKDPDAAKKEEERQEALRQAEEERKAKYAKMEAEREAVRQGIRDKYGIKKKEEREAEAQAAMEANSEGSLTRPKKAIPPGCGDEVEEEDESILDTVIKYLPGPLQDMLKK

SEQ ID NO: 11528 - protein, 312 aa, Homo sapiens
MADFGISAGQFVAVVWDKSSPVEALKGLVDKLQALTGNEGRVSVENIKQLLQSAHKESSFDIILSGLVPGSTTLHSAEILAEIARILRPGGCLFLKEPVETAVDNNSKVKTASKLCSALTLSGLVEVKELQREPLTPEEVQSVREHLGHESDNLLFVQITGKKPNFEVGSSRQLKLSITKKSSPSVKPAVDPAAAKLWTLSANDMEDDSMDLIDSDELLDPEDLKKPDPASLRAASCGEGKKRKACKNCTCGLAEELEKEKSREQMSSQPKSACGNCYLGDAFRCASCPYLGMPAFKPGEKVLLSDSNLHDA

SEQ ID NO: 11529 - protein, 108 aa, Homo sapiens
MEDDSMDLIDSDELLDPEDLKKPDPASLRAASCGEGKKRKACKNCTCGLAEELEKEKSREQMSSQPKSACGNCYLGDAFRCASCPYLGMPAFKPGEKVLLSDSNLHDA

SEQ ID NO: 11530 - protein, 299 aa, Homo sapiens
MADFGISAGQFVAVVWDKSSPVEALKGLVDKLQALTGNEGRVSVENIKQLLQCLVPGSTTLHSAEILAEIARILRPGGCLFLKEPVETAVDNNSKVKTASKLCSALTLSGLVEVKELQREPLTPEEVQSVREHLGHESDNLLFVQITGKKPNFEVGSSRQLKLSITKKSSPSVKPAVDPAAAKLWTLSANDMEDDSMDLIDSDELLDPEDLKKPDPASLRAASCGEGKKRKACKNCTCGLAEELEKEKSREQMSSQPKSACGNCYLGDAFRCASCPYLGMPAFKPGEKVLLSDSNLHDA

SEQ ID NO: 11531 - protein, 548 aa, Homo sapiens
MAHIPSGGAPAAGAAPMGPQYCVCKVELSVSGQNLLDRDVTSKSDPFCVLFTENNGRWIEYDRTETAINNLNPAFSKKFVLDYHFEEVQKLKFALFDQDKSSMRLDEHDFLGQFSCSLGTIVSSKKITRPLLLLNDKPAGKGLITIAAQELSDNRVITLSLAGRRLDKKDLFGKSDPFLEFYKPGDDGKWMLVHRTEVIKYTLDPVWKPFTVPLVSLCDGDMEKPIQVMCYDYDNDGGHDFIGEFQTSVSQMCEARDSVPLEFECINPKKQRKKKNYKNSGIIILRSCKINRDYSFLDYILGGCQLMFTVGIDFTASNGNPLDPSSLHYINPMGTNEYLSAIWAVGQIIQDYDSDKMFPALGFGAQLPPDWKVSHEFAINFNPTNPFCSGVDGIAQAYSACLPHIRFYGPTNFSPIVNHVARFAAQATQQRTATQYFILLIITDGVISDMEETRHAVVQASKLPMSIIIVGVGNADFAAMEFLDGDSRMLRSHTGEEAARDIVQFVPFREFRNAAKETLAKAVLAELPQQVVQYFKHKNLPPTNSEPA

SEQ ID NO: 11532 - protein, 446 aa, Homo sapiens
MRLDEHDFLGQFSCSLGTIVSSKKITRPLLLLNDKPAGKGLITIAAQELSDNRVITLSLAGRRLDKKDLFGKSDPFLEFYKPGDDGKWMLVHRTEVIKYTLDPVWKPFTVPLVSLCDGDMEKPIQVMCYDYDNDGGHDFIGEFQTSVSQMCEARDSVPLEFECINPKKQRKKKNYKNSGIIILRSCKINRDYSFLDYILGGCQLMFTVGIDFTASNGNPLDPSSLHYINPMGTNEYLSAIWAVGQIIQDYDSDKMFPALGFGAQLPPDWKVSHEFAINFNPTNPFCSGVDGIAQAYSACLPHIRFYGPTNFSPIVNHVARFAAQATQQRTATQYFILLIITDGVISDMEETRHAVVQASKLPMSIIIVGVGNADFAAMEFLDGDSRMLRSHTGEEAARDIVQFVPFREFRNAAKETLAKAVLAELPQQVVQYFKHKNLPPTNSEPA

SEQ ID NO: 11533 - protein, 184 aa, Homo sapiens
MDLQAAGAQAQGAAEPSRGPPLPSARGAPPSPEAGFATADHSSQERETEKAMDRLARGTQSIPNDSPARGEGTHSEEEGFAMDEEDSDGELNTWELSEGTNCPPKEQPGDLFNEDWDSELKADQGNPYDADDIQESISQELKPWVCCAPQGDMIYDPSWHHPPPLIPYYSKMVFETGQFDDAED

SEQ ID NO: 11534 - protein, 215 aa, Homo sapiens
MDKVQSGFLILFLFLMECQLHLCLPYADGLHPTGNITGLPGSKRSQPPRNITKEPKVFFHKTQLPGIQGAASRSTAASPTNPMKFLRNKAIIRHRPALVKVILISSVAFSIALICGMAISYMIYRLAQAEERQQLESLYKNLRIPLLGDEEEGSEDEGESTHLLPENENELEKFIHSVIISKRSKNIKKKLKEEQNSVTENKTKNASHNGKMEDL

SEQ ID NO: 11535 - protein, 423 aa, Homo sapiens
MASALEQFVNSVRQLSAQGQMTQLCELINKSGELLAKNLSHLDTVLGALDVQEHSLGVLAVLFVKFSMPSVPDFETLFSQVQLFISTCNGEHIRYATDTFAGLCHQLTNALVERKQPLRGIGILKQAIDKMQMNTNQLTSIHADLCQLCLLAKCFKPALPYLDVDMMDICKENGAYDAKHFLCYYYYGGMIYTGLKNFERALYFYEQAITTPAMAVSHIMLESYKKYILVSLILLGKVQQLPKYTSQIVGRFIKPLSNAYHELAQVYSTNNPSELRNLVNKHSETFTRDNNMGLVKQCLSSLYKKNIQRLTKTFLTLSLQDMASRVQLSGPQEAEKYVLHMIEDGEIFASINQKDGMVSFHDNPEKYNNPAMLHNIDQEMLKCIELDERLKAMDQEITVNPQFVQKSMGSQEDDSGNKPSSYS

SEQ ID NO: 11536 - protein, 403 aa, Homo sapiens
MTQLCELINKSGELLAKNLSHLDTVLGALDVQEHSLGVLAVLFVKFSMPSVPDFETLFSQVQLFISTCNGEHIRYATDTFAGLCHQLTNALVERKQPLRGIGILKQAIDKMQMNTNQLTSIHADLCQLCLLAKCFKPALPYLDVDMMDICKENGAYDAKHFLCYYYYGGMIYTGLKNFERALYFYEQAITTPAMAVSHIMLESYKKYILVSLILLGKVQQLPKYTSQIVGRFIKPLSNAYHELAQVYSTNNPSELRNLVNKHSETFTRDNNMGLVKQCLSSLYKKNIQRLTKTFLTLSLQDMASRVQLSGPQEAEKYVLHMIEDGEIFASINQKDGMVSFHDNPEKYNNPAMLHNIDQEMLKCIELDERLKAMDQEITVNPQFVQKSMGSQEDDSGNKPSSYS

SEQ ID NO: 11537 - protein, 150 aa, Homo sapiens
MLGAALRRCAVAATTRADPRGLLHSARTPGPAVAIQSVRCYSHGSQETDEEFDARWVTYFNKPDIDAWELRKGINTLVTYDMVPEPKIIDAALRACRRLNDFASTVRILEVVKDKAGPHKEIYPYVIQELRPTLNELGISTPEELGLDKV

SEQ ID NO: 11538 - protein, 196 aa, Homo sapiens
MRLPLLVSAGVLLVALLPCPPCRALLSRGPVPGARQAPQHPQPLDFFQPPPQSEQPQQPQARPVLLRMGEEYFLRLGNLNKSPAAPLSPASSLLAGGSGSRPSPEQATANFFRVLLQQLLLPRRSLDSPAALAERGARNALGGHQEAPERERRSEEPPISLDLTFHLLREVLEMARAEQLAQQAHSNRKLMEIIGK

SEQ ID NO: 11539 - protein, 76 aa, Homo sapiens
MGLKMSCLKGFQMCVSSSSSSHDEAPVLNDKHLDVPDIIITPPTPTGMMLPRDLGSTVWLDETGSCPDDGEIDPEA

SEQ ID NO: 11540 - protein, 1224 aa, Homo sapiens
MLTKFETKSARVKGLSFHPKRPWILTSLHNGVIQLWDYRMCTLIDKFDEHDGPVRGIDFHKQQPLFVSGGDDYKIKVWNYKLRRCLFTLLGHLDYIRTTFFHHEYPWILSASDDQTIRVWNWQSRTCVCVLTGHNHYVMCAQFHPTEDLVVSASLDQTVRVWDISGLRKKNLSPGAVESDVRGITGVDLFGTTDAVVKHVLEGHDRGVNWAAFHPTMPLIVSGADDRQVKIWRMNESKAWEVDTCRGHYNNVSCAVFHPRQELILSNSEDKSIRVWDMSKRTGVQTFRRDHDRFWVLAAHPNLNLFAAGHDGGMIVFKLERERPAYAVHGNMLHYVKDRFLRQLDFNSSKDVAVMQLRSGSKFPVFNMSYNPAENAVLLCTRASNLENSTYDLYTIPKDADSQNPDAPEGKRSSGLTAVWVARNRFAVLDRMHSLLIKNLKNEITKKVQVPNCDEIFYAGTGNLLLRDADSITLFDVQQKRTLASVKISKVKYVIWSADMSHVALLAKHAIVICNRKLDALCNIHENIRVKSGAWDESGVFIYTTSNHIKYAVTTGDHGIIRTLDLPIYVTRVKGNNVYCLDRECRPRVLTIDPTEFKFKLALINRKYDEVLHMVRNAKLVGQSIIAYLQKKGYPEVALHFVKDEKTRFSLALECGNIEIALEAAKALDDKNCWEKLGEVALLQGNHQIVEMCYQRTKNFDKLSFLYLITGNLEKLRKMMKIAEIRKDMSGHYQNALYLGDVSERVRILKNCGQKSLAYLTAATHGLDEEAESLKETFDPEKETIPDIDPNAKLLQPPAPIMPLDTNWPLLTVSKGFFEGTIASKGKGGALAADIDIDTVGTEGWGEDAELQLDEDGFVEATEGLGDDALGKGQEEGGGWDVEEDLELPPELDISPGAAGGAEDGFFVPPTKGTSPTQIWCNNSQLPVDHILAGSFETAMRLLHDQVGVIQFGPYKQLFLQTYARGRTTYQALPCLPSMYGYPNRNWKDAGLKNGVPAVGLKLNDLIQRLQLCYQLTTVGKFEEAVEKFRSILLSVPLLVVDNKQEIAEAQQLITICREYIVGLSVETERKKLPKETLEQQKRICEMAAYFTHSNLQPVHMILVLRTALNLFFKLKNFKTAATFARRLLELGPKPEVAQQTRKILSACEKNPTDAYQLNYDMHNPFDICAASYRPIYRGKPVEKCPLSGACYSPEFKGQICRVTTVTEIGKDVIGLRISPLQFR

SEQ ID NO: 11541 - protein, 1233 aa, Homo sapiens
MLTKFETKSARVKGLSFHPKRPWILTSLHNGVIQLWDYRMCTLIDKFDEHDGPVRGIDFHKQQPLFVSGGDDYKIKVWNYKLRRCLFTLLGHLDYIRTTFFHHEYPWILSASDDQTIRVWNWQSRTCVCVLTGHNHYVMCAQFHPTEDLVVSASLDQTVRVWDISGLRKKNLSPGAVESDVRGITGVDLFGTTDAVVKHVLEGHDRGVNWAAFHPTMPLIVSGADDRQVKIWRMNESKAWEVDTCRGHYNNVSCAVFHPRQELILSNSEDKSIRVWDMSKRTGVQTFRRDHDRFWVLAAHPNLNLFAAGHDGGMIVFKLERERPAYAVHGNMLHYVKDRFLRQLDFNSSKDVAVMQLRSGSKFPVFNMSYNPAENAVLLCTRASNLENSTYDLYTIPKDADSQNPDAPEGKRSSGLTAVWVARNRFAVLDRMHSLLIKNLKNEITKKVQVPNCDEIFYAGTGNLLLRDADSITLFDVQQKRTLASVKISKVKYVIWSADMSHVALLAKHEHSCPLPLTAIVICNRKLDALCNIHENIRVKSGAWDESGVFIYTTSNHIKYAVTTGDHGIIRTLDLPIYVTRVKGNNVYCLDRECRPRVLTIDPTEFKFKLALINRKYDEVLHMVRNAKLVGQSIIAYLQKKGYPEVALHFVKDEKTRFSLALECGNIEIALEAAKALDDKNCWEKLGEVALLQGNHQIVEMCYQRTKNFDKLSFLYLITGNLEKLRKMMKIAEIRKDMSGHYQNALYLGDVSERVRILKNCGQKSLAYLTAATHGLDEEAESLKETFDPEKETIPDIDPNAKLLQPPAPIMPLDTNWPLLTVSKGFFEGTIASKGKGGALAADIDIDTVGTEGWGEDAELQLDEDGFVEATEGLGDDALGKGQEEGGGWDVEEDLELPPELDISPGAAGGAEDGFFVPPTKGTSPTQIWCNNSQLPVDHILAGSFETAMRLLHDQVGVIQFGPYKQLFLQTYARGRTTYQALPCLPSMYGYPNRNWKDAGLKNGVPAVGLKLNDLIQRLQLCYQLTTVGKFEEAVEKFRSILLSVPLLVVDNKQEIAEAQQLITICREYIVGLSVETERKKLPKETLEQQKRICEMAAYFTHSNLQPVHMILVLRTALNLFFKLKNFKTAATFARRLLELGPKPEVAQQTRKILSACEKNPTDAYQLNYDMHNPFDICAASYRPIYRGKPVEKCPLSGACYSPEFKGQICRVTTVTEIGKDVIGLRISPLQFR

SEQ ID NO: 11542 - protein, 145 aa, Homo sapiens
MQYLHCCLQIAPNQEGMVQAGGQGHGLARVVLRAVLSPPCWAPHSPCGSPAATEAGRLMRRLPSVGGRMTAPKTPRFLTRRPPASSPEDPPLPHPKTPRFLTQRPPASLPRRPRFLTLGPVSSHSSGDLRLWTAHQLPQQGGCPG

SEQ ID NO: 11543 - protein, 261 aa, Homo sapiens
MTHQSHAYHMVKPSPWPLTGALSALLMTSGLAMWFHFHSMTLLMLGLLTNTLTMYQWWRDVTRESTYQGHHTPPVQKGLRYGMILFITSEVFFFAGFFWAFYHSSLAPTPQLGGHWPPTGITPLNPLEVPLLNTSVLLASGVSITWAHHSLMENNRNQMIQALLITILLGLYFTLLQASEYFESPFTISDGIYGSTFFVATGFHGLHVIIGSTFLTICFIRQLMFHFTSKHHFGFEAAAWYWHFVDVVWLFLYVSIYWWGS

SEQ ID NO: 11544 - protein, 243 aa, Homo sapiens
MALLPVLFLVTVLLPSLPAEGKDPAFTALLTTQLQVQREIVNKHNELRKAVSPPASNMLKMEWSREVTTNAQRWANKCTLQHSDPEDRKTSTRCGENLYMSSDPTSWSSAIQSWYDEILDFVYGVGPKSPNAVVGHYTQLVWYSTYQVGCGIAYCPNQDSLKYYYVCQYCPAGNNMNRKNTPYQQGTPCAGCPDDCDKGLCTNSCQYQDLLSNCDSLKNTAGCEHELLKEKCKATCLCENKIY

SEQ ID NO: 11545 - protein, 278 aa, Homo sapiens
MALLPVLFLVTVLLPSLPAEGKDPAFTALLTTQLQVQREIVNKHNELRKAVSPPASNMLKMEWSREVTTNAQRWANKCTLQHSDPEDRKTSTRCGENLYMSSDPTSWSSAIQSWYDEILDFVYGVGPKSPNAVVGHYTQLVWYSTYQVGCGIAYCPNQDSLKYYYVCQYCPAMKTYLNKREGINVWKCFLRLRHFQLLRGEQLLTFSGNNMNRKNTPYQQGTPCAGCPDDCDKGLCTNSCQYQDLLSNCDSLKNTAGCEHELLKEKCKATCLCENKIY

SEQ ID NO: 11546 - protein, 883 aa, Homo sapiens
MASPGAGRAPPELPERNCGYREVEYWDQRYQGAADSAPYDWFGDFSSFRALLEPELRPEDRILVLGCGNSALSYELFLGGFPNVTSVDYSSVVVAAMQARHAHVPQLRWETMDVRKLDFPSASFDVVLEKGTLDALLAGERDPWTVSSEGVHTVDQVLSEVGFQKGTRQLLGSRTQLELVLAGASLLLAALLLGCLVALGVQYHRDPSHSTCLTEACIRVAGKILESLDRGVSPCEDFYQFSCGGWIRRNPLPDGRSRWNTFNSLWDQNQAILKHLLENTTFNSSSEAEQKTQRFYLSCLQVERIEELGAQPLRDLIEKIGGWNITGPWDQDNFMEVLKAVAGTYRATPFFTVYISADSKSSNSNVIQVDQSGLFLPSRDYYLNRTANEKVLTAYLDYMEELGMLLGGRPTSTREQMQQVLELEIQLANITVPQDQRRDEEKIYHKMSISELQALAPSMDWLEFLSFLLSPLELSDSEPVVVYGMDYLQQVSELINRTEPSILNNYLIWNLVQKTTSSLDRRFESAQEKLLETLYGTKKSCVPRWQTCISNTDDALGFALGSLFVKATFDRQSKEIAEGMISEIRTAFEEALGQLVWMDEKTRQAAKEKADAIYDMIGFPDFILEPKELDDVYDGYEISEDSFFQNMLNLYNFSAKVMADQLRKPPSRDQWSMTPQTVNAYYLPTKNEIVFPAGILQAPFYARNHPKALNFGGIGVVMGHELTHAFDDQGREYDKEGNLRPWWQNESLAAFRNHTACMEEQYNQYQVNGERLNGRQTLGENIADNGGLKAAYNAYKAWLRKHGEEQQLPAVGLTNHQLFFVGFAQVWCSVRTPESSHEGLVTDPHSPARFRVLGTLSNSRDFLRHFGCPVGSPMNPGQLCEVW

SEQ ID NO: 11547 - protein, 220 aa, Homo sapiens
MAGLSRGSARALLAALLASTLLALLVSPARGRGGRDHGDWDEASRLPPLPPREDAARVARFVTHVSDWGALATISTLEAVRGRPFADVLSLSDGPPGAGSGVPYFYLSPLQLSVSNLQENPYATLTMTLAQTNFCKKHGFDPQSPLCVHIMLSGTVTKVNETEMDIAKHSLFIRHPEMKTWPSSHNWFFAKLNITNIWVLDYFGGPKIVTPEEYYNVTVQ

SEQ ID NO: 11548 - protein, 1210 aa, Homo sapiens [sequence omitted]

SEQ ID NO: 11549 - protein, 405 aa, Homo sapiens
MRPSGTAGAALLALLAALCPASRALEEKKVCQGTSNKLTQLGTFEDHFLSLQRMFNNCEVVLGNLEITYVQRNYDLSFLKTIQEVAGYVLIALNTVERIPLENLQIIRGNMYYENSYALAVLSNYDANKTGLKELPMRNLQEILHGAVRFSNNPALCNVESIQWRDIVSSDFLSNMSMDFQNHLGSCQKCDPSCPNGSCWGAGEENCQKLTKIICAQQCSGRCRGKSPSDCCHNQCAAGCTGPRESDCLVCRKFRDEATCKDTCPPLMLYNPTTYQMDVNPEGKYSFGATCVKKCPRNYVVTDHGSCVRACGADSYEMEEDGVRKCKKCEGPCRKVCNGIGIGEFKDSLSINATNIKHFKNCTSISGDLHILPVAFRGDSFTHTPPLDPQELDILKTVKEITGLS

SEQ ID NO: 11550 - protein, 705 aa, Homo sapiens
MRPSGTAGAALLALLAALCPASRALEEKKVCQGTSNKLTQLGTFEDHFLSLQRMFNNCEVVLGNLEITYVQRNYDLSFLKTIQEVAGYVLIALNTVERIPLENLQIIRGNMYYENSYALAVLSNYDANKTGLKELPMRNLQEILHGAVRFSNNPALCNVESIQWRDIVSSDFLSNMSMDFQNHLGSCQKCDPSCPNGSCWGAGEENCQKLTKIICAQQCSGRCRGKSPSDCCHNQCAAGCTGPRESDCLVCRKFRDEATCKDTCPPLMLYNPTTYQMDVNPEGKYSFGATCVKKCPRNYVVTDHGSCVRACGADSYEMEEDGVRKCKKCEGPCRKVCNGIGIGEFKDSLSINATNIKHFKNCTSISGDLHILPVAFRGDSFTHTPPLDPQELDILKTVKEITGFLLIQAWPENRTDLHAFENLEIIRGRTKQHGQFSLAVVSLNITSLGLRSLKEISDGDVIISGNKNLCYANTINWKKLFGTSGQKTKIISNRGENSCKATGQVCHALCSPEGCWGPEPRDCVSCRNVSRGRECVDKCNLLEGEPREFVENSECIQCHPECLPQAMNITCTGRGPDNCIQCAHYIDGPHCVKTCPAGVMGENNTLVWKYADAGHVCHLCHPNCTYGPGNESLKAMLFCLFKLSSCNQSNDGSVSHQSGSPAAQESCLGWIPSLLPSEFQLGWGGCSHLHAWPSASVIITASSCH

SEQ ID NO: 11551 - protein, 628 aa, Homo sapiens
MRPSGTAGAALLALLAALCPASRALEEKKVCQGTSNKLTQLGTFEDHFLSLQRMFNNCEVVLGNLEITYVQRNYDLSFLKTIQEVAGYVLIALNTVERIPLENLQIIRGNMYYENSYALAVLSNYDANKTGLKELPMRNLQEILHGAVRFSNNPALCNVESIQWRDIVSSDFLSNMSMDFQNHLGSCQKCDPSCPNGSCWGAGEENCQKLTKIICAQQCSGRCRGKSPSDCCHNQCAAGCTGPRESDCLVCRKFRDEATCKDTCPPLMLYNPTTYQMDVNPEGKYSFGATCVKKCPRNYVVTDHGSCVRACGADSYEMEEDGVRKCKKCEGPCRKVCNGIGIGEFKDSLSINATNIKHFKNCTSISGDLHILPVAFRGDSFTHTPPLDPQELDILKTVKEITGFLLIQAWPENRTDLHAFENLEIIRGRTKQHGQFSLAVVSLNITSLGLRSLKEISDGDVIISGNKNLCYANTINWKKLFGTSGQKTKIISNRGENSCKATGQVCHALCSPEGCWGPEPRDCVSCRNVSRGRECVDKCNLLEGEPREFVENSECIQCHPECLPQAMNITCTGRGPDNCIQCAHYIDGPHCVKTCPAGVMGENNTLVWKYADAGHVCHLCHPNCTYGS

SEQ ID NO: 11552 - protein, 290 aa, Homo sapiens
MHPINVRRDPSIPIYGLRQSILLNTRLQDCYVDSPALTNIWMARTCAKQNINAPAPATTSSWEVVRNPLIASSFSLVKLVLRRQLKNKCCPPPCKFGEGKLSKRLKHKDDSVMKATQQARKRNFISSKSKQPAGHRRPAGGIRESKESSKEKKLTVRQDLEDRYAEHVAATQALPQDSGTAAWKGRVLLPETQKRQQLSEDTLTIHGLPTEGYQALYHAVVEPMLWNPSGTPKRYSLELGKAIKQKLWEALCSQGAISEGAQRDRFPGRKQPGVHEEPVLKKWPKLKSKK

SEQ ID NO: 11553 - protein, 961 aa, Homo sapiens
MEVPAAGRVPAEGAPTAAVAEVRCPGPAPLRLLEWRVAAGAAVRIGSVLAVFEAAASAQSSGASQSRVASGGCVRPARPERRLRSERAGVVRELCAQPGQVVAPGAVLVRLEGCSHPVVMKGLCAECGQDLTQLQSKNGKQQVPLSTATVSMVHSVPELMVSSEQAEQLGREDQQRLHRNRKLVLMVDLDQTLIHTTEQHCQQMSNKGIFHFQLGRGEPMLHTRLRPHCKDFLEKIAKLYELHVFTFGSRLYAHTIAGFLDPEKKLFSHRILSRDECIDPFSKTGNLRNLFPCGDSMVCIIDDREDVWKFAPNLITVKKYVYFQGTGDMNAPPGSRESQTRKKVNHSRGTEVSEPSPPVRDPEGVTQAPGVEPSNGLEKPARELNGSEAATPRDSPRPGKPDERDIWPPAQAPTSSQELAGAPEPQGSCAQGGRVAPGQRPAQGATGTDLDFDLSSDSESSSESEGTKSSSSASDGESEGKRGRQKPKAAPEGAGALAQGSSLEPGRPAAPSLPGEAEPGAHAPDKEPELGGQEEGERDGLCGLGNGCADRKEAETESQNSELSGVTAGESLDQSMEEEEEEDTDEDDHLIYLEEILVRVHTDYYAKYDRYLNKEIEEAPDIRKIVPELKSKVLADVAIIFSGLHPTNFPIEKTREHYHATALGAKILTRLVLSPDAPDRATHLIAARAGTEKVLQAQECGHLHVVNPDWLWSCLERWDKVEEQLFPLRDDHTKAQRENSPAAFPDREGVPPTALFHPMPVLPKAQPGPEVRIYDSNTGKLIRTGARGPPAPSSSLPIRQEPSSFRAVPPPQPQMFGEELPDAQDGEQPGPSRRKRQPSMSETMPLYTLCKEDLESMDKEVDDILGEGSDDSDSEKRRPEEQEEEPQPRKPGTRRERTLGAPASSERSAAGGRGPRGHKRKLNEEDAASESSRESSNEDEGSSSEADEMAKALEAELNDLM

SEQ ID NO: 11554 - protein, 867 aa, Homo sapiens
MEVPAAGRVPAEGAPTAAVAEVRCPGPAPLRLLEWRVAAGAAVRIGSVLAVFEAAASAQSSGASQSRVASGGCVRPARPERRLRSERAGVVRELCAQPGQVVAPGAVLVRLEGCSHPVVMKGLCAECGQDLTQLQSKNGKQQVPLSTATVSMVHSVPELMVSSEQAEQLGREDQQRLHRNRKLVLMVDLDQTLIHTTEQHCQQMSNKGIFHFQLGRGEPMLHTRLRPHCKDFLEKIAKLYELHVFTFGSRLYAHTIAGFLDPEKKLFSHRILSRDECIDPFSKTGNLRNLFPCGDSMVCIIDDREDVWKFAPNLITVKKYVYFQGTGDMNAPPGSRESQTRKKVNHSRGTEVSEPSPPVRDPEGVTQAPGVEPSNGLEKPARELNGSEAATPRDSPRPGKPDERDIWPPAQAPTSSQELAGAPEPQGSCAQGGRVAPGQRPAQGATGTDLDFDLSSDSESSSESEGTKSSSSASDGESEGKRGRQKPKAAPEGAGALAQGSSLEPGRPAAPSLPGEAEPGAHAPDKEPELGGQEEGERDGLCGLGNGCADRKEAETESQNSELSGVTAGESLDQSMEEEEEEDTDEDDHLIYLEEILVRVHTDYYAKYDRYLNKEIEEAPDIRKIVPELKSKVLADVAIIFSGLHPTNFPIEKTREHYHATALGAKILTRLVLSPDAPDRATHLIAARAGTEKVLQAQECGHLHVVNPDWLWSCLERWDKVEEQLFPLRDDHTKAQRENSPAAFPDREGVPPTALFHPMPVLPKAQPGPEVRIYDSNTGKLIRTGARGPPAPSSSLPIRQEPSSFRWTTSLEKAATTATARRGGLRSRRRSPSPGSQGPAGSGRSGHLRPARGARQGAGGPEATRGS

SEQ ID NO: 11555 - protein, 503 aa, Homo sapiens
MATQSDMEKEQKHQQDEGQGGLNNETALASGDACGTGNQDPAASVTTVSSQASPSGGAALSSSTAGSSAAAATSAAIFITDEASGLPIIAAVLTERHSDRQDCRSPHEVFGCVVPEGGSQAAVGPQKATGHADEHLAQTKSPGNSRRRKQPCRNQAAPAQKPPGRRLFPEPLPPSSPGFRPSSYPCSGASTSSQATQPGPALLSHASEARPATRSRITLVASALRRRASGPGPVIRGCTAQPGPAFPHRATHLDPARLSPESAPGPARRGRASVPGPARRGCDSAPGPARRGRDSAPVSAPRGRDSAPGSARRGRDSAPGPALRVRTARSDAGHRSTSTTPGTGLRSRSTQQRSALLSRRSLSGSADENPSCGTGSERLAFQSRSGSPDPEVPSRASPPVWHAVRMRASSPSPPGRFFLPIPQQWDESSSSSYASNSSSPSRSPGLSPSSPSPEFLGLRSISTPSPESLRYALMPEFYALSPVPPEEQAEIESTAHPATPPEP

SEQ ID NO: 11556 - protein, 706 aa, Homo sapiens
MGDERPHYYGKHGTPQKYDPTFKGPIYNRGCTDIICCVFLLLAIVGYVAVGIIAWTHGDPRKVIYPTDSRGEFCGQKGTKNENKPYLFYFNIVKCASPLVLLEFQCPTPQICVEKCPDRYLTYLNARSSRDFEYYKQFCVPGFKNNKGVAEVLQDGDCPAVLIPSKPLARRCFPAIHAYKGVLMVGNETTYEDGHGSRKNITDLVEGAKKANGVLEARQLAMRIFEDYTVSWYWIIIGLVIAMAMSLLFIILLRFLAGIMVWVMIIMVILVLGYGIFHCYMEYSRLRGEAGSDVSLVDLGFQTDFRVYLHLRQTWLAFMIILSILEVIIILLLIFLRKRILIAIALIKEASRAVGYVMCSLLYPLVTFFLLCLCIAYWASTAVFLSTSNEAVYKIFDDSPCPFTAKTCNPETFPSSNESRQCPNARCQFAFYGGESGYHRALLGLQIFNAFMFFWLANFVLALGQVTLAGAFASYYWALRKPDDLPAFPLFSAFGRALRYHTGSLAFGALILAIVQIIRVILEYLDQRLKAAENKFAKCLMTCLKCCFWCLEKFIKFLNRNAYIMIAIYGTNFCTSARNAFFLLMRNIIRVAVLDKVTDFLFLLGKLLIVGSVGILAFFFFTHRIRIVQDTAPPLNYYWVPILTVIVGSYLIAHGFFSVYGMCVDTLFLCFLEDLERNDGSAERPYFMSSTLKKLLNKTNKKAAES

SEQ ID NO: 11557 - protein, 711 aa, Homo sapiens
MGDERPHYYGKHGTPQKYDPTFKGPIYNRGCTDIICCVFLLLAIVGYVAVGIIAWTHGDPRKVIYPTDSRGEFCGQKGTKNENKPYLFYFNIVKCASPLVLLEFQCPTPQICVEKCPDRYLTYLNARSSRDFEYYKQFCVPGFKNNKGVAEVLQDGDCPAVLIPSKPLARRCFPAIHAYKGVLMVGNETTYEDGHGSRKNITDLVEGAKKANGVLEARQLAMRIFEDYTVSWYWIIIGLVIAMAMSLLFIILLRFLAGIMVWVMIIMVILVLGYGIFHCYMEYSRLRGEAGSDVSLVDLGFQTDFRVYLHLRQTWLAFMIILSILEVIIILLLIFLRKRILIAIALIKEASRAVGYVMCSLLYPLVTFFLLCLCIAYWASTAVFLSTSNEAVYKIFDDSPCPFTAKTCNPETFPSSNESRQCPNARCQFAFYGGESGYHRALLGLQIFNAFMFFWLANFVLALGQVTLAGAFASYYWALRKPDDLPAFPLFSAFGRALRYHTGSLAFGALILAIVQIIRVILEYLDQRLKAAENKFAKCLMTCLKCCFWCLEKFIKFLNRNAYIMIAIYGTNFCTSARNAFFLLMRNIIRVAVLDKVTDFLFLLGKLLIVGSVGILAFFFFTHRIRIVQDTAPPLNYYWVPILTVIVGSYLIAHGFFSVYGMCVDTLFLCFCEDLERNDGSQERPYFMSPELRDILLKGSAEEGKRAEAEE

SEQ ID NO: 11558 - protein, 704 aa, Homo sapiens
MEDERKNGAYGTPQKYDPTFKGPIYNRGCTDIICCVFLLLAIVGYVAVGIIAWTHGDPRKVIYPTDSRGEFCGQKGTKNENKPYLFYFNIVKCASPLVLLEFQCPTPQICVEKCPDRYLTYLNARSSRDFEYYKQFCVPGFKNNKGVAEVLQDGDCPAVLIPSKPLARRCFPAIHAYKGVLMVGNETTYEDGHGSRKNITDLVEGAKKANGVLEARQLAMRIFEDYTVSWYWIIIGLVIAMAMSLLFIILLRFLAGIMVWVMIIMVILVLGYGIFHCYMEYSRLRGEAGSDVSLVDLGFQTDFRVYLHLRQTWLAFMIILSILEVIIILLLIFLRKRILIAIALIKEASRAVGYVMCSLLYPLVTFFLLCLCIAYWASTAVFLSTSNEAVYKIFDDSPCPFTAKTCNPETFPSSNESRQCPNARCQFAFYGGESGYHRALLGLQIFNAFMFFWLANFVLALGQVTLAGAFASYYWALRKPDDLPAFPLFSAFGRALRYHTGSLAFGALILAIVQIIRVILEYLDQRLKAAENKFAKCLMTCLKCCFWCLEKFIKFLNRNAYIMIAIYGTNFCTSARNAFFLLMRNIIRVAVLDKVTDFLFLLGKLLIVGSVGILAFFFFTHRIRIVQDTAPPLNYYWVPILTVIVGSYLIAHGFFSVYGMCVDTLFLCFLEDLERNDGSAERPYFMSSTLKKLLNKTNKKAAES

SEQ ID NO: 11559 - protein, 324 aa, Homo sapiens
MGNLLKVLTCTDLEQGPNFFLDFENAQPTESEKEIYNQVNVVLKDAEGILEDLQSYRGAGHEIREAIQHPADEKLQEKAWGAVVPLVGKLKKFYEFSQRLEAALRGLLGALTSTPYSPTQHLEREQALAKQFAEILHFTLRFDELKMTNPAIQNDFSYYRRTLSRMRINNVPAEGENEVNNELANRMSLFYAEATPMLKTLSDATTKFVSENKNLPIENTTDCLSTMASVCRVMLETPEYRSRFTNEETVSFCLRVMVGVIILYDHVHPVGAFAKTSKIDMKGCIKVLKDQPPNSVEGLLNALRYTTKHLNDETTSKQIKSMLQ

SEQ ID NO: 11560 - protein, 178 aa, Homo sapiens
MTNPAIQNDFSYYRRTLSRMRINNVPAEGENEVNNELANRMSLFYAEATPMLKTLSDATTKFVSENKNLPIENTTDCLSTMASVCRVMLETPEYRSRFTNEETVSFCLRVMVGVIILYDHVHPVGAFAKTSKIDMKGCIKVLKDQPPNSVEGLLNALRYTTKHLNDETTSKQIKSMLQ

SEQ ID NO: 11561 - protein, 508 aa, Homo sapiens
MDHLGASLWPQVGSLCLLLAGAAWAPPPNLPDPKFESKAALLAARGPEELLCFTERLEDLVCFWEEAASAGVGPGNYSFSYQLEDEPWKLCRLHQAPTARGAVRFWCSLPTADTSSFVPLELRVTAASGAPRYHRVIHINEVVLLDAPVGLVARLADESGHVVLRWLPPPETPMTSHIRYEVDVSAGNGAGSVQRVEILEGRTECVLSNLRGRTRYTFAVRARMAEPSFGGFWSAWSEPVSLLTPSDLDPLILTLSLILVVILVLLTVLALLSHRRALKQKIWPGIPSPESEFEGLFTTHKGNFQLWLYQNDGCLWWSPCTPFTEDPPASLEVLSERCWGTMQAVEPGTDDEGPLLEPVGSEHAQDTYLVLDKWLLPRNPPSEDLPGPGGSVDIVAMDEGSEASSCSSALASKPSPEGASAASFEYTILDPSSQLLRPWTLCPELPPTPPHLKYLYLVVSDSGISTDYSSGDSQGAQGGLSDGPYSNPYENSLIPAAEPLPPSYVACS

SEQ ID NO: 11562 - protein, 241 aa, Homo sapiens
MDHLGASLWPQVGSLCLLLAGAAWAPPPNLPDPKFESKAALLAARGPEELLCFTERLEDLVCFWEEAASAGVGPGNYSFSYQLEDEPWKLCRLHQAPTARGAVRFWCSLPTADTSSFVPLELRVTAASGAPRYHRVIHINEVVLLDAPVGLVARLADESGHVVLRWLPPPETPMTSHIRYEVDVSAGNGAGSVQRGTVFLSPDWLSSTRARPHVIYFCLLRVPRPDSAPRWRSWRAAPSVC

SEQ ID NO: 11563 - protein, 328 aa, Homo sapiens
MDHLGASLWPQVGSLCLLLAGAAWAPPPNLPDPKFESKAALLAARGPEELLCFTERLEDLVCFWEEAASAGVGPGNYSFSYQLEDEPWKLCRLHQAPTARGAVRFWCSLPTADTSSFVPLELRVTAASGAPRYHRVIHINEVVLLDAPVGLVARLADESGHVVLRWLPPPETPMTSHIRYEVDVSAGNGAGSVQRVEILEGRTECVLSNLRGRTRYTFAVRARMAEPSFGGFWSAWSEPVSLLTPSDLDPLILTLSLILVVILVLLTVLALLSHRRALKQKIWPGIPSPESEFEGLFTTHKGNFQVGGLVVPSVPGLPCFLQPNCRPL

SEQ ID NO: 11564 - protein, 195 aa, Homo sapiens
MGQIEWAMWANEQALASGLILITGGIVATAGRFTQWYFGAYSIVAGVFVCLLEYPRGKRKKGSTMERWGQKYMTAVVKLFGPFTRNYYVRAVLHLLLSVPAGFLLATILGTACLAIASGIYLLAAVRGEQWTPIEPKPRERPQIGGTIKQPPSNPPPRPPAEARKKPSEEEAAVAAGGPPGGPQVNPIPVTDEVV

SEQ ID NO: 11565 - protein, 518 aa, Homo sapiens
MECDLMETDILESLEDLGYKGPLLEDGALSQAVSAGASSPEFTKLCAWLVSELRVLCKLEENVQATNSPSEAEEFQLEVSGLLGEMNCPYLSLTSGDVTKRLLIQKNCLLLLTYLISELEAARMLCVNAPPKKAQEGGGSEVFQELKGICIALGMSKPPANITMFQFFSGIEKKLKETLAKVPPNHVGKPLLKKPMGPAHWEKIEAINQAIANEYEVRRKLLIKRLDVTVQSFGWSDRAKSQTEKLAKVYQPKRSVLSPKTTISVAHLLAARQDLSKILRTSSGSIREKTACAINKVLMGRVPDRGGRPNEIEPPPPEMPPWQKRQDGPQQQTGGRGGGRGGYEHSSYGGRGGHEQGGGRGGRGGYDHGGRGGGRGNKHQGGWTDGGSGGGGGYQDGGYRDSGFQPGGYHGGHSSGGYQGGGYGGFQTSSSYTGSGYQGGGYQQDNRYQDGGHHGDRGGGRGGRGGRGGRGGRAGQGGGWGGRGSQNYHQGGQFEQHFQHGGYQYNHSGFGQGRHYTS

SEQ ID NO: 11566 - protein, 111 aa, Homo sapiens
MYSRLFYLKSSYIIYFEPLFSNAIINILSFINSLASPLTIFCFALSAQALSTIFYFRIFIFIFHSWILLFHFYFTCSFKTYEHQHSKMVPAYRMQSPRALPRTYLYVWPYK

SEQ ID NO: 11567 - protein, 94 aa, Homo sapiens
MGALFRLLLQERGKAAEFYSRGRKQRRPSASCTFGGIWSSGVDMLPNGAVGSLTQLGPSRPVLGIDYSKKEFRGTAENVTGLNTILHFRKRTRS

SEQ ID NO: 11568 - protein, 822 aa, Homo sapiens
MNGHISNHPSSFGMYPSQMNGYGSSPTFSQTDREHGSKTSAKALYEQRKNYARDSVSSVSDISQYRVEHLTTFVLDRKDAMITVDDGIRKLKLLDAKGKVWTQDMILQVDDRAVSLIDLESKNELENFPLNTIQHCQAVMHSCSYDSVLALVCKEPTQNKPDLHLFQCDEVKANLISEDIESAISDSKGGKQKRRPDALRMISNADPSIPPPPRAPAPAPPGTVTQVDVRSRVAAWSAWAADQGDFEKPRQYHEQEETPEMMAARIDRDVQILNHILDDIEFFITKLQKAAEAFSELSKRKKNKKGKRKGPGEGVLTLRAKPPPPDEFLDCFQKFKHGFNLLAKLKSHIQNPSAADLVHFLFTPLNMVVQATGGPELASSVLSPLLNKDTIDFLNYTVNGDERQLWMSLGGTWMKARAEWPKEQFIPPYVPRFRNGWEPPMLNFMGATMEQDLYQLAESVANVAEHQRKQEIKRLSTEHSSVSEYHPADGYAFSSNIYTRGSHLDQGEAAVAFKPTSNRHIDRNYEPLKTQPKKYAKSKYDFVARNNSELSVLKDDILEILDDRKQWWKVRNASGDSGFVPNNILDIVRPPESGLGRADPPYTHTIQKQRMEYGPRPADTPPAPSPPPTPAPVPVPLPPSTPAPVPVSKVPANITRQNSSSSDSGGSIVRDSQRHKQLPVDRRKSQMEEVQDELIHRLTIGRSAAQKKFHVPRQNVPVINITYDSTPEDVKTWLQSKGFNPVTVNSLGVLNGAQLFSLNKDELRTVCPEGARVYSQITVQKAALEDSSGSSELQEIMRRRQEKISAAASDSGVESFDEGSSH

SEQ ID NO: 11569 - protein, 562 aa, Homo sapiens
MMAARIDRDVQILNHILDDIEFFITKLQKAAEAFSELSKRKKNKKGKRKGPGEGVLTLRAKPPPPDEFLDCFQKFKHGFNLLAKLKSHIQNPSAADLVHFLFTPLNMVVQATGGPELASSVLSPLLNKDTIDFLNYTVNGDERQLWMSLGGTWMKARAEWPKEQFIPPYVPRFRNGWEPPMLNFMGATMEQDLYQLAESVANVAEHQRKQEIKRLSTEHSSVSEYHPADGYAFSSNIYTRGSHLDQGEAAVAFKPTSNRHIDRNYEPLKTQPKKYAKSKYDFVARNNSELSVLKDDILEILDDRKQWWKVRNASGDSGFVPNNILDIVRPPESGLGRADPPYTHTIQKQRMEYGPRPADTPPAPSPPPTPAPVPVPLPPSTPAPVPVSKVPANITRQNSSSSDSGGSIVRDSQRHKQLPVDRRKSQMEEVQDELIHRLTIGRSAAQKKFHVPRQNVPVINITYDSTPEDVKTWLQSKGFNPVTVNSLGVLNGAQLFSLNKDELRTVCPEGARVYSQITVQKAALEDSSGSSELQEIMRRRQEKISAAASDSGVESFDEGSSH

SEQ ID NO: 11570 - protein, 1225 aa, Homo sapiens
MFARKPPGAAPLGAMPVPDQPSSASEKTSSLSPGLNTSNGDGSETETTSAILASVKEQELQFERLTRELEAERQIVASQLERCKLGSETGSMSSMSSAEEQFQWQSQDGQKDIEDELTTGLELVDSCIRSLQESGILDPQDYSTGERPSLLSQSALQLNSKPEGSFQYPASYHSNQTLALGETTPSQLPARGTQARATGQSFSQGTTSRAGHLAGPEPAPPPPPPPREPFAPSLGSAFHLPDAPPAAAAAALYYSSSTLPAPPRGGSPLAAPQGGSPTKLQRGGSAPEGATYAAPRGSSPKQSPSRLAKSYSTSSPINIVVSSAGLSPIRVTSPPTVQSTISSSPIHQLSSTIGTYATLSPTKRLVHASEQYSKHSQELYATATLQRPGSLAAGSRASYSSQHGHLGPELRALQSPEHHIDPIYEDRVYQKPPMRSLSQSQGDPLPPAHTGTYRTSTAPSSPGVDSVPLQRTGSQHGPQNAAAATFQRASYAAGPASNYADPYRQLQYCPSVESPYSKSGPALPPEGTLARSPSIDSIQKDPREFGWRDPELPEVIQMLQHQFPSVQSNAAAYLQHLCFGDNKIKAEIRRQGGIQLLVDLLDHRMTEVHRSACGALRNLVYGKANDDNKIALKNCGGIPALVRLLRKTTDLEIRELVTGVLWNLSSCDALKMPIIQDALAVLTNAVIIPHSGWENSPLQDDRKIQLHSSQVLRNATGCLRNVSSAGEEARRRMRECDGLTDALLYVIQSALGSSEIDSKTVENCVCILRNLSYRLAAETSQGQHMGTDELDGLLCGEANGKDAESSGCWGKKKKKKKSQDQWDGVGPLPDCAEPPKGIQMLWHPSIVKPYLTLLSECSNPDTLEGAAGALQNLAAGSWKWSVYIRAAVRKEKGLPILVELLRIDNDRVVCAVATALRNMALDVRNKELIGKYAMRDLVHRLPGGNNSNNTASKAMSDDTVTAVCCTLHEVITKNMENAKALRDAGGIEKLVGISKSKGDKHSPKVVKAASQVLNSMWQYRDLRSLYKKDGWSQYHFVASSSTIERDRQRPYSSSRTPSISPVRVSPNNRSASAPASPREMISLKERKTDYECTGSNATYHGAKGEHTSRKDAMTAQNTGISTLYRNSYGAPAEDIKHNQVSAQPVPQEPSRKDYETYQPFQNSTRNYDESFFEDQVHHRPPASEYTMHLGLKSTGNYVDFYSAARPYSELNYETSHYPASPDSWV

SEQ ID NO: 11571 - protein, 1167 aa, Homo sapiens
MFARKPPGAAPLGAMPVPDQPSSASEKTSSLSPGLNTSNGDGSETETTSAILASVKEQELQFERLTRELEAERQIVASQLERCKLGSETGSMSSMSSAEEQFQWQSQDGQKDIEDELTTGLELVDSCIRSLQESGILDPQDYSTGERPSLLSQSALQLNSKPEGSFQYPASYHSNQTLALGETTPSQLPARGTQARATGQSFSQGTTSRAGHLAGPEPAPPPPPPPREPFAPSLGSAFHLPDAPPAAAAAALYYSSSTLPAPPRGGSPLAAPQGGSPTKLQRGGSAPEGATYAAPRGSSPKQSPSRLAKSYSTSSPINIVVSSAGLSPIRVTSPPTVQSTISSSPIHQLSSTIGTYATLSPTKRLVHASEQYSKHSQELYATATLQRPGSLAAGSRASYSSQHGHLGPELRALQSPEHHIDPIYEDRVYQKPPMRSLSQSQGDPLPPAHTGTYRTSTAPSSPGVDSVPLQRTGSQHGPQNAAAATFQRASYAAGPASNYADPYRQLQYCPSVESPYSKSGPALPPEGTLARSPSIDSIQKDPREFGWRDPELPEVIQMLQHQFPSVQSNAAAYLQHLCFGDNKIKAEIRRQGGIQLLVDLLDHRMTEVHRSACGALRNLVYGKANDDNKIALKNCGGIPALVRLLRKTTDLEIRELVTGVLWNLSSCDALKMPIIQDALAVLTNAVIIPHSGWENSPLQDDRKIQLHSSQVLRNATGCLRNVSSAGEEARRRMRECDGLTDALLYVIQSALGSSEIDSKTVENCVCILRNLSYRLAAETSQGQHMGTDELDGLLCGEANGKDAESSGCWGKKKKKKKSQDQWSVYIRAAVRKEKGLPILVELLRIDNDRVVCAVATALRNMALDVRNKELIGKYAMRDLVHRLPGGNNSNNTASKAMSDDTVTAVCCTLHEVITKNMENAKALRDAGGIEKLVGISKSKGDKHSPKVVKAASQVLNSMWQYRDLRSLYKKDGWSQYHFVASSSTIERDRQRPYSSSRTPSISPVRVSPNNRSASAPASPREMISLKERKTDYECTGSNATYHGAKGEHTSRKDAMTAQNTGISTLYRNSYGAPAEDIKHNQVSAQPVPQEPSRKDYETYQPFQNSTRNYDESFFEDQVHHRPPASEYTMHLGLKSTGNYVDFYSAARPYSELNYETSHYPASPDSWV

SEQ ID NO: 11572 - protein, 573 aa, Homo sapiens
MTPESRDTTDLSPGGTQEMEGIVIVKVEEEDEEDHFQKERNKVESSPQVLSRSTTMNERALLSSYLVAYRVAKEKMAHTAAEKIILPACMDMVRTIFDDKSADKLRTIPLSDNTISRRICTIAKHLEAMLITRLQSGIDFAIQLDESTDIASCPTLLVYVRYVWQDDFVEDLLCCLNLNSHITGLDLFTELENCLLGQYKLNWKHCKGISSDGTANMTGKHSRLTEKLLEATHNNAVWNHCFIHREALVSKEISPSLMDVLKNAVKTVNFIKGSSLNSRLLEIFCSEIGVNHTHLLFHTEVRWLSQGKVLSRVYELRNEIYIFLVEKQSHLANIFEDDIWVTKLAYLSDIFGILNELSLKMQGKNNDIFQYLEHILGFQKTLLLWQARLKSNRPSYYMFPTLLQHIEENIINEDCLKEIKLEILLHLTSLSQTFNYYFPEEKFESLKENIWMKDPFAFQNPESIIELNLEPEEENELLQLSSSFTLKNYYKILSLSAFWIKIKDDFPLLSRKSILLLLPFTTTYLCELGFSILTRLKTKKRNRLNSAPDMRVALSSCVPDWKELMNRQAHPSH

SEQ ID NO: 11573 - protein, 140 aa, Homo sapiens
MQTTWQPGCSYPTSWLSSQESFSKMRTGWRGAIPLRWRNRARNREKPHSPRAVSSPATHSLPPSNPCRLTPTLSSARPREGSCPSKCSCPGGNWSNTALSAELMWAEGRFSGGCLPVYMRQNINPGCQEQWEGEERSRWL

SEQ ID NO: 11574 - protein, 302 aa, Homo sapiens
MALLITPAGVATVNRHSTIPSDTHTSREKPRFHKPCRNDLESLLSEGRLDTSVQTPCPQHPHTQLSCEPQPLEHSSCLSTCLAGCFLPVPSSPHTHPLLPGSRWLPPPLALLMGTLSPGLAVKPSWVPRFPLLARQSPATSVGMPLSAATQPGSVGRLHFPKLRSSSPFSGHSDENKATGQGRENRDQPQRPSHLCECPEAAKQSATNGVAETNRSVFPLGSEARSLSLRRQESQPHSGSSRRESVSCSPSFWCCWQPLAFLTCGCAAPISVPGVTRPSPRPCCVSPPLVRLQSLGLGPTQI

SEQ ID NO: 11575 - protein, 360 aa, Homo sapiens
MEDFNMESDSFEDFWKGEDLSNYSYSSTLPPFLLDAAPCEPESLEINKYFVVIIYALVFLLSLLGNSLVMLVILYSRVGRSVTDVYLLNLALADLLFALTLPIWAASKVNGWIFGTFLCKVVSLLKEVNFYSGILLLACISVDRYLAIVHATRTLTQKRYLVKFICLSIWGLSLLLALPVLLFRRTVYSSNVSPACYEDMGNNTANWRMLLRILPQSFGFIVPLLIMLFCYGFTLRTLFKAHMGQKHRAMRVIFAVVLIFLLCWLPYNLVLLADTLMRTQVIQETCERRNHIDRALDATEILGILHSCLNPLIYAFIGQKFRHGLLKILAIHGLISKDSLPKDSRPSFVGSSSGHTSTTL

SEQ ID NO: 11576 - protein, 402 aa, Homo sapiens
MEAHEIIEEPHITMDAEKHPPSKDPSAEDLQENHISESFLKPSTSETPLEPHTSESPLVPSPSQIPLEAHSPETHQEPSISETPSETPTYEASLDSPISVVPEKHLTLPPQSRDYVCLSSSDTLKEDLSSESSSNEVPWTRRSTHLSESESLPEHCLSGPSSQVQVDTTEKQEEEAGEVEKGVDASDSTAHTAQPGHQLGNTARPVFPARQTELVEVAKAMHREEFGAQVNNLFQWEKDAALNAIQTGLYIGWRCPHYLWDCFRIGDESRCFCGHLLREHRIISDISVPCKVSQCRCFMFCFIPSRPEEVGEFWLKRRATFDPKAWRAQCRCKHSHEEHAATGPHPCRHHGCCCGCFESNFLCAACDRRWEEHETFFDTQKTRQRGGRPRGTDTVSNWHRPL

SEQ ID NO: 11577 - protein, 156 aa, Homo sapiens
MGLYIGWRCPHYLWDCFRIGDESRCFCGHLLREHRIISDISVPCKVSQCRCFMFCFIPSRPEEVGEFWLKRRATFDPKAWRAQCRCKHSHEEHAATGPHPCRHHGCCCGCFESNFLCAACDRRWEEHETFFDTQKTRQRGGRPRGTDTVSNWHRPL

SEQ ID NO: 11578 - protein, 340 aa, Homo sapiens
MEAHEIIEEPHITMDAEKHPPSKDPSAEDLQENHISESFLKPSTSETPLEPHTSESPLVPSPSQIPLEAHSPETHQEPSISETPSETPTYEASLDSPISVVPEKHLTLPPQSRDYVCLSSSDTLKEDLSSESSSNEVPWTRRSTHLSESESLPEHCLSGPSSQVQVDTTEKQEEEAGEVEKGVDASDSTAHTAQPGHQLGNTARPVFPARQTELVEVAKAMHREEFGAQVNNLFQWEKDAALNAIQTDRIRNSSSGILAPAHLHCDCLYLALSTKPPWCKGALALQAISIKTEEAKPKATSRQALDPDRLWVSTLAGAAPITYGTVSGLGMSPDAFVDTC

SEQ ID NO: 11579 - protein, 190 aa, Homo sapiens
MNPQIRNPMKAMYPGTFYFQFKNLWEANDRNETWLCFTVEGIKRRSVVSWKTGVFRNQVDSETHCHAERCFLSWFCDDILSPNTKYQVTWYTSWSPCPDCAGEVAEFLARHSNVNLTIFTARLYYFQYPCYQEGLRSLSQEGVAVEIMDYEDFKYCWENFVYNDNEPFKPWKGLKTNFRLLKRRLRESLQ

SEQ ID NO: 11580 - protein, 384 aa, Homo sapiens
MKPHFRNTVERMYRDTFSYNFYNRPILSRRNTVWLCYEVKTKGPSRPPLDAKIFRGQVYSELKYHPEMRFFHWFSKWRKLHRDQEYEVTWYISWSPCTKCTRDMATFLAEDPKVTLTIFVARLYYFWDPDYQEALRSLCQKRDGPRATMKIMNYDEFQHCWSKFVYSQRELFEPWNNLPKYYILLHIMLGEILRHSMDPPTFTFNFNNEPWVRGRHETYLCYEVERMHNDTWVLLNQRRGFLCNQAPHKHGFLEGRHAELCFLDVIPFWKLDLDQDYRVTCFTSWSPCFSCAQEMAKFISKNKHVSLCIFTARIYDDQGRCQEGLRTLAEAGAKISIMTYSEFKHCWDTFVDHQGCPFQPWDGLDEHSQDLSGRLRAILQNQEN

SEQ ID NO: 11581 - protein, 79 aa, Homo sapiens
MKPHFRNTVERMYRDTFSYNFYNRPILSRRNTVWLCYEVKTKGPSRPPLDAKIFRGQVPPGLQSLCRQELSQLGKQTTH

SEQ ID NO: 11582 - protein, 381 aa, Homo sapiens
MAPGEKESGEGPAKSALRKIRTATLVISLARGWQQWANENSIRQAQEPTGWLPGGTQDSPQAPKPITPPTSHQKAQSAPKSPPRLPEGHGDGQSSEKAPEVSHIKKKEVSKTVVSKTYERGGDVSHLSHRYERDAGVLEPGQPENDIDRILHSHGSPTRRRKCANLVSELTKGWRVMEQEEPTWRSDSVDTEDSGYGGEAEERPEQDGVQVAVVRIKRPLPSQVNRFTEKLNCKAQQKYSPVGNLKGRWQQWADEHIQSQKLNPFSEEFDYELAMSTRLHKGDEGYGRPKEGTKTAERAKRAEEHIYREMMDMCFIICTMARHRRDGKIQVTFGDLFDRYVRISDKVVGILMRARKHGLVDFEGEMLWQGRDDHVVITLLK

SEQ ID NO: 11583 - protein, 152 aa, Homo sapiens
MNEQSEKNNSIQERHTDHSFPEKNCQIGQKQLQQIERQLKCLAFRNPGPQVADFNPETRQQKKKARMSKMNEYFSTKYKIMRKYDKSGRLICNDADLCDCLEKNCLGCFYPCPKCNSNKCGPECRCNRRWVYDAIVTESGEVISTLPFNVPD

SEQ ID NO: 11584 - protein, 1038 aa, Homo sapiens
MTSSLQRPWRVPWLPWTILLVSTAAASQNQERLCAFKDPYQQDLGIGESRISHENGTILCSKGSTCYGLWEKSKGDINLVKQGCWSHIGDPQECHYEECVVTTTPPSIQNGTYRFCCCSTDLCNVNFTENFPPPDTTPLSPPHSFNRDETIIIALASVSVLAVLIVALCFGYRMLTGDRKQGLHSMNMMEAAASEPSLDLDNLKLLELIGRGRYGAVYKGSLDERPVAVKVFSFANRQNFINEKNIYRVPLMEHDNIARFIVGDERVTADGRMEYLLVMEYYPNGSLCKYLSLHTSDWVSSCRLAHSVTRGLAYLHTELPRGDHYKPAISHRDLNSRNVLVKNDGTCVISDFGLSMRLTGNRLVRPGEEDNAAISEVGTIRYMAPEVLEGAVNLRDCESALKQVDMYALGLIYWEIFMRCTDLFPGESVPEYQMAFQTEVGNHPTFEDMQVLVSREKQRPKFPEAWKENSLAVRSLKETIEDCWDQDAEARLTAQCAEERMAELMMIWERNKSVSPTVNPMSTAMQNERNLSHNRRVPKIGPYPDYSSSSYIEDSIHHTDSIVKNISSEHSMSSTPLTIGEKNRNSINYERQQAQARIPSPETSVTSLSTNTTTTNTTGLTPSTGMTTISEMPYPDETNLHTTNVAQSIGPTPVCLQLTEEDLETNKLDPKEVDKNLKESSDENLMEHSLKQFSGPDPLSSTSSSLLYPLIKLAVEATGQQDFTQTANGQACLIPDVLPTQIYPLPKQQNLPKRPTSLPLNTKNSTKEPRLKFGSKHKSNLKQVETGVAKMNTINAAEPHVVTVTMNGVAGRNHSVNSHAATTQYANGTVLSGQTTNIVTHRAQEMLQNQFIGEDTRLNINSSPDEHEPLLRREQQAGHDEGVLDRLVDRRERPLEGGRTNSNNNNSNPCSEQDVLAQGVPSTAADPGPSKPRRAQRPNSLDLSATNVLDGSSIQIGESTQDGKSGSGEKIKKRVKTPYSLKRWRPSTWVISTESLDCEVNNNGSNRAVHSKSSTAVYLAEGGTATTMVSKDIGMNCL

SEQ ID NO: 11585 - protein, 530 aa, Homo sapiens
MTSSLQRPWRVPWLPWTILLVSTAAASQNQERLCAFKDPYQQDLGIGESRISHENGTILCSKGSTCYGLWEKSKGDINLVKQGCWSHIGDPQECHYEECVVTTTPPSIQNGTYRFCCCSTDLCNVNFTENFPPPDTTPLSPPHSFNRDETIIIALASVSVLAVLIVALCFGYRMLTGDRKQGLHSMNMMEAAASEPSLDLDNLKLLELIGRGRYGAVYKGSLDERPVAVKVFSFANRQNFINEKNIYRVPLMEHDNIARFIVGDERVTADGRMEYLLVMEYYPNGSLCKYLSLHTSDWVSSCRLAHSVTRGLAYLHTELPRGDHYKPAISHRDLNSRNVLVKNDGTCVISDFGLSMRLTGNRLVRPGEEDNAAISEVGTIRYMAPEVLEGAVNLRDCESALKQVDMYALGLIYWEIFMRCTDLFPGESVPEYQMAFQTEVGNHPTFEDMQVLVSREKQRPKFPEAWKENSLAVRSLKETIEDCWDQDAEARLTAQCAEERMAELMMIWERNKSVSPTVNPMSTAMQNERR

SEQ ID NO: 11586 - protein, 384 aa, Homo sapiens
MAAVQMDPELAKRLFFEGATVVILNMPKGTEFGIDYNSWEVGPKFRGVKMIPPGIHFLHYSSVDKANPKEVGPRMGFFLSLHQRGLTVLRWSTLREEVDLSPAPESEVEAMRANLQELDQFLGPYPYATLKKWISLTNFISEATVEKLQPENRQICAFSDVLPVLSMKHTKDRVGQNLPRCGIECKSYQEGLARLPEMKPRAGTEIRFSELPTQMFPEGATPAEITKHSMDLSYALETVLNKQFPSSPQDVLGELQFAFVCFLLGNVYEAFEHWKRLLNLLCRSEAAMMKHHTLYINLISILYHQLGEIPADFFVDIVSQDNFLTSTLQVFFSSACSIAVDATLRKKAEKFQAHLTKKFRWDFAAEPEDCAPVVVELPEGIEMG

SEQ ID NO: 11587 - protein, 159 aa, Homo sapiens
MEQDWQPGEEVTPGPEPCSKGQAPLYPIVHVTELKHTDPNFPSNSNAVGTSSGWNRIGTGCSHTWDWRFSCTQQALLPLLGAWEWSIDTEAGGGRREQSQKPCSNGGPAAAGEGRVLPSPCFPWSTCQAAIHKVCRWQGCTRPALLAPSLATLKEHSYP

SEQ ID NO: 11588 - protein, 651 aa, Homo sapiens
MARGSAVAWAALGPLLWGCALGLQGGMLYPQESPSRECKELDGLWSFRADFSDNRRRGFEEQWYRRPLWESGPTVDMPVPSSFNDISQDWRLRHFVGWVWYEREVILPERWTQDLRTRVVLRIGSAHSYAIVWVNGVDTLEHEGGYLPFEADISNLVQVGPLPSRLRITIAINNTLTPTTLPPGTIQYLTDTSKYPKGYFVQNTYFDFFNYAGLQRSVLLYTTPTTYIDDITVTTSVEQDSGLVNYQISVKGSNLFKLEVRLLDAENKVVANGTGTQGQLKVPGVSLWWPYLMHERPAYLYSLEVQLTAQTSLGPVSDFYTLPVGIRTVAVTKSQFLINGKPFYFHGVNKHEDADIRGKGFDWPLLVKDFNLLRWLGANAFRTSHYPYAEEVMQMCDRYGIVVIDECPGVGLALPQFFNNVSLHHHMQVMEEVVRRDKNHPAVVMWSVANEPASHLESAGYYLKMVIAHTKSLDPSRPVTFVSNSNYAADKGAPYVDVICLNSYYSWYHDYGHLELIQLQLATQFENWYKKYQKPIIQSEYGAETIAGFHQDPPLMFTEEYQKSLLEQYHLGLDQKRRKYVVGELIWNFADFMTEQSPTRVLGNKKGIFTRQRQPKSAAFLLRERYWKIANETRYPHSVAKSQCLENSLFT

SEQ ID NO: 11589 - protein, 600 aa, Homo sapiens
MARGSAVAWAALGPLLWGCALGLQGGMLYPQESPSRECKELDGLWSFRADFSDNRRRGFEEQWYRRPLWESGPTVDMPVPSSFNDISQDWRLRHFVGWVWYEREVILPERWTQDLRTRVVLRIGSAHSYAIVWVNGVDTLEHEGGYLPFEADISNLVQVGPLPSRLRITIAINNTLTPTTLPPGTIQYLTDTSKYPKGYFVQNTYFDFFNYAGLQRSVLLYTTPTTYIDDITVTTSVEQDSGLVNYQISVKGSNLFKLEVRLLDAENKVVANGTGTQGQLKVPGVSLWWPYLMHERPAYLYSLEIRGKGFDWPLLVKDFNLLRWLGANAFRTSHYPYAEEVMQMCDRYGIVVIDECPGVGLALPQFFNNVSLHHHMQVMEEVVRRDKNHPAVVMWSVANEPASHLESAGYYLKMVIAHTKSLDPSRPVTFVSNSNYAADKGAPYVDVICLNSYYSWYHDYGHLELIQLQLATQFENWYKKYQKPIIQSEYGAETIAGFHQDPPLMFTEEYQKSLLEQYHLGLDQKRRKYVVGELIWNFADFMTEQSPTRVLGNKKGIFTRQRQPKSAAFLLRERYWKIANETRYPHSVAKSQCLENSLFT

SEQ ID NO: 11590 - protein, 505 aa, Homo sapiens
MARGSAVAWAALGPLLWGCALGLQGGMLYPQESPSRECKELDGLWSFRADFSDNRRRGFEEQWYRRPLWESGPTVDMPVPSSFNDISQDWRLRHFVGWVWYEREVILPERWTQDLRTRVVLRIGSAHSYAIVWVNGVDTLEHEGGYLPFEADISNLVQVQLTAQTSLGPVSDFYTLPVGIRTVAVTKSQFLINGKPFYFHGVNKHEDADIRGKGFDWPLLVKDFNLLRWLGANAFRTSHYPYAEEVMQMCDRYGIVVIDECPGVGLALPQFFNNVSLHHHMQVMEEVVRRDKNHPAVVMWSVANEPASHLESAGYYLKMVIAHTKSLDPSRPVTFVSNSNYAADKGAPYVDVICLNSYYSWYHDYGHLELIQLQLATQFENWYKKYQKPIIQSEYGAETIAGFHQDPPLMFTEEYQKSLLEQYHLGLDQKRRKYVVGELIWNFADFMTEQSPTRVLGNKKGIFTRQRQPKSAAFLLRERYWKIANETRYPHSVAKSQCLENSLFT

SEQ ID NO: 11591 - protein, 479 aa, Homo sapiens
MMDVNSSGRPDLYGHLRSFLLPEVGRGLPDLSPDGGADPVAGSWAPHLLSEVTASPAPTWDAPPDNASGCGEQINYGRVEKVVIGSILTLITLLTIAGNCLVVISVCFVKKLRQPSNYLIVSLALADLSVAVAVMPFVSVTDLIGGKWIFGHFFCNVFIAMDVMCCTASIMTLCVISIDRYLGITRPLTYPVRQNGKCMAKMILSVWLLSASITLPPLFGWAQNVNDDKVCLISQDFGYTIYSTAVAFYIPMSVMLFMYYQIYKAARKSAAKHKFPGFPRVEPDSVIALNGIVKLQKEVEECANLSRLLKHERKNISIFKREQKAATTLGIIVGAFTVCWLPFFLLSTARPFICGTSCSCIPLWVERTFLWLGYANSLINPFIYAFFNRDLRTTYRSLLQCQYRNINRKLSAAGMHEALKLAERPERPEFVLRACTRRVLLRPEKRPPVSVWVLQSPDHHNWLADKMLTTVEKKVMIHD

SEQ ID NO: 11592 - protein, 445 aa, Homo sapiens
MMDVNSSGRPDLYGHLRSFLLPEVGRGLPDLSPDGGADPVAGSWAPHLLSEVTASPAPTWDAPPDNASGCGEQINYGRVEKVVIGSILTLITLLTIAGNCLVVISVCFVKKLRQPSNYLIVSLALADLSVAVAVMPFVSVTDLIGGKWIFGHFFCNVFIAMDVMCCTASIMTLCVISIDRYLGITRPLTYPVRQNGKCMAKMILSVWLLSASITLPPLFGWAQNVNDDKVCLISQDFGYTIYSTAVAFYIPMSVMLFMYYQIYKAARKSAAKHKFPGFPRVEPDSVIALNGIVKLQKEVEECANLSRLLKHERKNISIFKREQKAATTLGIIVGAFTVCWLPFFLLSTARPFICGTSCSCIPLWVERTFLWLGYANSLINPFIYAFFNRDLRTTYRSLLQCQYRNINRKLSAAGMHEALKLAERPERPEFVLQNADYCRKKGHDS

SEQ ID NO: 11593 - protein, 432 aa, Homo sapiens
MMDVNSSGRPDLYGHLRSFLLPEVGRGLPDLSPDGGADPVAGSWAPHLLSEVTASPAPTWDAPPDNASGCGEQINYGRVEKVVIGSILTLITLLTIAGNCLVVISVCFVKKLRQPSNYLIVSLALADLSVAVAVMPFVSVTDLIGGKWIFGHFFCNVFIAMDVMCCTASIMTLCVISIDRYLGITRPLTYPVRQNGKCMAKMILSVWLLSASITLPPLFGWAQNVNDDKVCLISQDFGYTIYSTAVAFYIPMSVMLFMYYQIYKAARKSAAKHKFPGFPRVEPDSVIALNGIVKLQKEVEECANLSRLLKHERKNISIFKREQKAATTLGIIVGAFTVCWLPFFLLSTARPFICGTSCSCIPLWVERTFLWLGYANSLINPFIYAFFNRDLRTTYRSLLQCQYRNINRKLSAAGMHEALKLAERPERPEFVL

SEQ ID NO: 11594 - protein, 212 aa, Homo sapiens
MVSRMVSTMLSGLLFWLASGWTPAFAYSPRTPDRVSEADIQRLLHGVMEQLGIARPRVEYPAHQAMNLVGPQSIEGGAHEGLQHLGPFGNIPNIVAELTGDNIPKDFSEDQGYPDPPNPCPVGKTADDGCLENTPDTAEFSREFQLHQHLFDPEHDYPGLGKWNKKLLYEKMKGGERRKRRSVNPYLQGQRLDNVVAKKSVPHFSDEDKDPE

SEQ ID NO: 11595 - protein, 211 aa, Homo sapiens
MVSRMVSTMLSGLLFWLASGWTPAFAYSPRTPDRVSEADIQRLLHGVMEQLGIARPRVEYPAHQAMNLVGPQSIEGGAHEGLQHLGPFGNIPNIVAELTGDNIPKDFSEDQGYPDPPNPCPVGKTDDGCLENTPDTAEFSREFQLHQHLFDPEHDYPGLGKWNKKLLYEKMKGGERRKRRSVNPYLQGQRLDNVVAKKSVPHFSDEDKDPE

SEQ ID NO: 11596 - protein, 1426 aa, Homo sapiens
MHSSNPKVRSSPSGNTQSSPKSKQEVMVRPPTVMSPSGNPQLDSKFSNQGKQGGSASQSQPSPCDSKSGGHTPKALPGPGGSMGLKNGAGNGAKGKGKRERSISADSFDQRDPGTPNDDSDIKECNSADHIKSQDSQHTPHSMTPSNATAPRSSTPSHGQTTATEPTPAQKTPAKVVYVFSTEMANKAAEAVLKGQVETIVSFHIQNISNNKTERSTAPLNTQISALRNDPKPLPQQPPAPANQDQNSSQNTRLQPTPPIPAPAPKPAAPPRPLDRESPGVENKLIPSVGSPASSTPLPPDGTGPNSTPNNRAVTPVSQGSNSSSADPKAPPPPPVSSGEPPTLGENPDGLSQEQLEHRERSLQTLRDIQRMLFPDEKEFTGAQSGGPQQNPGVLDGPQKKPEGPIQAMMAQSQSLGKGPGPRTDVGAPFGPQGHRDVPFSPDEMVPPSMNSQSGTIGPDHLDHMTPEQIAWLKLQQEFYEEKRRKQEQVVVQQCSLQDMMVHQHGPRGVVRGPPPPYQMTPSEGWAPGGTEPFSDGINMPHSLPPRGMAPHPNMPGSQMRLPGFAGMINSEMEGPNVPNPASRPGLSGVSWPDDVPKIPDGRNFPPGQGIFSGPGRGERFPNPQGLSEEMFQQQLAEKQLGLPPGMAMEGIRPSMEMNRMIPGSQRHMEPGNNPIFPRIPVEGPLSPSRGDFPKGIPPQMGPGRELEFGMVPSGMKGDVNLNVNMGSNSQMIPQKMREAGAGPEEMLKLRPGGSDMLPAQQKMVPLPFGEHPQQEYGMGPRPFLPMSQGPGSNSGLRNLREPIGPDQRTNSRLSHMPPLPLNPSSNPTSLNTAPPVQRGLGRKPLDISVAGSQVHSPGINPLKSPTMHQVQSPMLGSPSGNLKSPQTPSQLAGMLAGPAAAASIKSPPVLGSAAASPVHLKSPSLPAPSPGWTSSPKPPLQSPGIPPNHKAPLTMASPAMLGNVESGGPPPPTASQPASVNIPGSLPSSTPYTMPPEPTLSQNPLSIMMSRMSKFAMPSSTPLYHDAIKTVASSDDDSPPARSPNLPSMNNMPGMGINTQNPRISGPNPVVPMPTLSPMGMTQPLSHSNQMPSPNAVGPNIPPHGVPMGPGLMSHNPIMGHGSQEPPMVPQGRMGFPQGFPPVQSPPQQVPFPHNGPSGGQGSFPGGMGFPGEGPLGRPSNLPQSSADAALCKPGGPGGPDSFTVLGNSMPSVFTDPDLQEVIRPGATGIPEFDLSRIIPSEKPSQTLQYFPRGEVPGRKQPQGPGPGFSHMQGMMGEQAPRMGLALPGMGGPGPVGTPDIPLGTAPSMPGHNPMRPPAFLQQGMMGPHHRMMSPAQSTMPGQPTLMSNPAAAVGMIPGKDRGPAGLYTHPGPVGSPGMMMSMQGMMGPQQNIMIPPQMRPRGMAADVGMGGFSQGPGNPGNMMF

SEQ ID NO: 11597 - protein, 434 aa, Homo sapiens
MESESESGAAADTPPLETLSFHGDEEIIEVVELDPGPPDPDDLAQEMEDVDFEEEEEEEGNEEGWVLEPQEGVVGSMEGPDDSEVTFALHSASVFCVSLDPKTNTLAVTGGEDDKAFVWRLSDGELLFECAGHKDSVTCAGFSHDSTLVATGDMSGLLKVWQVDTKEEVWSFEAGDLEWMEWHPRAPVLLAGTADGNTWMWKVPNGDCKTFQGPNCPATCGRVLPDGKRAVVGYEDGTIRIWDLKQGSPIHVLKGTEGHQGPLTCVAANQDGSLILTGSVDCQAKLVSATTGKVVGVFRPETVASQPSLGEGEESESNSVESLGFCSVMPLAAVGYLDGTLAIYDLATQTLRHQCQHQSGIVQLLWEAGTAVVYTCSLDGIVRLWDARTGRLLTDYRGHTAEILDFALSKDASLVVTTSGDHKAKVFCVQRPDR

SEQ ID NO: 11598 - protein, 399 aa, Homo sapiens
MGRKSLYLLIVGILIAYYIYTPLPDNVEEPWRMMWINAHLKTIQNLATFVELLGLHHFMDSFKVVGSFDEVPPTSDENVTVTETKFNNILVRVYVPKRKSEALRRGLFYIHGGGWCVGSAALSGYDLLSRWTADRLDAVVVSTNYRLAPKYHFPIQFEDVYNALRWFLRKKVLAKYGVNPERIGISGDSAGGNLAAAVTQQLLDDPDVKIKLKIQSLIYPALQPLDVDLPSYQENSNFLFLSKSLMVRFWSEYFTTDRSLEKAMLSRQHVPVESSHLFKFVNWSSLLPERFIKGHVYNNPNYGSSELAKKYPGFLDVRAAPLLADDNKLRGLPLTYVITCQYDLLRDDGLMYVTRLRNTGVQVTHNHVEDGFHGAFSFLGLKISHRLINQYIEWLKENL

SEQ ID NO: 11599 - protein, 441 aa, Homo sapiens
MLSSVMAPLWACILVAAGILATDTHHPQDSALYHLSKQLLQKYHKEVRPVYNWTKATTVYLDLFVHAILDVDAENQILKTSVWYQEVWNDEFLSWNSSMFDEIREISLPLSAIWAPDIIINEFVDIERYPDLPYVYVNSSGTIENYKPIQVVSACSLETYAFPFDVQNCSLTFKSILHTVEDVDLAFLRSPEDIQHDKKAFLNDSEWELLSVSSTYSILQSSAGGFAQIQFNVVMRRHPLVYVVSLLIPSIFLMLVDLGSFYLPPNCRARIVFKTSVLVGYTVFRVNMSNQVPRSVGSTPLIGHFFTICMAFLVLSLAKSIVLVKFLHDEQRGGQEQPFLCLRGDTDADRPRVEPRAQRAVVTESSLYGEHLAQPGTLKEVWSQLQSISNYLQTQDQTDQQEAEWLVLLSRFDRLLFQSYLFMLGIYTITLCSLWALWGGV

SEQ ID NO: 11600 - protein, 430 aa, Homo sapiens
MIVYFPGILATDTHHPQDSALYHLSKQLLQKYHKEVRPVYNWTKATTVYLDLFVHAILDVDAENQILKTSVWYQEVWNDEFLSWNSSMFDEIREISLPLSAIWAPDIIINEFVDIERYPDLPYVYVNSSGTIENYKPIQVVSACSLETYAFPFDVQNCSLTFKSILHTVEDVDLAFLRSPEDIQHDKKAFLNDSEWELLSVSSTYSILQSSAGGFAQIQFNVVMRRHPLVYVVSLLIPSIFLMLVDLGSFYLPPNCRARIVFKTSVLVGYTVFRVNMSNQVPRSVGSTPLIGHFFTICMAFLVLSLAKSIVLVKFLHDEQRGGQEQPFLCLRGDTDADRPRVEPRAQRAVVTESSLYGEHLAQPGTLKEVWSQLQSISNYLQTQDQTDQQEAEWLVLLSRFDRLLFQSYLFMLGIYTITLCSLWALWGGV

SEQ ID NO: 11601 - protein, 574 aa, Homo sapiens
MCPRAARAPATLLLALGAVLWPAAGAWELTILHTNDVHSRLEQTSEDSSKCVNASRCMGGVARLFTKVQQIRRAEPNVLLLDAGDQYQGTIWFTVYKGAEVAHFMNALRYDAMALGNHEFDNGVEGLIEPLLKEAKFPILSANIKAKGPLASQISGLYLPYKVLPVGDEVVGIVGYTSKETPFLSNPGTNLVFEDEITALQPEVDKLKTLNVNKIIALGHSGFEMDKLIAQKVRGVDVVVGGHSNTFLYTGNPPSKEVPAGKYPFIVTSDDGRKVPVVQAYAFGKYLGYLKIEFDERGNVISSHGNPILLNSSIPEDPSIKADINKWRIKLDNYSTQELGKTIVYLDGSSQSCRFRECNMGNLICDAMINNNLRHTDEMFWNHVSMCILNGGGIRSPIDERNNGTITWENLAAVLPFGGTFDLVQLKGSTLKKAFEHSVHRYGQSTGEFLQVGGIHVVYDLSRKPGDRVVKLDVLCTKCRVPSYDPLKMDEVYKVILPNFLANGGDGFQMIKDELLRHDSGDQDINVVSTYISKMKVIYPAVEGRIKFSTGSHCHGSFSLIFLSLWAVIFVLYQ

SEQ ID NO: 11602 - protein, 524 aa, Homo sapiens
MCPRAARAPATLLLALGAVLWPAAGAWELTILHTNDVHSRLEQTSEDSSKCVNASRCMGGVARLFTKVQQIRRAEPNVLLLDAGDQYQGTIWFTVYKGAEVAHFMNALRYDAMALGNHEFDNGVEGLIEPLLKEAKFPILSANIKAKGPLASQISGLYLPYKVLPVGDEVVGIVGYTSKETPFLSNPGTNLVFEDEITALQPEVDKLKTLNVNKIIALGHSGFEMDKLIAQKVRGVDVVVGGHSNTFLYTGNPPSKEVPAGKYPFIVTSDDGRKVPVVQAYAFGKYLGYLKIEFDERGNVISSHGNPILLNSSIPEDPSIKADINKWRIKLDNYSTQELGKTIVYLDGSSQSCRFRECNMGNLICDAMINNNLRHTDEMFWNHVSMCILNGGGIRSPIDERNNGIHVVYDLSRKPGDRVVKLDVLCTKCRVPSYDPLKMDEVYKVILPNFLANGGDGFQMIKDELLRHDSGDQDINVVSTYISKMKVIYPAVEGRIKFSTGSHCHGSFSLIFLSLWAVIFVLYQ

SEQ ID NO: 11603 - protein, 203 aa, Homo sapiens
MACGATLKRTLDFDPLLSPASPKRRRCAPLSAPTSAAASPLSAAAATAASFSAAAASPQKYLRMEPSPFGDVSSRLTTEQILYNIKQEYKRMQKRRHLETSFQQTDPCCTSDAQPHAFLLSGPASPGTSSAASSPLKKEQPLFTLRQVGMICERLLKEREEKVREEYEEILNTKLAEQYDAFVKFTHDQIMRRYGEQPASYVS

SEQ ID NO: 11604 - protein, 920 aa, Homo sapiens
MGRSNSRSHSSRSKSRSQSSSRSRSRSHSRKKRYSSRSRSRTYSRSRSRDRMYSRDYRRDYRNNRGMRRPYGYRGRGRGYYQGGGGRYHRGGYRPVWNRRHSRSPRRGRSRSRSPKRRSVSSQRSRSRSRRSYRSSRSPRSSSSRSSSPYSKSPVSKRRGSQEKQTKKAEGEPQEESPLKSKSQEEPKDTFEHDPSESIDEFNKSSATSGDIWPGLSAYDNSPRSPHSPSPIATPPSQSSSCSDAPMLSTVHSAKNTPSQHSHSIQHSPERSGSGSVGNGSSRYSPSQNSPIHHIPSRRSPAKTIAPQNAPRDESRGRSSFYPDGGDQETAKTGKFLKRFTDEESRVFLLDRGNTRDKEASKEKGSEKGRAEGEWEDQEALDYFSDKESGKQKFNDSEGDDTEETEDYRQFRKSVLADQGKSFATASHRNTEEEGLKYKSKVSLKGNRESDGFREEKNYKLKETGYVVERPSTTKDKHKEEDKNSERITVKKETQSPEQVKSEKLKDLFDYSPPLHKNLDAREKSTFREESPLRIKMIASDSHRPEVKLKMAPVPLDDSNRPASLTKDRLLASTLVHSVKKEQEFRSIFDHIKLPQASKSTSESFIQHIVSLVHHVKEQYFKSAAMTLNERFTSYQKATEEHSTRQKSPEIHRRIDISPSTLRKHTRLAGEERVFKEENQKGDKKLRCDSADLRHDIDRRRKERSKERGDSKGSRESSGSRKQEKTPKDYKEYKSYKDDSKHKREQDHSRSSSSSASPSSPSSREEKESKKEREEEFKTHHEMKEYSGFAGVSRPRGTFFRIRGRGRARGVFAGTNTGPNNSNTTFQKRPKEEEWDPEYTPKSKKYFLHDDRDDGVDYWAKRGRGRGTFQRGRGRFNFKKSGSSPKWTHDKYQGDGIVEDEEETMENNEEKKDRRKEEKE

SEQ ID NO: 11605 - protein, 918 aa, Homo sapiens
MGRSNSRSHSSRSKSRSQSSSRSRSRSHSRKKRYRSRSRTYSRSRSRDRMYSRDYRRDYRNNRGMRRPYGYRGRGRGYYQGGGGRYHRGGYRPVWNRRHSRSPRRGRSRSRSPKRRSVSSQRSRSRSRRSYRSSRSPRSSSSRSSSPYSKSPVSKRRGSQEKQTKKAEGEPQEESPLKSKSQEEPKDTFEHDPSESIDEFNKSSATSGDIWPGLSAYDNSPRSPHSPSPIATPPSQSSSCSDAPMLSTVHSAKNTPSQHSHSIQHSPERSGSGSVGNGSSRYSPSQNSPIHHIPSRRSPAKTIAPQNAPRDESRGRSSFYPDGGDQETAKTGKFLKRFTDEESRVFLLDRGNTRDKEASKEKGSEKGRAEGEWEDQEALDYFSDKESGKQKFNDSEGDDTEETEDYRQFRKSVLADQGKSFATASHRNTEEEGLKYKSKVSLKGNRESDGFREEKNYKLKETGYVVERPSTTKDKHKEEDKNSERITVKKETQSPEQVKSEKLKDLFDYSPPLHKNLDAREKSTFREESPLRIKMIASDSHRPEVKLKMAPVPLDDSNRPASLTKDRLLASTLVHSVKKEQEFRSIFDHIKLPQASKSTSESFIQHIVSLVHHVKEQYFKSAAMTLNERFTSYQKATEEHSTRQKSPEIHRRIDISPSTLRKHTRLAGEERVFKEENQKGDKKLRCDSADLRHDIDRRRKERSKERGDSKGSRESSGSRKQEKTPKDYKEYKSYKDDSKHKREQDHSRSSSSSASPSSPSSREEKESKKEREEEFKTHHEMKEYSGFAGVSRPRGTFFRIRGRGRARGVFAGTNTGPNNSNTTFQKRPKEEEWDPEYTPKSKKYFLHDDRDDGVDYWAKRGRGRGTFQRGRGRFNFKKSGSSPKWTHDKYQGDGIVEDEEETMENNEEKKDRRKEEKE

SEQ ID NO: 11606 - protein, 869 aa, Homo sapiens
MGRSNSRSHSSRSKSRSQSSSRSRSRSHSRKKRYRSRSRTYSRSRSRDRMYSRDYRRDYRNNRGMRRPYGYRGRGRGYYQGGGGRYHRGGYRPVWNRRHSRSPRRGRSRSRSPKRRSVSSQRSRSRSRRSYRSSRSPRSSSSRSSSPYSKSPVSKRRGSQEKQTKKAEGEPQEESPLKSKSQEEPKDTFEHDPSESIDEFNKSSATSGDIWPGLSAYDNSPRSPHSPSPIATPPSQSSSCSDAPMLSTVHSAKNTPSQHSHSIQHSPERSGSGSVGNGSSRYSPSQNSPIHHIPSRRSPAKTIAPQNAPRDESRGRSSFYPDGGDQETAKTGKFLKRFTDEESRVFLLDRGNTRDKEASKEKGSEKGRAEGEWEDQEALDYFSDKESGKQKFNDSEGDDTEETEDYRQFRKSVLADQGKSFATASHRNTEEEGLKYKSKVSLKGNRESDGFREEKNYKLKETGYVVERPSTTKDKHKEEDKNSERITVKKETQSPEQVKSEKLKDLFDYSPPLHKNLDAREKSTFREESPLRIKMIASDSHRPEVKLKMAPVPLDDSNRPASLTKDRLLASTLVHSVKKEQEFRSIFDHIKLPQASKSTSESFIQHIVSLVHHVKEQYFKSAAMTLNERFTSYQKATEEHSTRQKSPEIHRRIDISPSTLRKHTRLAGEERVFKEENQKGDKKLRCDSADLRHDIDRRRKERSKERGDSKGSRESSGSRKQEKTPKDYKEYKSYKDDSKHKREQDHSRSSSSSASPSSPSSREEKESKKEREEEFKTHHEMKEYSGFAGVSRPRGTFHDDRDDGVDYWAKRGRGRGTFQRGRGRFNFKKSGSSPKWTHDKYQGDGIVEDEEETMENNEEKKDRRKEEKE

SEQ ID NO: 11607 - protein, 747 aa, Homo sapiens
MGRSNSRSHSSRSKSRSQSSSRSRSRSHSRKKRYSSRSRSRTYSRSRSRDRMYSRDYRRDYRNNRGMRRPYGYRGRGRGYYQGGGGRYHRGGYRPVWNRRHSRSPRRGRSRSRSPKRRSVSSQRSRSRSRRSYRSSRSPRSSSSRSSSPYSKSPVSKRRGSQEKQTKKAEGEPQEESPLKSKSQEEPKDTFEHDPSESIDEFNKSSATSGDIWPGLSAYDNSPRSPHSPSPIATPPSQSSSCSDAPMLSTVHSAKNTPSQHSHSIQHSPERSGSGSVGNGSSRYSPSQNSPIHHIPSRRSPAKTIAPQNAPRDESRGRSSFYPDGGDQETAKTGKFLKSPPLHKNLDAREKSTFREESPLRIKMIASDSHRPEVKLKMAPVPLDDSNRPASLTKDRLLASTLVHSVKKEQEFRSIFDHIKLPQASKSTSESFIQHIVSLVHHVKEQYFKSAAMTLNERFTSYQKATEEHSTRQKSPEIHRRIDISPSTLRKHTRLAGEERVFKEENQKGDKKLRCDSADLRHDIDRRRKERSKERGDSKGSRESSGSRKQEKTPKDYKEYKSYKDDSKHKREQDHSRSSSSSASPSSPSSREEKESKKEREEEFKTHHEMKEYSGFAGVSRPRGTFFRIRGRGRARGVFAGTNTGPNNSNTTFQKRPKEEEWDPEYTPKSKKYFLHDDRDDGVDYWAKRGRGRGTFQRGRGRFNFKKSGSSPKWTHDKYQGDGIVEDEEETMENNEEKKDRRKEEKE

SEQ ID NO: 11608 - protein, 148 aa, Homo sapiens
MPVLKQLGPAQPKKRPDRGALSISAPLGDFRHTLHVGRGGDAFGDTSFLSRHGGGPPPEPRAPPAGAPRSPPPPAVPQSAAPSPADPLLSFHLDLGPSMLDAVLGVMDAARPEAAAAKPDAEPRPGTQPPQARCRPNADLELNDVIGL

SEQ ID NO: 11609 - protein, 253 aa, Homo sapiens
MGELPGSEGMWENCPLGWVKKKASGTLAPLDFLLQRKRLWLWASEPVRPQPQGIHRFREARRQFCRMRGSRLTGGRKGFGSSGLRFGRGGFSEEVMPQPVLKAMRCAEGAWWFSPDGPAGSAASIWPAEGAEGLPGQLGRDRLEVVYSVPDNVPGQNGSRRPLVCKITGKCLSVCSEENAKAGGCSAFPLLLSQLGARMTGREHAHKGPELTTPDSGLPRPPNPALAGFRALAQHSPPLGTSTPSAVLLSAAT

SEQ ID NO: 11610 - protein, 150 aa, Homo sapiens
MRCAEGAWWFSPDGPAGSAASIWPAEGAEGLPGQLGRDRLEVVYSVPDNVPGQNGSRRPLVCKITGKCLSVCSEENAKAGGCSAFPLLLSQLGARMTGREHAHKGPELTTPDSGLPRPPNPALAGFRALAQHSPPLGTSTPSAVLLSAAT

SEQ ID NO: 11611 - protein, 1439 aa, Homo sapiens
MASSETEIRWAEPGLGKGPQRRRWAWAEDKRDVDRSSSQSWEEERLFPNATSPELLEDFRLAQQHLPPLEWDPHPQPDGHQDSESGETSGEEAEAEDVDSPASSHEPLAWLPQQGRQLDMTEEEPDGTLGSLEVEEAGESSSRLGYEAGLSLEGHGNTSPMALGHGQARGWVASGEQASGDKLSEHSEVNPSVELSPARSWSSGTVSLDHPSDSLDSTWEGETDGPQPTALAETLPEGPSHHLLSPDGRTGGSVARATPMEFQDSSAPPAQSPQHATDRWRRETTRFFCPQPKEHIWKQTKTSPKPLPSRFIGSISPLNPQPRPTRQGRPLPRQGATLAGRSSSNAPKYGRGQLNYPLPDFSKVGPRVRFPKDESYRPPKSRSHNRKPQAPARPLIFKSPAEIVQEVLLSSGEAALAKDTPPAHPITRVPQEFQTPEQATELVHQLQEDYHRLLTKYAEAENTIDQLRLGAKVNLFSDPPQPNHSIHTGMVPQGTKVLSFTIPQPRSAEWWPGPAEDPQASAASGWPSARGDLSPSSLTSMPTLGWLPENRDISEDQSSAEQTQALASQASQFLAKVESFERLIQAGRLMPQDQVKGFQRLKAAHAALEEEYLKACREQHPAQPLAGSKGTPGRFDPRRELEAEIYRLGSCLEELKEHIDQTQQEPEPPGSDSALDSTPALPCLHQPTHLPAPSGQAPMPAIKTSCPEPATTTAAASTGPCPLHVNVEVSSGNSEVEDRPQDPLARLRHKELQMEQVYHGLMERYLSVKSLPEAMRMEEEEEGEEEEEEEGGGDSLEVDGVAATPGKAEATRVLPRQCPVQAEKSHGAPLEEATEKMVSMKPPGFQASLARDGHMSGLGKAEAAPPGPGVPPHPPGTKSAASHQSSMTSLEGSGISERLPQKPLHRGGGPHLEETWMASPETDSGFVGSETSRVSPLTQTPEHRLSHISTAGTLAQPFAASVPRDGASYPKARGSLIPRRATEPSTPRSQAQRYLSSPSGPLRQRAPNFSLERTLAAEMAVPGSEFEGHKRISEQPLPNKTISPPPAPAPAAAPLPCGPTETIPSFLLTRAGRDQAICELQEEVSRLRLRLEDSLHQPLQGSPTRPASAFDRPARTRGRPADSPATWGSHYGSKSTERLPGEPRGEEQIVPPGRQRARSSSVPREVLRLSLSSESELPSLPLFSEKSKTTKDSPQAARDGKRGVGSAGWPDRVTFRGQYTGHEYHVLSPKAVPKGNGTVSCPHCRPIRTQDAGGAVTGDPLGPPPADTLQCPLCGQVGSPPEADGPGSATSGAEKATTRRKASSTPSPKQRSKQAGSSPRPPPGLWYLATAPPAPAPPAFAYISSVPIMPYPPAAVYYAPAGPTSAQPAAKWPPTASPPPARRHRHSIQLDLGDLEELNKALSRAVQAAESVRSTTRQMRSSLSADLRQAHSLRGSCLF

SEQ ID NO: 11612 - protein, 1358 aa, Homo sapiens
MLRSEWPVFPEAEAEDVDSPASSHEPLAWLPQQGRQLDMTEEEPDGTLGSLEVEEAGESSSRLGYEAGLSLEGHGNTSPMALGHGQARGWVASGEQASGDKLSEHSEVNPSVELSPARSWSSGTVSLDHPSDSLDSTWEGETDGPQPTALAETLPEGPSHHLLSPDGRTGGSVARATPMEFQDSSAPPAQSPQHATDRWRRETTRFFCPQPKEHIWKQTKTSPKPLPSRFIGSISPLNPQPRPTRQGRPLPRQGATLAGRSSSNAPKYGRGQLNYPLPDFSKVGPRVRFPKDESYRPPKSRSHNRKPQAPARPLIFKSPAEIVQEVLLSSGEAALAKDTPPAHPITRVPQEFQTPEQATELVHQLQEDYHRLLTKYAEAENTIDQLRLGAKVNLFSDPPQPNHSIHTGMVPQGTKVLSFTIPQPRSAEWWPGPAEDPQASAASGWPSARGDLSPSSLTSMPTLGWLPENRDISEDQSSAEQTQALASQASQFLAKVESFERLIQAGRLMPQDQVKGFQRLKAAHAALEEEYLKACREQHPAQPLAGSKGTPGRFDPRRELEAEIYRLGSCLEELKEHIDQTQQEPEPPGSDSALDSTPALPCLHQPTHLPAPSGQAPMPAIKTSCPEPATTTAAASTGPCPLHVNVEVSSGNSEVEDRPQDPLARLRHKELQMEQVYHGLMERYLSVKSLPEAMRMEEEEEGEEEEEEEGGGDSLEVDGVAATPGKAEATRVLPRQCPVQAEKSHGAPLEEATEKMVSMKPPGFQASLARDGHMSGLGKAEAAPPGPGVPPHPPGTKSAASHQSSMTSLEGSGISERLPQKPLHRGGGPHLEETWMASPETDSGFVGSETSRVSPLTQTPEHRLSHISTAGTLAQPFAASVPRDGASYPKARGSLIPRRATEPSTPRSQAQRYLSSPSGPLRQRAPNFSLERTLAAEMAVPGSEFEGHKRISEQPLPNKTISPPPAPAPAAAPLPCGPTETIPSFLLTRAGRDQAICELQEEVSRLRLRLEDSLHQPLQGSPTRPASAFDRPARTRGRPADSPATWGSHYGSKSTERLPGEPRGEEQIVPPGRQRARSSSVPREVLRLSLSSESELPSLPLFSEKSKTTKDSPQAARDGKRGVGSAGWPDRVTFRGQYTGHEYHVLSPKAVPKGNGTVSCPHCRPIRTQDAGGAVTGDPLGPPPADTLQCPLCGQVGSPPEADGPGSATSGAEKATTRRKASSTPSPKQRSKQAGSSPRPPPGLWYLATAPPAPAPPAFAYISSVPIMPYPPAAVYYAPAGPTSAQPAAKWPPTASPPPARRHRHSIQLDLGDLEELNKALSRAVQAAESVRSTTRQMRSSLSADLRQAHSLRGSCLF

SEQ ID NO: 11613 - protein, 831 aa, Homo sapiens
MASSETEIRWAEPGLGKGPQRRRWAWAEDKRDVDRSSSQSWEEERLFPNATSPELLEDFRLAQQHLPPLEWDPHPQPDGHQDSESGETSGEEAEAEDVDSPASSHEPLAWLPQQGRQLDMTEEEPDGTLGSLEVEEAGESSSRLGYEAGLSLEGHGNTSPMALGHGQARGWVASGEQASGDKLSEHSEVNPSVELSPARSWSSGTVSLDHPSDSLDSTWEGETDGPQPTALAETLPEGPSHHLLSPDGRTGGSVARATPMEFQDSSAPPAQSPQHATDRWRRETTRFFCPQPKEHIWKQTKTSPKPLPSRFIGSISPLNPQPRPTRQGRPLPRQGATLAGRSSSNAPKYGRGQLNYPLPDFSKVGPRVRFPKDESYRPPKSRSHNRKPQAPARPLIFKSPAEIVQEVLLSSGEAALAKDTPPAHPITRVPQEFQTPEQATELVHQLQEDYHRLLTKYAEAENTIDQLRLGAKVNLFSDPPQPNHSIHTGMVPQGTKVLSFTIPQPRSAEWWPGPAEDPQASAASGWPSARGDLSPSSLTSMPTLGWLPENRDISEDQSSAEQTQALASQASQFLAKVESFERLIQAGRLMPQDQVKGFQRLKAAHAALEEEYLKACREQHPAQPLAGSKGTPGRFDPRRELEAEIYRLGSCLEELKEHIDQTQQEPEPPGSDSALDSTPALPCLHQPTHLPAPSGQAPMPAIKTSCPEPATTTAAASTGPCPLHVNVEVSSGNSEVEDRPQDPLARLRHKELQMEQVYHGLMERYLSVKSLPEAMRMEEEEEGEEEEEEEGGGDSLEVDGVAATPGKAEATRVLPRQCPVQAEKSHGAPLE

SEQ ID NO: 11614 - protein, 384 aa, Homo sapiens
MSAGGGTRGYSPRSPGATSQAICELQEEVSRLRLRLEDSLHQPLQGSPTRPASAFDRPARTRGRPADSPATWGSHYGSKSTERLPGEPRGEEQIVPPGRQRARSSSVPREVLRLSLSSESELPSLPLFSEKSKTTKDSPQAARDGKRGVGSAGWPDRVTFRGQYTGHEYHVLSPKAVPKGNGTVSCPHCRPIRTQDAGGAVTGDPLGPPPADTLQCPLCGQVGSPPEADGPGSATSGAEKATTRRKASSTPSPKQRSKQAGSSPRPPPGLWYLATAPPAPAPPAFAYISSVPIMPYPPAAVYYAPAGPTSAQPAAKWPPTASPPPARRHRHSIQLDLGDLEELNKALSRAVQAAESVRSTTRQMRSSLSADLRQAHSLRGSCLF

SEQ ID NO: 11615 - protein, 686 aa, Homo sapiens
MEQVYHGLMERYLSVKSLPEAMRMEEEEEGEEEEEEEGGGDSLEVDGVAATPGKAEATRVLPRQCPVQAEKSHGAPLEEATEKMVSMKPPGFQASLARDGHMSGLGKAEAAPPGPGVPPHPPGTKSAASHQSSMTSLEGSGISERLPQKPLHRGGGPHLEETWMASPETDSGFVGSETSRVSPLTQTPEHRLSHISTAGTLAQPFAASVPRDGASYPKARGSLIPRRATEPSTPRSQAQRYLSSPSGPLRQRAPNFSLERTLAAEMAVPGSEFEGHKRISEQPLPNKTISPPPAPAPAAAPLPCGPTETIPSFLLTRAGRDQAICELQEEVSRLRLRLEDSLHQPLQGSPTRPASAFDRPARTRGRPADSPATWGSHYGSKSTERLPGEPRGEEQIVPPGRQRARSSSVPREVLRLSLSSESELPSLPLFSEKSKTTKDSPQAARDGKRGVGSAGWPDRVTFRGQYTGHEYHVLSPKAVPKGNGTVSCPHCRPIRTQDAGGAVTGDPLGPPPADTLQCPLCGQVGSPPEADGPGSATSGAEKATTRRKASSTPSPKQRSKQAGSSPRPPPGLWYLATAPPAPAPPAFAYISSVPIMPYPPAAVYYAPAGPTSAQPAAKWPPTASPPPARRHRHSIQLDLGDLEELNKALSRAVQAAESVRSTTRQMRSSLSADLRQAHSLRGSCLF

SEQ ID NO: 11616 - protein, 572 aa, Homo sapiens
MASSETEIRWAEPGLGKGPQRRRWAWAEDKRDVDRSSSQSWEEERLFPNATSPELLEDFRLAQQHLPPLEWDPHPQPDGHQDSESGETSGEEAEAEDVDSPASSHEPLAWLPQQGRQLDMTEEEPDGTLGSLEVEEAGESSSRLGYEAGLSLEGHGNTSPMALGHGQARGWVASGEQASGDKLSEHSEVNPSVELSPARSWSSGTVSLDHPSDSLDSTWEGETDGPQPTALAETLPEGPSHHLLSPDGRTGGSVARATPMEFQDSSAPPAQSPQHATDRWRRETTRFFCPQPKEHIWKQTKTSPKPLPSRFIGSISPLNPQPRPTRQGRPLPRQGATLAGRSSSNAPKYGRGQLNYPLPDFSKVGPRVRFPKDESYRPPKSRSHNRKPQAPARPLIFKSPAEIVQEVLLSSGEAALAKDTPPAHPITRVPQEFQTPEQATELVHQLQVSGTHGCGCVTKAPVGLGWRLIGVGRPGVEAGWGGEAWDRAWLGWEALGRRLVGWGGLGWRLARVGSPGMEASGVGRPGVGSPGVEPGGVGRPGVEAGWGRKPWDRGWWGGEAWGGGWLGQEALG

SEQ ID NO: 11617 - protein, 1320 aa, Homo sapiens
MTEEEPDGTLGSLEVEEAGESSSRLGYEAGLSLEGHGNTSPMALGHGQARGWVASGEQASGDKLSEHSEVNPSVELSPARSWSSGTVSLDHPSDSLDSTWEGETDGPQPTALAETLPEGPSHHLLSPDGRTGGSVARATPMEFQDSSAPPAQSPQHATDRWRRETTRFFCPQPKEHIWKQTKTSPKPLPSRFIGSISPLNPQPRPTRQGRPLPRQGATLAGRSSSNAPKYGRGQLNYPLPDFSKVGPRVRFPKDESYRPPKSRSHNRKPQAPARPLIFKSPAEIVQEVLLSSGEAALAKDTPPAHPITRVPQEFQTPEQATELVHQLQEDYHRLLTKYAEAENTIDQLRLGAKVNLFSDPPQPNHSIHTGMVPQGTKVLSFTIPQPRSAEWWPGPAEDPQASAASGWPSARGDLSPSSLTSMPTLGWLPENRDISEDQSSAEQTQALASQASQFLAKVESFERLIQAGRLMPQDQVKGFQRLKAAHAALEEEYLKACREQHPAQPLAGSKGTPGRFDPRRELEAEIYRLGSCLEELKEHIDQTQQEPEPPGSDSALDSTPALPCLHQPTHLPAPSGQAPMPAIKTSCPEPATTTAAASTGPCPLHVNVEVSSGNSEVEDRPQDPLARLRHKELQMEQVYHGLMERYLSVKSLPEAMRMEEEEEGEEEEEEEGGGDSLEVDGVAATPGKAEATRVLPRQCPVQAEKSHGAPLEEATEKMVSMKPPGFQASLARDGHMSGLGKAEAAPPGPGVPPHPPGTKSAASHQSSMTSLEGSGISERLPQKPLHRGGGPHLEETWMASPETDSGFVGSETSRVSPLTQTPEHRLSHISTAGTLAQPFAASVPRDGASYPKARGSLIPRRATEPSTPRSQAQRYLSSPSGPLRQRAPNFSLERTLAAEMAVPGSEFEGHKRISEQPLPNKTISPPPAPAPAAAPLPCGPTETIPSFLLTRAGRDQAICELQEEVSRLRLRLEDSLHQPLQGSPTRPASAFDRPARTRGRPADSPATWGSHYGSKSTERLPGEPRGEEQIVPPGRQRARSSSVPREVLRLSLSSESELPSLPLFSEKSKTTKDSPQAARDGKRGVGSAGWPDRVTFRGQYTGHEYHVLSPKAVPKGNGTVSCPHCRPIRTQDAGGAVTGDPLGPPPADTLQCPLCGQVGSPPEADGPGSATSGAEKATTRRKASSTPSPKQRSKQAGSSPRPPPGLWYLATAPPAPAPPAFAYISSVPIMPYPPAAVYYAPAGPTSAQPAAKWPPTASPPPARRHRHSIQLDLGDLEELNKALSRAVQAAESVRSTTRQMRSSLSADLRQAHSLRGSCLF

SEQ ID NO: 11618 - protein, 899 aa, Homo sapiens
MPTLGWLPENRDISEDQSSAEQTQALASQASQFLAKVESFERLIQAGRLMPQDQVKGFQRLKAAHAALEEEYLKACREQHPAQPLAGSKGTPGRFDPRRELEAEIYRLGSCLEELKEHIDQTQQEPEPPGSDSALDSTPALPCLHQPTHLPAPSGQAPMPAIKTSCPEPATTTAAASTGPCPLHVNVEVSSGNSEVEDRPQDPLARLRHKELQMEQVYHGLMERYLSVKSLPEAMRMEEEEEGEEEEEEEGGGDSLEVDGVAATPGKAEATRVLPRQCPVQAEKSHGAPLEEATEKMVSMKPPGFQASLARDGHMSGLGKAEAAPPGPGVPPHPPGTKSAASHQSSMTSLEGSGISERLPQKPLHRGGGPHLEETWMASPETDSGFVGSETSRVSPLTQTPEHRLSHISTAGTLAQPFAASVPRDGASYPKARGSLIPRRATEPSTPRSQAQRYLSSPSGPLRQRAPNFSLERTLAAEMAVPGSEFEGHKRISEQPLPNKTISPPPAPAPAAAPLPCGPTETIPSFLLTRAGRDQAICELQEEVSRLRLRLEDSLHQPLQGSPTRPASAFDRPARTRGRPADSPATWGSHYGSKSTERLPGEPRGEEQIVPPGRQRARSSSVPREVLRLSLSSESELPSLPLFSEKSKTTKDSPQAARDGKRGVGSAGWPDRVTFRGQYTGHEYHVLSPKAVPKGNGTVSCPHCRPIRTQDAGGAVTGDPLGPPPADTLQCPLCGQVGSPPEADGPGSATSGAEKATTRRKASSTPSPKQRSKQAGSSPRPPPGLWYLATAPPAPAPPAFAYISSVPIMPYPPAAVYYAPAGPTSAQPAAKWPPTASPPPARRHRHSIQLDLGDLEELNKALSRAVQAAESVRSTTRQMRSSLSADLRQAHSLRGSCLF

SEQ ID NO: 11619 - protein, 382 aa, Homo sapiens
MALQGISVVELSGLAPGPFCAMVLADFGARVVRVDRPGSRYDVSRLGRGKRSLVLDLKQPRGAAVLRRLCKRSDVLLEPFRRGVMEKLQLGPEILQRENPRLIYARLSGFGQSGSFCRLAGHDINYLALSGVLSKIGRSGENPYAPLNLLADFAGGGLMCALGIIMALFDRTRTGKGQVIDANMVEGTAYLSSFLWKTQKLSLWEAPRGQNMLDGGAPFYTTYRTADGEFMAVGAIEPQFYELLIKGLGLKSDELPNQMSMDDWPEMKKKFADVFAEKTKAEWCQIFDGTDACVTPVLTFEEVVHHDHNKERGSFITSEEQDVSPRPAPLLLNTPAIPSFKRDPFIGEHTEEILEEFGFSREEIYQLNSDKIIESNKVKASL

SEQ ID NO: 11620 - protein, 229 aa, Homo sapiens
MALQGISVVELSGLAPGPFCAMVLADFGARVVRVDRPGSRYDVSRLGRGKRSLVLDLKQPRGAAVLRRLCKRSDVLLEPFRRGVMEKLQLGPEILQRENPRLIYARLSGFGQSGSFCRLAGHDINYLALSGGRNSIFKFFSVENSEIESVGSTSRTEHVGWWSTFLYDLQDSRWGIHGCWSNRTPVLRAADQRSLIPYFNLYLQFLNISMQNLFKVHTLLRPCYFLGQK

SEQ ID NO: 11621 - protein, 198 aa, Homo sapiens
MALQGISVVELSGLAPGPFCAMVLADFGARVVRVDRPGSRYDVSRLGRGKRSLVLDLKQPRGAAVLRRLCKRSDVLLEPFRRGVMEKLQLGPEILQRENPRLIYARLSGFGQSGSFCRLAGHDINYLALSGGRNSIFKFFSVENSEIESVGSTSRTEHVGWWSTFLYDLQDSRWGIHGCWSNRTPVLRAADQRTWTKV

SEQ ID NO: 11622 - protein, 394 aa, Homo sapiens
MALQGISVVELSGLAPGPFCAMVLADFGARVVRVDRPGSRYDVSRLGRGKRSLVLDLKQPRGAAVLRRLCKRSDVLLEPFRRGVMEKLQLGPEILQRENPRLIYARLSGFGQSGSFCRLAGHDINYLALSGVLSKIGRSGENPYAPLNLLADFAGGGLMCALGIIMALFDRTRTGKGQVIDANMVEGTAYLSSFLWKTQKLSLWEAPRGQNMLDGGAPFYTTYRTADGEFMAVGAIEPQFYELLIKGLGLKSDELPNQMSMDDWPEMKKKFADVFAEKTKAEWCQIFDGTDACVTPVLTFEEVVHHDHNKERGSFITSEEQDVSPRPAPLLLNTPAIPSFKRDPFIGEHTEEILEEFGFSREEIYQLNSDKIIESNKAGSKFWILYPTHSNIQK

SEQ ID NO: 11623 - protein, 364 aa, Homo sapiens
MAHRFPALTQEQKKELSEIAQSIVANGKGILAADESVGTMGNRLQRIKVENTEENRRQFREILFSVDSSINQSIGGVILFHETLYQKDSQGKLFRNILKEKGIVVGIKLDQGGAPLAGTNKETTIQGLDGLSERCAQYKKDGVDFGKWRAVLRIADQCPSSLAIQENANALARYASICQQNGLVPIVEPEVIPDGDHDLEHCQYVTEKVLAAVYKALNDHHVYLEGTLLKPNMVTAGHACTKKYTPEQVAMATVTALHRTVPAAVPGICFLSGGMSEEDATLNLNAINLCPLPKPWKLSFSYGRALQASALAAWGGKAANKEATQEAFMKRAMANCQAAKGQYVHTGSSGAASTQSLFTACYTY

SEQ ID NO: 11624 - protein, 1084 aa, Homo sapiens
MRNSEEQPSGGTTVLQRLLQEQLRYGNPSENRSLLAIHQQATGNGPPFPSGSGNPGPQSDVLSPQDHHQQLVAHAARQEPQGQEIQSENLIMEKQLSPRMQNNEELPTYEEAKVQSQYFRGQQHASVGAAFYVTGVTNQKMRTEGRPSVQRLNPGKMHQDEGLRDLKQGHVRSLSERLMQMSLATSGVKAHPPVTSAPLSPPQPNDLYKNPTSSSEFYKAQGPLPNQHSLKGMEHRGPPPEYPFKGMPPQSVVCKPQEPGHFYSEHRLNQPGRTEGQLMRYQHPPEYGAARPAQDISLPLSARNSQPHSPTSSLTSGGSLPLLQSPPSTRLSPARHPLVPNQGDHSAHLPRPQQHFLPNQAHQGDHYRLSQPGLSQQQQQQQQQHHHHHHHQQQQQQQPQQQPGEAYSAMPRAQPSSASYQPVPADPFAIVSRAQQMVEILSDENRNLRQELEGCYEKVARLQKVETEIQRVSEAYENLVKSSSKREALEKAMRNKLEGEIRRMHDFNRDLRERLETANKQLAEKEYEGSEDTRKTISQLFAKNKESQREKEKLEAELATARSTNEDQRRHIEIRDQALSNAQAKVVKLEEELKKKQVYVDKVEKMQQALVQLQAACEKREQLEHRLRTRLERELESLRIQQRQGNCQPTNVSEYNAAALMELLREKEERILALEADMTKWEQKYLEENVMRHFALDAAATVAAQRDTTVISHSPNTSYDTALEARIQKEEEEILMANKRCLDMEGRIKTLHAQIIEKDAMIKVLQQRSRKEPSKTEQLSCMRPAKSLMSISNAGSGLLSHSSTLTGSPIMEEKRDDKSWKGSLGILLGGDYRAEYVPSTPSPVPPSTPLLSAHSKTGSRDCSTQTERGTESNKTAAVAPISVPAPVAAAATAAAITATAATITTTMVAAAPVAVAAAAAPAAAAAPSPATAAATAAAVSPAAAGQIPAAASVASAAAVAPSAAAAAAVQVAPAAPAPVPAPALVPVPAPAAAQASAPAQTQAPTSAPAVAPTPAPTPTPAVAQAEVPASPATGPGPHRLSIPSLTCNPDKTDGPVFHSNTLERKTPIQILGQEPDAEMVEYLI

SEQ ID NO: 11625 - protein, 675 aa, Homo sapiens
MPRAQPSSASYQPVPADPFAIVSRAQQMVEILSDENRNLRQELEGCYEKVARLQKVETEIQRVSEAYENLVKSSSKREALEKAMRNKLEGEIRRMHDFNRDLRERLETANKQLAEKEYEGSEDTRKTISQLFAKNKESQREKEKLEAELATARSTNEDQRRHIEIRDQALSNAQAKVVKLEEELKKKQVYVDKVEKMQQALVQLQAACEKREQLEHRLRTRLERELESLRIQQRQGNCQPTNVSEYNAAALMELLREKEERILALEADMTKWEQKYLEENVMRHFALDAAATVAAQRDTTVISHSPNTSYDTALEARIQKEEEEILMANKRCLDMEGRIKTLHAQIIEKDAMIKVLQQRSRKEPSKTEQLSCMRPAKSLMSISNAGSGLLSHSSTLTGSPIMEEKRDDKSWKGSLGILLGGDYRAEYVPSTPSPVPPSTPLLSAHSKTGSRDCSTQTERGTESNKTAAVAPISVPAPVAAAATAAAITATAATITTTMVAAAPVAVAAAAAPAAAAAPSPATAAATAAAVSPAAAGQIPAAASVASAAAVAPSAAAAAAVQVAPAAPAPVPAPALVPVPAPAAAQASAPAQTQAPTSAPAVAPTPAPTPTPAVAQAEVPASPATGPGPHRLSIPSLTCNPDKTDGPVFHSNTLERKTPIQILGQEPDAEMVEYLI

SEQ ID NO: 11626 - protein, 1610 aa, Homo sapiens
MNTPKEEFQDWPIVRIAAHLPDLIVYGHFSPERPFMDYFDGVLMFVDISGFTAMTEKFSSAMYMDRGAEQLVEILNYHISAIVEKVLIFGGDILKFAGDALLALWRVERKQLKNIITVVIKCSLEIHGLFETQEWEEGLDIRVKIGLAAGHISMLVFGDETHSHFLVIGQAVDDVRLAQNMAQMNDVILSPNCWQLCDRSMIEIESVPDQRAVKVNFLKPPPNFNFDEFFTKCTTFMHYYPSGEHKNLLRLACTLKPDPELEMSLQKYVMESILKQIDNKQLQGYLSELRPVTIVFVNLMFEDQDKAEEIGPAIQDAYMHITSVLKIFQGQINKVFMFDKGCSFLCVFGFPGEKVPDELTHALECAMDIFDFCSQVHKIQTVSIGVASGIVFCGIVGHTVRHEYTVIGQKVNLAARMMMYYPGIVTCDSVTYNGSNLPAYFFKELPKKVMKGVADSGPLYQYWGRTEKVMFGMACLICNRKEDYPLLGRNKEINYFMYTMKKFLISNSSQVLMYEGLPGYGKSQILMKIEYLAQGKNHRIIAISLNKISFHQTFYTIQMFMANVLGLDTCKHYKERQTNLRNKVMTLLDEKFYCLLNDIFHVQFPISREISRMSTLKKQKQLEILFMKILKLIVKEERIIFIIDEAQFVDSTSWRFMEKLIRTLPIFIIMSLCPFVNIPCAAARAVIKNRNTTYIVIGAVQPNDISNKICLDLNVSCISKELDSYLGEGSCGIPFYCEELLKNLEHHEVLVFQQTESEEKTNRTWNNLFKYSIKLTEKLNMVTLHSDKESEEVCHLTSGVRLKNLSPPTSLKEISLIQLDSMRLSHQMLVRCAAIIGLTFTTELLFEILPCWNMKMMIKTLATLVESNIFYCFRNGKELQKALKQNDPSFEVHYRSLSLKPSEGMDHGEEEQLRELENEVIECHRIRFCNPMMQKTAYELWLKDQRKAMHLKCARFLEEDAHRCDHCRGRDFIPYHHFTVNIRLNALDMDAIKKMAMSHGFKTEEKLILSNSEIPETSAFFPENRSPEEIREKILNFFDHVLTKMKTSDEDIIPLESCQCEEILEIVILPLAHHFLALGENDKALYYFLEIASAYLIFCDNYMAYMYLNEGQKLLKTLKKDKSWSQTFESATFYSLKGEVCFNMGQIVLAKKMLRKALKLLNRIFPYNLISLFLHIHVEKNRHFHYVNRQAQESPPPGKKRLAQLYRQTVCLSLLWRIYSYSYLFHCKYYAHLAVMMQMNTALETQNCFQIIKAYLDYSLYHHLAGYKGVWFKYEVMAMEHIFNLPLKGEGIEIVAYVAETLVFNKLIMGHLDLAIELGSRALQMWALLQNPNRHYQSLCRLSRCLLLNSRYPQLIQVLGRLWELSVTQEHIFSKAFFYFVCLDILLYSGFVYRTFEECLEFIHQYENNRILKFHSGLLLGLYSSVAIWYARLQEWDNFYKFSNRAKNLLPRRTMTLTYYDGISRYMEGQVLHLQKQIKEQSENAQASGEELLKNLENLVAQNTTGPVFCPRLYHLMAYVCILMGDGQKCGLFLNTALRLSETQGNILEKCWLNMNKESWYSTSELKEDQWLQTILSLPSWEKIVAGRVNIQDLQKNKFLMRANTVDNHF

SEQ ID NO: 11627 - protein, 1518 aa, Homo sapiens
MSLSEGDALLALWRVERKQLKNIITVVIKCSLEIHGLFETQEWEEGLDIRVKIGLAAGHISMLVFGDETHSHFLVIGQAVDDVRLAQNMAQMNDVILSPNCWQLCDRSMIEIESVPDQRAVKVNFLKPPPNFNFDEFFTKCTTFMHYYPSGEHKNLLRLACTLKPDPELEMSLQKYVMESILKQIDNKQLQGYLSELRPVTIVFVNLMFEDQDKAEEIGPAIQDAYMHITSVLKIFQGQINKVFMFDKGCSFLCVFGFPGEKVPDELTHALECAMDIFDFCSQVHKIQTVSIGVASGIVFCGIVGHTVRHEYTVIGQKVNLAARMMMYYPGIVTCDSVTYNGSNLPAYFFKELPKKVMKGVADSGPLYQYWGRTEKVMFGMACLICNRKEDYPLLGRNKEINYFMYTMKKFLISNSSQVLMYEGLPGYGKSQILMKIEYLAQGKNHRIIAISLNKISFHQTFYTIQMFMANVLGLDTCKHYKERQTNLRNKVMTLLDEKFYCLLNDIFHVQFPISREISRMSTLKKQKQLEILFMKILKLIVKEERIIFIIDEAQFVDSTSWRFMEKLIRTLPIFIIMSLCPFVNIPCAAARAVIKNRNTTYIVIGAVQPNDISNKICLDLNVSCISKELDSYLGEGSCGIPFYCEELLKNLEHHEVLVFQQTESEEKTNRTWNNLFKYSIKLTEKLNMVTLHSDKESEEVCHLTSGVRLKNLSPPTSLKEISLIQLDSMRLSHQMLVRCAAIIGLTFTTELLFEILPCWNMKMMIKTLATLVESNIFYCFRNGKELQKALKQNDPSFEVHYRSLSLKPSEGMDHGEEEQLRELENEVIECHRIRFCNPMMQKTAYELWLKDQRKAMHLKCARFLEEDAHRCDHCRGRDFIPYHHFTVNIRLNALDMDAIKKMAMSHGFKTEEKLILSNSEIPETSAFFPENRSPEEIREKILNFFDHVLTKMKTSDEDIIPLESCQCEEILEIVILPLAHHFLALGENDKALYYFLEIASAYLIFCDNYMAYMYLNEGQKLLKTLKKDKSWSQTFESATFYSLKGEVCFNMGQIVLAKKMLRKALKLLNRIFPYNLISLFLHIHVEKNRHFHYVNRQAQESPPPGKKRLAQLYRQTVCLSLLWRIYSYSYLFHCKYYAHLAVMMQMNTALETQNCFQIIKAYLDYSLYHHLAGYKGVWFKYEVMAMEHIFNLPLKGEGIEIVAYVAETLVFNKLIMGHLDLAIELGSRALQMWALLQNPNRHYQSLCRLSRCLLLNSRYPQLIQVLGRLWELSVTQEHIFSKAFFYFVCLDILLYSGFVYRTFEECLEFIHQYENNRILKFHSGLLLGLYSSVAIWYARLQEWDNFYKFSNRAKNLLPRRTMTLTYYDGISRYMEGQVLHLQKQIKEQSENAQASGEELLKNLENLVAQNTTGPVFCPRLYHLMAYVCILMGDGQKCGLFLNTALRLSETQGNILEKCWLNMNKESWYSTSELKEDQWLQTILSLPSWEKIVAGRVNIQDLQKNKFLMRANTVDNHF

SEQ ID NO: 11628 - protein, 372 aa, Homo sapiens
MLFKAYMYLNEGQKLLKTLKKDKSWSQTFESATFYSLKGEVCFNMGQIVLAKKMLRKALKLLNRIFPYNLISLFLHIHVEKNRHFHYVNRQAQESPPPGKKRLAQLYRQTVCLSLLWRIYSYSYLFHCKYYAHLAVMMQMNTALETQNCFQIIKAYLDYSLYHHLAGYKGVWFKYEVMAMEHIFNLPLKGEGIEIVAYVAETLVFNKLIMGHLDLAIELGSRALQMWALLQNPNRHYQSLCRLSRCLLLNSRYPQLIQVLGRLWELSVTQEHIFSKAFFYFVCLDILLYSGFVYRTFEECLEFIHQYENNRILKFHSGLLLGLYSSVAIWECEAGVGRRLHTSRDPGMPDFRNGTTFTNFPIELKIFCQEEP

SEQ ID NO: 11629 - protein, 1457 aa, Homo sapiens
MLVFGDETHSHFLVIGQAVDDVRLAQNMAQMNDVILSPNCWQLCDRSMIEIESVPDQRAVKVNFLKPPPNFNFDEFFTKCTTFMHYYPSGEHKNLLRLACTLKPDPELEMSLQKYVMESILKQIDNKQLQGYLSELRPVTIVFVNLMFEDQDKAEEIGPAIQDAYMHITSVLKIFQGQINKVFMFDKGCSFLCVFGFPGEKVPDELTHALECAMDIFDFCSQVHKIQTVSIGVASGIVFCGIVGHTVRHEYTVIGQKVNLAARMMMYYPGIVTCDSVTYNGSNLPAYFFKELPKKVMKGVADSGPLYQYWGRTEKVMFGMACLICNRKEDYPLLGRNKEINYFMYTMKKFLISNSSQVLMYEGLPGYGKSQILMKIEYLAQGKNHRIIAISLNKISFHQTFYTIQMFMANVLGLDTCKHYKERQTNLRNKVMTLLDEKFYCLLNDIFHVQFPISREISRMSTLKKQKQLEILFMKILKLIVKEERIIFIIDEAQFVDSTSWRFMEKLIRTLPIFIIMSLCPFVNIPCAAARAVIKNRNTTYIVIGAVQPNDISNKICLDLNVSCISKELDSYLGEGSCGIPFYCEELLKNLEHHEVLVFQQTESEEKTNRTWNNLFKYSIKLTEKLNMVTLHSDKESEEVCHLTSGVRLKNLSPPTSLKEISLIQLDSMRLSHQMLVRCAAIIGLTFTTELLFEILPCWNMKMMIKTLATLVESNIFYCFRNGKELQKALKQNDPSFEVHYRSLSLKPSEGMDHGEEEQLRELENEVIECHRIRFCNPMMQKTAYELWLKDQRKAMHLKCARFLEEDAHRCDHCRGRDFIPYHHFTVNIRLNALDMDAIKKMAMSHGFKTEEKLILSNSEIPETSAFFPENRSPEEIREKILNFFDHVLTKMKTSDEDIIPLESCQCEEILEIVILPLAHHFLALGENDKALYYFLEIASAYLIFCDNYMAYMYLNEGQKLLKTLKKDKSWSQTFESATFYSLKGEVCFNMGQIVLAKKMLRKALKLLNRIFPYNLISLFLHIHVEKNRHFHYVNRQAQESPPPGKKRLAQLYRQTVCLSLLWRIYSYSYLFHCKYYAHLAVMMQMNTALETQNCFQIIKAYLDYSLYHHLAGYKGVWFKYEVMAMEHIFNLPLKGEGIEIVAYVAETLVFNKLIMGHLDLAIELGSRALQMWALLQNPNRHYQSLCRLSRCLLLNSRYPQLIQVLGRLWELSVTQEHIFSKAFFYFVCLDILLYSGFVYRTFEECLEFIHQYENNRILKFHSGLLLGLYSSVAIWYARLQEWDNFYKFSNRAKNLLPRRTMTLTYYDGISRYMEGQVLHLQKQIKEQSENAQASGEELLKNLENLVAQNTTGPVFCPRLYHLMAYVCILMGDGQKCGLFLNTALRLSETQGNILEKCWLNMNKESWYSTSELKEDQWLQTILSLPSWEKIVAGRVNIQDLQKNKFLMRANTVDNHF

SEQ ID NO: 11630 - protein, 298 aa, Homo sapiens
MGDHAWSFLKDFLAGGVAAAVSKTAVAPIERVKLLLQVQHASKQISAEKQYKGIIDCVVRIPKEQGFLSFWRGNLANVIRYFPTQALNFAFKDKYKQLFLGGVDRHKQFWRYFAGNLASGGAAGATSLCFVYPLDFARTRLAADVGKGAAQREFHGLGDCIIKIFKSDGLRGLYQGFNVSVQGIIIYRAAYFGVYDTAKGMLPDPKNVHIFVSWMIAQSVTAVAGLVSYPFDTVRRRMMMQSGRKGADIMYTGTVDCWRKIAKDEGAKAFFKGAWSNVLRGMGGAFVLVLYDEIKKYV

SEQ ID NO: 11631 - protein, 507 aa, Homo sapiens
MCTKTIPVLWGCFLLWNLYVSSSQTIYPGIKARITQRALDYGVQAGMKMIEQMLKEKKLPDLSGSESLEFLKVDYVNYNFSNIKISAFSFPNTSLAFVPGVGIKALTNHGTANISTDWGFESPLFQDTGGADLFLSGVYFTGIIILTRNDFGHPTLKLQDCYAQLSHAHVSFSGELSVLYNSFAEPMEKPILKNLNEMLCPIIASEVKALNANLSTLEVLTKIDNYTLLDYSLISSPEITENYLDLNLKGVFYPLENLTDPPFSPVPFVLPERSNSMLYIGIAEYFFKSASFAHFTAGVFNVTLSTEEISNHFVQNSQGLGNVLSRIAEIYILSQPFMVRIMATEPPIINLQPGNFTLDIPASIMMLTQPKNSTVETIVSMDFVASTSVGLVILGQRLVCSLSLNRFRLALPESNRSNIEVLRFENILSSILHFGVLPLANAKLQQGFPLSNPHKFLFVNSDIEVLEGFLLISTDLKYETSSKQQPSFHVWEGLNLISRQWRGKSAP

SEQ ID NO: 11632 - protein, 264 aa, Homo sapiens
MEKPILKNLNEMLCPIIASEVKALNANLSTLEVLTKIDNYTLLDYSLISSPEITENYLDLNLKGVFYPLENLTDPPFSPVPFVLPERSNSMLYIGIAEYFFKSASFAHFTAGVFNVTLSTEEISNHFVQNSQGLGNVLSRVASTSVGLVILGQRLVCSLSLNRFRLALPESNRSNIEVLRFENILSSILHFGVLPLANAKLQQGFPLSNPHKFLFVNSDIEVLEGFLLISTDLKYETSSKQQPSFHVWEGLNLISRQWRGKSAP

SEQ ID NO: 11633 - protein, 576 aa, Homo sapiens
MLPHVVLTFRRLGCALASCRLAPARHRGSGLLHTAPVARSDRSAPVFTRALAFGDRIALVDQHGRHTYRELYSRSLRLSQEICRLCGCVGGDLREERVSFLCANDASYVVAQWASWMSGGVAVPLYRKHPAAQLEYVICDSQSSVVLASQEYLELLSPVVRKLGVPLLPLTPAIYTGAVEEPAEVPVPEQGWRNKGAMIIYTSGTTGRPKGVLSTHQNIRAVVTGLVHKWAWTKDDVILHVLPLHHVHGVVNALLCPLWVGATCVMMPEFSPQQVWEKFLSSETPRINVFMAVPTIYTKLMEYYDRHFTQPHAQDFLRAVCEEKIRLMVSGSAALPLPVLEKWKNITGHTLLERYGMTEIGMALSGPLTTAVRLPGSVGTPLPGVQVRIVSENPQREACSYTIHAEGDERGTKVTPGFEEKEGELLVRGPSVFREYWNKPEETKSAFTLDGWFKTGDTVVFKDGQYWIRGRTSVDIIKTGGYKVSALEVEWHLLAHPSITDVAVIGVPDMTWGQRVTAVVTLREGHSLSHRELKEWARNVLAPYAVPSELVLVEEIPRNQMGKIDKKALIRHFHPS

SEQ ID NO: 11634 - protein, 416 aa, Homo sapiens
MDASRPKSSESQSSLEAPRPGPNPSPNVVNKPLQRDFPGMVADRLPPKTGVVVIDMGTGTCKVGFAGQASPTYTVATILGCQPKKPATSGQSGLQTFIGEAARVLPELTLVQPLRSGIVVDWDAAELIWRHLLEHDLRVATHDHPLLFSDPPFSPATNREKLVEVAFESLRSPAMYVASQSVLSVYAHGRVSGLVVDTGHGVTYTVPVFQGYNLLHATERLDLAGNHLTAFLAEMLLQAGLPLGQQDLDLVENIKHHYCYVASDFQKEQARPEQEYKRTLKLPDGRTVTLGKELFQCPELLFNPPEVPGLSPVGLSTMAKQSLRKLSLEMRADLAQNVLLCGGSSLFTGFEGRFRAELLRALPAETHVVVAAQPTRNFSVWIGGSILASLRAFQSCWVLREQYEEQGPYIVYRKCY

SEQ ID NO: 11635 - protein, 315 aa, Homo sapiens
MHREPAKKKAEKRLFDASSFGKDLLAGGVAAAVSKTAVAPIERVKLLLQVQASSKQISPEARYKGMVDCLVRIPREQGFFSFWRGNLANVIRYFPTQALNFAFKDKYKQLFMSGVNKEKQFWRWFLANLASGGAAGATSLCVVYPLDFARTRLGVDIGKGPEERQFKGLGDCIMKIAKSDGIAGLYQGFGVSVQGIIVYRASYFGAYDTVKGLLPKPKKTPFLVSFFIAQVVTTCSGILSYPFDTVRRRMMMQSGEAKRQYKGTLDCFVKIYQHEGISSFFRGAFSNVLRGTGGALVLVLYDKIKEFFHIDIGGR

SEQ ID NO: 11636 - protein, 175 aa, Homo sapiens
MEKIPVSAFLLLVALSYTLARDTTVKPGAKKDTKDSRPKLPQTLSRGWGDQLIWTQTYEEALYKSKTSNKPLMIIHHLDECPHSQALKKVFAENKEIQKLAEQFVLLNLVYETTDKHLSPDGQYVPRIMFVDPSLTVRADITGRYSNRLYAYEPADTALLLDNMKKALKLLKTEL

SEQ ID NO: 11637 - protein, 1080 aa, Homo sapiens
MPAKGRYFLNEGEEGPDQDALYEKYQLTSQHGPLLLTLLLVAATACVALIIIAFSQGDPSRHQAILGMAFLVLAVFAALSVLMYVECLLRRWLRALALLTWACLVALGYVLVFDAWTKAACAWEQVPFFLFIVFVVYTLLPFSMRGAVAVGAVSTASHLLVLGSLMGGFTTPSVRVGLQLLANAVIFLCGNLTGAFHKHQMQDASRDLFTYTVKCIQIRRKLRIEKRQQENLLLSVLPAHISMGMKLAIIERLKEHGDRRCMPDNNFHSLYVKRHQNVSILYADIVGFTQLASDCSPKELVVVLNELFGKFDQIAKANECMRIKILGDCYYCVSGLPVSLPTHARNCVKMGLDMCQAIKQVREATGVDINMRVGIHSGNVLCGVIGLRKWQYDVWSHDVSLANRMEAAGVPGRVHITEATLKHLDKAYEVEDGHGQQRDPYLKEMNIRTYLVIDPRSQQPPPPSQHLPRPKGDAALKMRASVRMTRYLESWGAARPFAHLNHRESVSSGETHVPNGRRPKSVPQRHRRTPDRSMSPKGRSEDDSYDDEMLSAIEGLSSTRPCCSKSDDFYTFGSIFLEKGFEREYRLAPIPRARHDFACASLIFVCILLVHVLLMPRTAALGVSFGLVACVLGLVLGLCFATKFSRCCPARGTLCTISERVETQPLLRLTLAVLTIGSLLTVAIINLPLMPFQVPELPVGNETGLLAASSKTRALCEPLPYYTCSCVLGFIACSVFLRMSLEPKVVLLTVALVAYLVLFNLSPCWQWDCCGQGLGNLTKPNGTTSGTPSCSWKDLKTMTNFYLVLFYITLLTLSRQIDYYCRLDCLWKKKFKKEHEEFETMENVNRLLLENVLPAHVAAHFIGDKLNEDWYHQSYDCVCVMFASVPDFKVFYTECDVNKEGLECLRLLNEIIADFDELLLKPKFSGVEKIKTIGSTYMAAAGLSVASGHENQELERQHAHIGVMVEFSIALMSKLDGINRHSFNSFRLRVGINHGPVIAGVIGARKPQYDIWGNTVNVASRMESTGELGKIQVTEETCTILQGLGYSCECRGLINVKGKGELRTYFVCTDTAKFQGLGLN

SEQ ID NO: 11638 - protein, 1077 aa, Homo sapiens
MARLFSPRPPPSEDLFYETYYSLSQQYPLLLLLLGIVLCALAALLAVAWASGRELTSDPSFLTTVLCALGGFSLLLGLASREQRLQRWTRPLSGLVWVALLALGHAFLFTGGVVSAWDQVSYFLFVIFTAYAMLPLGMRDAAVAGLASSLSHLLVLGLYLGPQPDSRPALLPQLAANAVLFLCGNVAGVYHKALMERALRATFREALSSLHSRRRLDTEKKHQEHLLLSILPAYLAREMKAEIMARLQAGQGSRPESTNNFHSLYVKRHQGVSVLYADIVGFTRLASECSPKELVLMLNELFGKFDQIAKEHECMRIKILGDCYYCVSGLPLSLPDHAINCVRMGLDMCRAIRKLRAATGVDINMRVGVHSGSVLCGVIGLQKWQYDVWSHDVTLANHMEAGGVPGRVHITGATLALLAGAYAVEDAGMEHRDPYLRELGEPTYLVIDPRAEEEDEKGTAGGLLSSLEGLKMRPSLLMTRYLESWGAAKPFAHLSHGDSPVSTSTPLPEKTLASFSTQWSLDRSRTPRGLDDELDTGDAKFFQVIEQLNSQKQWKQSKDFNPLTLYFREKEMEKEYRLSAIPAFKYYEACTFLVFLSNFIIQMLVTNRPPALAITYSITFLLFLLILFVCFSEDLMRCVLKGPKMLHWLPALSGLVATRPGLRIALGTATILLVFAMAITSLFFFPTSSDCPFQAPNVSSMISNLSWELPGSLPLISVPYSMHCCTLGFLSCSLFLHMSFELKLLLLLLWLAASCSLFLHSHAWLSECLIVRLYLGPLDSRPGVLKEPKLMGAISFFIFFFTLLVLARQNEYYCRLDFLWKKKLRQEREETETMENLTRLLLENVLPAHVAPQFIGQNRRNEDLYHQSYECVCVLFASVPDFKEFYSESNINHEGLECLRLLNEIIADFDELLSKPKFSGVEKIKTIGSTYMAATGLNATSGQDAQQDAERSCSHLGTMVEFAVALGSKLDVINKHSFNNFRLRVGLNHGPVVAGVIGAQKPQYDIWGNTVNVASRMESTGVLGKIQVTEETAWALQSLGYTCYSRGVIKVKGKGQLCTYFLNTDLTRTGPPSATLG

SEQ ID NO: 11639 - protein, 419 aa, Homo sapiens
MSRGTRESACCMLTSWASRGWPASVPLRSWCSCSMSSLASSTRLPRKLRAATGVDINMRVGVHSGSVLCGVIGLQKWQYDVWSHDVTLANHMEAGGVPGRVHITGATLALLAGAYAVEDAGMEHRDPYLRELGEPTYLVIDPRAEEEDEKGTAGGLLSSLEGLKMRPSLLMTRYLESWGAAKPFAHLSHGDSPVSTSTPLPEKTLASFSTQWSLDRSRTPRGLDDELDTGDAKFFQVIEQLNSQKQWKQSKDFNPLTLYFREKEMEKEYRLSAIPAFKYYEACTFLVFLSNFIIQMLVTNRPPALAITYSITFLLFLLILFVCFSEDLMRCVLKGPKMLHWLPALSGLVATRPGLRIALGTATILLVFAMAITSLFFFPTSSDCPFQAPNVSSMISNLSWELPGSLPLISVPVSVPTCP

SEQ ID NO: 11640 - protein, 407 aa, Homo sapiens
MWDLALIFLAAACVFSLGVTLWVICSHFFTVHIPAAVGHPVKLRVLHCIFQLLLTWGMIFEKLRICSMPQFFCFMQDLPPLKYDPDVVVTDFRFGTIPVKLYQPKASTCTLKPGIVYYHGGGGVMGSLKTHHGICSRLCKESDSVVLAVGYRKLPKHKFPVPVRDCLVATIHFLKSLDAYGVDPARVVVCGDSFGGAIAAVVCQQLVDRPDLPRIRAQILIYAILQALDLQTPSFQQRKNIPLLTWSFICYFFFQNLDFSSSWQEVIMKGAHLPAEVWEKYRKWLGPENIPERFKERGYQLKPHEPMNEAAYLEVSVVLDVMCSPLIAEDDIVSQLPETCIVSCEYDALRDNSLLYKKRLEDLGVPVTWHHMEDGFHGVLRTIDMSFLHFPCSMRILSALVQFVKGL

SEQ ID NO: 11641 - protein, 1522 aa, Homo sapiens
MKAVRNLLIYIFSTYLLVMFGFNAAQDFWCSTLVKGVIYGSYSVSEMFPKNFTNCTWTLENPDPTKYSIYLKFSKKDLSCSNFSLLAYQFDHFSHEKIKDLLRKNHSIMQLCNSKNAFVFLQYDKNFIQIRRVFPTNFPGLQKKGEEDQKSFFEFLVLNKVSPSQFGCHVLCTWLESCLKSENGRTESCGIMYTKCTCPQHLGEWGIDDQSLILLNNVVLPLNEQTEGCLTQELQTTQVCNLTREAKRPPKEEFGMMGDHTIKSQRPRSVHEKRVPQEQADAAKFMAQTGESGVEEWSQWSTCSVTCGQGSQVRTRTCVSPYGTHCSGPLRESRVCNNTALCPVHGVWEEWSPWSLCSFTCGRGQRTRTRSCTPPQYGGRPCEGPETHHKPCNIALCPVDGQWQEWSSWSQCSVTCSNGTQQRSRQCTAAAHGGSECRGPWAESRECYNPECTANGQWNQWGHWSGCSKSCDGGWERRIRTCQGAVITGQQCEGTGEEVRRCNEQRCPAPYEICPEDYLMSMVWKRTPAGDLAFNQCPLNATGTTSRRCSLSLHGVAFWEQPSFARCISNEYRHLQHSIKEHLAKGQRMLAGDGMSQVTKTLLDLTQRKNFYAGDLLMSVEILRNVTDTFKRASYIPASDGVQNFFQIVSNLLDEENKEKWEDAQQIYPGSIELMQVIEDFIHIVGMGMMDFQNSYLMTGNVVASIQKLPAASVLTDINFPMKGRKGMVDWARNSEDRVVIPKSIFTPVSSKELDESSVFVLGAVLYKNLDLILPTLRNYTVINSKIIVVTIRPEPKTTDSFLEIELAHLANGTLNPYCVLWDDSKTNESLGTWSTQGCKTVLTDASHTKCLCDRLSTFAILAQQPREIIMESSGTPSVTLIVGSGLSCLALITLAVVYAALWRYIRSERSIILINFCLSIISSNILILVGQTQTHNKSICTTTTAFLHFFFLASFCWVLTEAWQSYMAVTGKIRTRLIRKRFLCLGWGLPALVVATSVGFTRTKGYGTDHYCWLSLEGGLLYAFVGPAAAVVLVNMVIGILVFNKLVSRDGILDKKLKHRAGQMSEPHSGLTLKCAKCGVVSTTALSATTASNAMASLWSSCVVLPLLALTWMSAVLAMTDKRSILFQILFAVFDSLQGFVIVMVHCILRREVQDAFRCRLRNCQDPINADSSSSFPNGHAQIMTDFEKDVDIACRSVLHKDIGPCRAATITGTLSRISLNDDEEEKGTNPEGLSYSTLPGNVISKVIIQQPTGLHMPMSMNELSNPCLKKENSELRRTVYLCTDDNLRGADMDIVHPQERMMESDYIVMPRSSVNNQPSMKEESKMNIGMETLPHERLLHYKVNPEFNMNPPVMDQFNMNLEQHLAPQEHMQNLPFEPRTAVKNFMASELDDNAGLSRSETGSTISMSSLERRKSRYSDLDFEKVMHTRKRHMELFQELNQKFQTLDRFRDIPNTSSMENPAPNKNPWDTFKNPSEYPHYTTINVLDTEAKDALELRPAEWEKCLNLPLDVQEGDFQTEV

SEQ ID NO: 11642 - protein, 486 aa, Homo sapiens
MVIGILVFNKLVSRDGILDKKLKHRAGQMSEPHSGLTLKCAKCGVVSTTALSATTASNAMASLWSSCVVLPLLALTWMSAVLAMTDKRSILFQILFAVFDSLQGFVIVMVHCILRREVQDAFRCRLRNCQDPINADSSSSFPNGHAQIMTDFEKDVDIACRSVLHKDIGPCRAATITGTLSRISLNDDEEEKGTNPEGLSYSTLPGNVISKVIIQQPTGLHMPMSMNELSNPCLKKENSELRRTVYLCTDDNLRGADMDIVHPQERMMESDYIVMPRSSVNNQPSMKEESKMNIGMETLPHERLLHYKVNPEFNMNPPVMDQFNMNLEQHLAPQEHMQNLPFEPRTAVKNFMASELDDNAGLSRSETGSTISMSSLERRKSRYSDLDFEKVMHTRKRHMELFQELNQKFQTLDRFRDIPNTSSMENPAPNKNPWDTFKNPSEYPHYTTINVLDTEAKDALELRPAEWEKCLNLPLDVQEGDFQTEV

SEQ ID NO: 11643 - protein, 1168 aa, Homo sapiens
MSWFSGLLVPKVDERKTAWGERNGQKRSRRRGTRAGGFCTPRYMSCLRDAEPPSPTPAGPPRCPWQDDAFIRRGGPGKGKELGLRAVALGFEDTEVTTTAGGTAEVAPDAVPRSGRSCWRRLVQVFQSKQFRSAKLERLYQRYFFQMNQSSLTLLMAVLVLLTAVLLAFHAAPARPQPAYVALLACAAALFVGLMVVCNRHSFRQDSMWVVSYVVLGILAAVQVGGALAADPRSPSAGLWCPVFFVYIAYTLLPIRMRAAVLSGLGLSTLHLILAWQLNRGDAFLWKQLGANVLLFLCTNVIGICTHYPAEVSQRQAFQETRGYIQARLHLQHENRQQERLLLSVLPQHVAMEMKEDINTKKEDMMFHKIYIQKHDNVSILFADIEGFTSLASQCTAQELVMTLNELFARFDKLAAENHCLRIKILGDCYYCVSGLPEARADHAHCCVEMGVDMIEAISLVREVTGVNVNMRVGIHSGRVHCGVLGLRKWQFDVWSNDVTLANHMEAGGRAGRIHITRATLQYLNGDYEVEPGRGGERNAYLKEQHIETFLILGASQKRKEEKAMLAKLQRTRANSMEGLMPRWVPDRAFSRTKDSKAFRQMGIDDSSKDNRGTQDALNPEDEVDEFLSRAIDARSIDQLRKDHVRRFLLTFQREDLEKKYSRKVDPRFGAYVACALLVFCFICFIQLLIFPHSTLMLGIYASIFLLLLITVLICAVYSCGSLFPKALQRLSRSIVRSRAHSTAVGIFSVLLVFTSAIANMFTCNHTPIRSCAARMLNLTPADITACHLQQLNYSLGLDAPLCEGTMPTCSFPEYFIGNMLLSLLASSVFLHISSIGKLAMIFVLGLIYLVLLLLGPPATIFDNYDLLLGVHGLASSNETFDGLDCPAAGRVALKYMTPVILLVFALALYLHAQQVESTARLDFLWKLQATGEKEEMEELQAYNRRLLHNILPKDVAAHFLARERRNDELYYQSCECVAVMFASIANFSEFYVELEANNEGVECLRLLNEIIADFDEIISEERFRQLEKIKTIGSTYMAASGLNASTYDQVGRSHITALADYAMRLMEQMKHINEHSFNNFQMKIGLNMGPVVAGVIGARKPQYDIWGNTVNVSSRMDSTGVPDRIQVTTDLYQVLAAKGYQLECRGVVKVKGKGEMTTYFLNGGPSS

SEQ ID NO: 11644 - protein, 1115 aa, Homo sapiens
MSWFSGLLVPKVDERKTAWGERNGQKRSRRRGTRAGGFCTPRYMSCLRDAEPPSPTPAGPPRCPWQDDAFIRRGGPGKGKELGLRAVALGFEDTEVTTTAGGTAEVAPDAVPRSGRSCWRRLVQVFQSKQFRSAKLERLYQRYFFQMNQSSLTLLMAVLVLLTAVLLAFHAAPARPQPAYVALLACAAALFVGLMVVCNRHSFRQDSMWVVSYVVLGILAAVQVGGALAADPRSPSAGLWCPVFFVYIAYTLLPIRMRAAVLSGLGLSTLHLILAWQLNRGDAFLWKQLGANVLLFLCTNVIGICTHYPAEVSQRQAFQETRGYIQARLHLQHENRQQERLLLSVLPQHVAMEMKEDINTKKEDMMFHKIYIQKHDNVSILFADIEGFTSLASQCTAQELVMTLNELFARFDKLAAENHCLRIKILGDCYYCVSGLPEARADHAHCCVEMGVDMIEAISLVREVTGVNVNMRVGIHSGRVHCGVLGLRKWQFDVWSNDVTLANHMEAGGRAGRIHITRATLQYLNGDYEVEPGRGGERNAYLKEQHIETFLILGASQKRKEEKAMLAKLQRTRANSMEGLMPRWVPDRAFSRTKDSKAFRQMGIDDSSKDNRGTQDALNPEDEVDEFLSRAIDARSIDQLRKDHVRRFLLTFQREDLEKKYSRKVDPRFGAYVACALLVFCFICFIQLLIFPHSTLMLGIYASIFLLLLITVLICAVYSCGSLFPKALQRLSRSIVRSRAHSTAVGIFSVLLVFTSAIANMYFIGNMLLSLLASSVFLHISSIGKLAMIFVLGLIYLVLLLLGPPATIFDNYDLLLGVHGLASSNETFDGLDCPAAGRVALKYMTPVILLVFALALYLHAQQVESTARLDFLWKLQATGEKEEMEELQAYNRRLLHNILPKDVAAHFLARERRNDELYYQSCECVAVMFASIANFSEFYVELEANNEGVECLRLLNEIIADFDEIISEERFRQLEKIKTIGSTYMAASGLNASTYDQVGRSHITALADYAMRLMEQMKHINEHSFNNFQMKIGLNMGPVVAGVIGARKPQYDIWGNTVNVSSRMDSTGVPDRIQVTTDLYQVLAAKGYQLECRGVVKVKGKGEMTTYFLNGGPSS

SEQ ID NO: 11645 - protein, 550 aa, Homo sapiens
MTIISVTLEIHHHITERDADRSLTILDEQLYSFAFSTVHITKKRNGGGSLNNYSSSIPLTPSTSQEDLYFSVPPTANTPTPICKQSMGWSNLFTSEKGSDPDKGRKALESHADTIGSGRAIPIKQGMLLKRSGKWLKTWKKKYVTLCSNGVLTYYSSLGDYMKNIHKKEIDLRTSTIKVPGKWPSLATSACAPISSSKSNGLSKDMEALHMSANSDIGLGDSICFSPSISSTTSPKLNLPPSPHANKKKHLKKKSTNNLKDDGLSSTAEEEEEKFMIVSVTGQTCHFKATTYEERDAWVQAIQSQILASLQSCESSKSKSQLTSQSEAMALQSIQNMRGNSHCVDCETQNPKWASLNLGVLMCIECSGIHRSLGTRLSRVRSLELDDWPVELRKVMSSIGNDLANSIWEGSSQGQTKPSIESTREEKERWIRSKYEHKLFLAPLPCTELSLGQHLLRATADEDLRTAILLLAHGSREEVNETCGEGDGCTALHLACRKGNVVLAQLLIWYGVDVMARDAHGNTALTYARQASSQECINVLLQYGCPDECV

SEQ ID NO: 11646 - protein, 377 aa, Homo sapiens
MCDEDETTALVCDNGSGLVKAGFAGDDAPRAVFPSIVGRPRHQGVMVGMGQKDSYVGDEAQSKRGILTLKYPIEHGIITNWDDMEKIWHHTFYNELRVAPEEHPTLLTEAPLNPKANREKMTQIMFETFNVPAMYVAIQAVLSLYASGRTTGIVLDSGDGVTHNVPIYEGYALPHAIMRLDLAGRDLTDYLMKILTERGYSFVTTAEREIVRDIKEKLCYVALDFENEMATAASSSSLEKSYELPDGQVITIGNERFRCPETLFQPSFIGMESAGIHETTYNSIMKCDIDIRKDLYANNVMSGGTTMYPGIADRMQKEITALAPSTMKIKIIAPPERKYSVWIGGSILASLSTFQQMWITKQEYDEAGPSIVHRKCF

SEQ ID NO: 11647 - protein, 416 aa, Homo sapiens
MAEEQGRERDSVPKPSVLFLHPDLGVGGAERLVLDAALALQARGCSVKIWTAHYDPGHCFAESRELPVRCAGDWLPRGLGWGGRGAAVCAYVRMVFLALYVLFLADEEFDVVVCDQVSACIPVFRLARRRKKILFYCHFPDLLLTKRDSFLKRLYRAPIDWIEEYTTGMADCILVNSQFTAAVFKETFKSLSHIDPDVLYPSLNVTSFDSVVPEKLDDLVPKGKKFLLLSINRYERKKNLTLALEALVQLRGRLTSQDWERVHLIVAGGYDERVLENVEHYQELKKMVQQSDLGQYVTFLRSFSDKQKISLLHSCTCVLYTPSNEHFGIVPLEAMYMQCPVIAVNSGGPLESIDHSVTGFLCEPDPVHFSEAIEKFIREPSLKATMGLAGRARVKEKFSPEAFTEQLYRYVTKLLV

SEQ ID NO: 11648 - protein, 323 aa, Homo sapiens
MPLLKLVHGSPLVFGEKFKLFTLVSACIPVFRLARRRKKILFYCHFPDLLLTKRDSFLKRLYRAPIDWIEEYTTGMADCILVNSQFTAAVFKETFKSLSHIDPDVLYPSLNVTSFDSVVPEKLDDLVPKGKKFLLLSINRYERKKNLTLALEALVQLRGRLTSQDWERVHLIVAGGYDERVLENVEHYQELKKMVQQSDLGQYVTFLRSFSDKQKISLLHSCTCVLYTPSNEHFGIVPLEAMYMQCPVIAVNSGGPLESIDHSVTGFLCEPDPVHFSEAIEKFIREPSLKATMGLAGRARVKEKFSPEAFTEQLYRYVTKLLV

SEQ ID NO: 11649 - protein, 342 aa, Homo sapiens
MDDKPNPEALSDSSERLFSFGVIADVQFADLEDGFNFQGTRRRYYRHSLLHLQGAIEDWNNESSMPCCVLQLGDIIDGYNAQYNASKKSLELVMDMFKRLKVPVHHTWGNHEFYNFSREYLTHSKLNTKFLEDQIVHHPETMPSEDYYAYHFVPFPKFRFILLDAYDLSVLGVDQSSPKYEQCMKILREHNPNTELNSPQGLSEPQFVQFNGGFSQEQLNWLNEVLTFSDTNQEKVVIVSHLPIYPDASDNVCLAWNYRDALAVIWSHECVVCFFAGHTHDGGYSEDPFGVYHVNLEGVIETAPDSQAFGTVHVYPDKMMLKGRGRVPDRIMNYKKERAFHC

SEQ ID NO: 11650 - protein, 205 aa, Homo sapiens
MDDKPNPEALSDSSERLFSFGVIADVQFADLEDGFNFQGTRRRYYRHSLLHLQGAIEDWNNESSMPCCVLQLGDIIDGYNAQYNASKKSLELVMDMFKRLKVPVHHTWGNHEFYNFSREYLTHSKLNTKFLEDQIVHHPETMPSEDYYAYHFVPFPKFRFILLDAYDLSVLGVDQSSPKYEQCMKILREHNPNTELNSPQGELFL

SEQ ID NO: 11651 - protein, 663 aa, Homo sapiens
MGNILTCRVHPSVSLEFDQQQGSVCPSESETYEAGARDRMAGAPMAAAVQPAEVTVEVGEDLHMHHVRDREMPEALEFNPSANPEASTIFQRNSQTDVVEIRRSNCTNHVSAVRFSQQYSLCSTIFLDDSTAIQHYLTMTIISVTLEIPHHITQRDADRTLSIPDEQLHSFAVSTVHIMKKRNGGGSLNNYSSSIPSTPSTSQEDPQFSVPPTANTPTPVCKRSMRWSNLFTSEKGSDPDKERKAPENHADTIGSGRAIPIKQGMLLKRSGKWLKTWKKKYVTLCSNGMLTYYSSLGDYMKNIHKKEIDLQTSTIKVPGKWPSLATSACTPISSSKSNGLSKDMDTGLGDSICFSPSISSTTSPKLNPPPSPHANKKKHLKKKSTNNFMIVSATGQTWHFEATTYEERDAWVQAIQSQILASLQSCESSKSKSQLTSQSEAMALQSIQNMRGNAHCVDCETQNPKWASLNLGVLMCIECSGIHRSLGPHLSRVRSLELDDWPVELRKVMSSIVNDLANSIWEGSSQGQTKPSEKSTREEKERWIRSKYEEKLFLAPLPCTELSLGQQLLRATADEDLQTAILLLAHGSCEEVNETCGEGDGCTALHLACRKGNVVLAQLLIWYGVDVMARDAHGNTALTYARQASSQECINVLLQYGCPDECV

SEQ ID NO: 11652 - protein, 686 aa, Homo sapiens
MGNILTCRVHPSVSLEFDQQQGSVCPSESETYEAGARDRMAGAPMAAAVQPAEVTVEVGEDLHMHHVRDREMPEALEFNLSANPESSTIFQRNSQTEALEFNPSANPEASTIFQRNSQTDVVEIRRSNCTNHVSAVRFSQQYSLCSTIFLDDSTAIQHYLTMTIISVTLEIPHHITQRDADRTLSIPDEQLHSFAVSTVHIMKKRNGGGSLNNYSSSIPSTPSTSQEDPQFSVPPTANTPTPVCKRSMRWSNLFTSEKGSDPDKERKAPENHADTIGSGRAIPIKQGMLLKRSGKWLKTWKKKYVTLCSNGMLTYYSSLGDYMKNIHKKEIDLQTSTIKVPGKWPSLATSACTPISSSKSNGLSKDMDTGLGDSICFSPSISSTTSPKLNPPPSPHANKKKHLKKKSTNNFMIVSATGQTWHFEATTYEERDAWVQAIQSQILASLQSCESSKSKSQLTSQSEAMALQSIQNMRGNAHCVDCETQNPKWASLNLGVLMCIECSGIHRSLGPHLSRVRSLELDDWPVELRKVMSSIVNDLANSIWEGSSQGQTKPSEKSTREEKERWIRSKYEEKLFLAPLPCTELSLGQQLLRATADEDLQTAILLLAHGSCEEVNETCGEGDGCTALHLACRKGNVVLAQLLIWYGVDVMARDAHGNTALTYARQASSQECINVLLQYGCPDECV

SEQ ID NO: 11653 - protein, 377 aa, Homo sapiens
MCEEEDSTALVCDNGSGLCKAGFAGDDAPRAVFPSIVGRPRHQGVMVGMGQKDSYVGDEAQSKRGILTLKYPIEHGIITNWDDMEKIWHHSFYNELRVAPEEHPTLLTEAPLNPKANREKMTQIMFETFNVPAMYVAIQAVLSLYASGRTTGIVLDSGDGVTHNVPIYEGYALPHAIMRLDLAGRDLTDYLMKILTERGYSFVTTAEREIVRDIKEKLCYVALDFENEMATAASSSSLEKSYELPDGQVITIGNERFRCPETLFQPSFIGMESAGIHETTYNSIMKCDIDIRKDLYANNVLSGGTTMYPGIADRMQKEITALAPSTMKIKIIAPPERKYSVWIGGSILASLSTFQQMWISKQEYDEAGPSIVHRKCF

SEQ ID NO: 11654 - protein, 76 aa, Homo sapiens
MASKGLQDLKQQVEGTAQEAVSAAGAAAQQVVDQATEAGQKAMDQLAKTTQETIDKTANQASDTFSGIGKKFGLLK

SEQ ID NO: 11655 - protein, 614 aa, Homo sapiens
MGDWMTVTDPGLSSESKTISQYTSETKMSPSSLYSQQVLCSSIPLSKNVHSFFSAFCTEDNIEQSISYLDQELTTFGFPSLYEESKGKETKRELNIVAVLNCMNELLVLQRKNLLAQENVETQNLKLGSDMDHLQSCYSKLKEQLETSRREMIGLQERDRQLQCKNRNLHQLLKNEKDEVQKLQNIIASRATQYNHDMKRKEREYNKLKERLHQLVMNKKDKKIAMDILNYVGRADGKRGSWRTGKTEARNEDEMYKILLNDYEYRQKQILMENAELKKVLQQMKKEMISLLSPQKKKPRERVDDSTGTVISDVEEDAGELSRESMWDLSCETVREQLTNSIRKQWRILKSHVEKLDNQVSKVHLEGFNDEDVISRQDHEQETEKLELEIQQCKEMIKTQQQLLQQQLATAYDDDTTSLLRDCYLLEEKERLKEEWSLFKEQKKNFERERRSFTEAAIRLGLERKAFEEERASWLKQQFLNMTTFDHQNSENVKLFSAFSGSSDWDNLIVHSRQPQKKPHSVSNGSPVCMSKLTKSLPASPSTSDFCQTRSCISEHSSINVLNITAEEIKPNQVGGECTNQKWSVASRPGSQEGCYSGCSLSYTNSHVEKDDLP

SEQ ID NO: 11656 - protein, 560 aa, Homo sapiens
MGDWMTVTDPGLSSESKTISQYTSETKMSPSSLYSQQVLCSSIPLSKNVHSFFSAFCTEDNIEQSISYLDQELTTFGFPSLYEESKGKETKRELNIVAVLNCMNELLVLQRKNLLAQENVETQNLKLGSDMDHLQSCYSKLKEQLETSRREMIGLQERDRQLQCKNRNLHQLLKNEKDEVQKLQNIIASRATQYNHDMKRKEREYNKLKERLHQLVMNKKDKKIAMDILNYVGRADGKRGSWRTGKTEARNEDEMYKILLNDYEYRQKQILMENAELKKVLQQMKKEMISLLSPQKKKPRERVDDSTGTVISDVEEDAGELSRESMWDLSCETVREQLTNSIRKQWRILKSHVEKLDNQVSKVHLEGFNDEDVISRQDHEQETEKLELEIQQCKEMIKTQQQLLQQQLATAYDDDTTSLLRDCYLLEEKERLKEEWSLFKEQKKNFERERRSFTEAAIRLGLERKAFEEERASWLKQQFLNMTTFDHQNSENVKLFSAFSGSSDWDNLIVHSRQPQKKPHSVSNGSPVCMSKLTKSLPASPSTSDFCQTRSCISEHRAKN

SEQ ID NO: 11657 - protein, 587 aa, Homo sapiens
MSPSSLYSQQVLCSSIPLSKNVHSFFSAFCTEDNIEQSISYLDQELTTFGFPSLYEESKGKETKRELNIVAVLNCMNELLVLQRKNLLAQENVETQNLKLGSDMDHLQSCYSKLKEQLETSRREMIGLQERDRQLQCKNRNLHQLLKNEKDEVQKLQNIIASRATQYNHDMKRKEREYNKLKERLHQLVMNKKDKKIAMDILNYVGRADGKRGSWRTGKTEARNEDEMYKILLNDYEYRQKQILMENAELKKVLQQMKKEMISLLSPQKKKPRERVDDSTGTVISDVEEDAGELSRESMWDLSCETVREQLTNSIRKQWRILKSHVEKLDNQVSKVHLEGFNDEDVISRQDHEQETEKLELEIQQCKEMIKTQQQLLQQQLATAYDDDTTSLLRDCYLLEEKERLKEEWSLFKEQKKNFERERRSFTEAAIRLGLERKAFEEERASWLKQQFLNMTTFDHQNSENVKLFSAFSGSSDWDNLIVHSRQPQKKPHSVSNGSPVCMSKLTKSLPASPSTSDFCQTRSCISEHSSINVLNITAEEIKPNQVGGECTNQKWSVASRPGSQEGCYSGCSLSYTNSHVEKDDLP

SEQ ID NO: 11658 - protein, 715 aa, Homo sapiens
MAADESSQNTLRLQFKAMQEMQHKRLQKQMEKKREKELSLKSRADDQEEPLEVSDGLSLLHAGEPNSKNSFEKRVLEDEIEHLRNELRETVDENGRLYKLLKERDFEIKHLKKKIEEDRFAFTGTAGVAGDVVATKIVELSKKNRLLMAESEGAKTRVKQLTNRIQELERELQTALTRLSAKGATDAGAKPPRAQMGDRALLETPEVKALQDRLVATNLKMSDLRNQIQSVKQELRMAQKVLAREVGEDINVQQLLSSPGTWRGRAQQILVLQSKVQELEKQLGQARSQSAGTASDELSVYPDPRKLSAQEKNLLRIRSLEREKQEGLEKLASERDVLQRELEELKKKFEGMRSRNKLLSSEMKTLKSQMGTLVEKGRHDDELIDALMDQLKQLQEILGSLSLQEEKTRVSQHHLDQQLNSEAQRSNSLVAQLQAMVAEREAKVRQLEMEIGQLNVHYLRNKGVGEGSSGREVSPAYTQFLEDPGLTKSPASAGDHVGRLGSSRSVTSLGHTLVESALTRPSLPSPHRTSPRFSDSPEQKGWQAQVSEIKALWQAAEVERDRLTEFVTVLQKRVEESNSKLLESERKLQEERHRTVVLEQHLEKIRLEPGKASASQRAAPRTKTGLPTSNNRHNPTGSEKKDPSFAQLSDVPVESQMEELTTRLAIQVEENEMLKAALGSALRGKEEDFRMYHEILGQVKSVFLQALRQQKTGKQ

SEQ ID NO: 11659 - protein, 501 aa, Homo sapiens
MPAAMLPYACVLVLLGAHTAPAAGEAGGSCLRWEPHCQQPLPDRVPSTAILPPRLNGPWISTGCEVRPGPEFLTRAYTFYPSRLFRAHQFYYEDPFCGEPAHSLLVKGKVRLRRASWVTRGATEADYHLHKVGIVFHSRRALVDVTGRLNQTRAGRDCARRLPPARAWLPGALYELRSARAQGDCLEALGLTMHELSLVRVQRRLQPQPRASPRLVEELYLGDIHTDPAERRHYRPTGYQRPLQSALHHVQPCPACGLIARSDVHHPPVLPPPLALPLHLGGWWVSSGCEVRPAVLFLTRLFTFHGHSRSWEGYYHHFSDPACRQPTFTVYAAGRYTRGTPSTRVRGGTELVFEVTRAHVTPMDQVTTAMLNFSEPSSCGGAGAWSMGTERDVTATNGCLPLGIRLPHVEYELFKMEQDPLGQSLLFIGQRPTDGSSPDTPEKRPTSYQAPLVLCHGEAPDFSRPPQHRPSLQKHPSTGGLHIAPFPLLPLVLGLAFLHWL

SEQ ID NO: 11660 - protein, 185 aa, Homo sapiens
MGKKQNKKKVEEVLEEEEEEYVVEKVLDRRVVKGKVEYLLKWKGFSDEDNTWEPEENLDCPDLIAEFLQSQKTAHETDKSEGGKRKADSDSEDKGEESKPKKKKEESEKPRGFARGLEPERIIGATDSSGELMFLMKWKNSDEADLVPAKEANVKCPQVVISFYEERLTWHSYPSEDDDKKDDKN

SEQ ID NO: 11661 - protein, 951 aa, Homo sapiens
MLGSMARKKPRNTSRLPLALNPLKSKDVLAVLAERNEAIVPVGAWVEPASPGSSEIPAYTSAYLIEEELKEQLRKKQEALKHFQKQVKYRVNQQIRLRKKQQLQKSYERAQKEGSIAMQSSATHLTSKRTSVFPNNLNVAIGSSRLPPSLMPGDGIEDEENQNELFQQQAQALSETMKQARHRLASFKTVIKKKGSVFPDDGRKSFLTREEVLSRKPASTGINTGIRGELPIKVHQGLLAAVPYQNYMENQELDYEEPDYEESSSLVTDEKGKEDLFGRGQQDQQAIHSEDKNKPFSRVQKVKFKNPLFVLMEEEEQKQLHFEGLQDILPEAQDYFLEAQGDLLETQGDLTGIQSVKPDTQAVEMKVQVTEPEGQAIEPEGQPIKTETQGIMLKAQSIELEEGSIVLKTQDFLPTNQALLTKNQDVLLKDHCVLPKDQSILLKYQDQDFLPRDQHVLHKDQDILPKYQDQNFLPKDQNFLSRDQHVLPKDQDILPKYQDQNFLPKDQNFLSRDQHVLPKDQNILPKYQGQDFLPKDQDFLSRDQHVLPKDWNILPKCQDQDFLPRDQGVLPKDQNILPICQDQDFLPRDQGYLPKDQNILPICQDRDFLPRDLHVLSNDQNILPKCQDQDFLPKYQKVHFKEPYSDMTDEKGREDFSLADYQCLPPKSQDQDDIKNQQPASFMREERVREELPLDYHQYVVPKIQDQDSPREQNKHIKLPSSFEKWEIARGNTPGVPLAYDRYQSGLSTEFQAPLAFQSDVDKEEDKKERQKQYLRHRRLFMDIEREQVKEQQRQKEQKKKIEKIKKKREQECYAAEQRILRMNFHEDPYSGEKLSEILAQLQLQEIKGTREKQQREKEYLRYVEALRAQIQEKMQLYNITLPPLCCCGPDFWDAHPDTCANNCIFYKNHRAYTRALHSFINSCDVPGGNSTLRVAIHNFASAHRRTLKNL

SEQ ID NO: 11662 - protein, 615 aa, Homo sapiens
MCSEARLARRLRDALREEEPWAVEELLRCGADPNLVLEDGAAAVHLAAGARHPRGLRCLGALLRQGGDPNARSVEALTPLHVAAAWGCRRGLELLLSQGADPALRDQDGLRPLDLALQQGHLECARVLQDLDTRTRTRTRIGAETQEPEPAPGTPGLSGPTDETLDSIALQKQPCRGDNRDIGLEADPGPPSLPVPLETVDKHGSSASPPGHWDYSSDASFVTAVEVSGAEDPASDTPPWAGSLPPTRQGLLHVVHANQRVPRSQGTEAELNARLQALTLTPPNAAGFQSSPSSMPLLDRSPAHSPPRTPTPGASDCHCLWEHQTSIDSDMATLWLTEDEASSTGGREPVGPCRHLPVSTVSDLELLKGLRALGENPHPITPFTRQLYHQQLEEAQIAPGPEFSGHSLELAAALRTGCIPDVQADEDALAQQFEQPDPARRWREGVVKSSFTYLLLDPRETQDLPARAFSLTPAERLQTFIRAIFYVGKGTRARPYVHLWEALGHHGRSRKQPHQACPKVRQILDIWASGCGVVSLHCFQHVVAVEAYTREACIVEALGIQTLTNQKQGHCYGVVAGWPPARRRRLGVHLLHRALLVFLAEGERQLHPQDIQARG

SEQ ID NO: 11663 - protein, 575 aa, Homo sapiens
MRCGRRSRVEELLRCGADPNLVLEDGAAAVHLAAGARHPRGLRCLGALLRQGGDPNARSVEALTPLHVAAAWGCRRGLELLLSQGADPALRDQDGLRPLDLALQQGHLECARVLQDLDTRTRTRTRIGAETQEPEPAPGTPGLSGPTDETLDSIALQKQPCRGDNRDIGLEADPGPPSLPVPLETVDKHGSSASPPGHWDYSSDASFVTAVEVSGAEDPASDTPPWAGSLPPTRQGLLHVVHANQRVPRSQGTEAELNARLQALTLTPPNAAGFQSSPSSMPLLDRSPAHSPPRTPTPGASDCHCLWEHQTSIDSDMATLWLTEDEASSTGGREPVGPCRHLPVSTVSDLELLKGLRALGPEFSGHSLELAAALRTGCIPDVQADEDALAQQFEQPDPARRWREGVVKSSFTYLLLDPRETQDLPARAFSLTPAERLQTFIRAIFYVGKGTRARPYVHLWEALGHHGRSRKQPHQACPKVRQILDIWASGCGVVSLHCFQHVVAVEAYTREACIVEALGIQTLTNQKQGHCYGVVAGWPPARRRRLGVHLLHRALLVFLAEGERQLHPQDIQARG

SEQ ID NO: 11664 - protein, 331 aa, Homo sapiens
MSRQLSRARPATVLGAMEMGRRMDAPTSAAVTRAFLERGHTEIDTAFLYSDGQSETILGGLGLRMGSSDCRVKIATKANPWIGNSLKPDSVRSQLETSLKRLQCPRVDLFYLHAPDHSAPVEETLRACHQLHQEGKFVELGLSNYAAWEVAEICTLCKSNGWILPTVYQGMYSATTRQVETELFPCLRHFGLRFYAYNPLAGGLLTGKYKYEDKDGKQPVGRFFGTQWAEIYRNHFWKEHHFEGIALVEKALQAAYGASAPSMTSAALRWMYHHSQLQGAHGDAVILGMSSLEQLEQNLAAAEEGPLEPAVVDAFNQAWHLFAHECPNYFI

SEQ ID NO: 11665 - protein, 249 aa, Homo sapiens
MSRQLSRARPATVLGAMEMGRRMDAPTSAAVTRAFLERGHTEIDTAFLYSDGQSETILGGLGLRMGSSDCRVKIATKANPWIGNSLKPDSVRSQLETSLKRLQCPRVDLFYLHAPDHSAPVEETLRACHQLHQEGKFVELGLSNYAAWEVAEICTLCKSNGWILPTVYQLLEGAPLRGHCPGGEGPAGRVWRQRSQHDLGRPPVDVPPLTAAGCPRGRGHPGHVQPGAAGAELGSGRGRAPGAGCRGRL

SEQ ID NO: 11666 - protein, 244 aa, Homo sapiens
MAPRPLGPLVLALGGAAAVLGSVLFILWKTYFGRGRERRWDRGEAWWGAEAARLPEWDEWDPEDEEDEEPALEELEQREVLVLGLDGAGKSTFLRVLSGKPPLEGHIPTWGFNSVRLPTKDFEVDLLEIGGSQNLRFYWKEFVSEVDVLVFVVDSADRLRLPWARQELHKLLDKDPDLPVVVVANKQDLSEAMSMGELQRELGLQAIDNQREVFLLAASIAPAGPTFEEPGTVHIWKLLLELLS

SEQ ID NO: 11667 - protein, 220 aa, Homo sapiens
MGNCAKRPWRRGPKDPLQWLGSPPRGSCPSPSSSPKEQGDPAPGVQGYSVLNSLVGPACIFLRPSIAATQLDRELRPEEIEELQVAFQEFDRDRDGYIGCRELGACMRTLGYMPTEMELIEISQQISGGKVDFEDFVELMGPKLLAETADMIGVRELRDAFREFDTNGDGRISVGELRAALKALLGERLSQREVDEILQDVDLNGDGLVDFEEFVRMMSR

SEQ ID NO: 11668 - protein, 163 aa, Homo sapiens
MGNCAKRPWRRGPKDRELRPEEIEELQVAFQEFDRDRDGYIGCRELGACMRTLGYMPTEMELIEISQQISGGKVDFEDFVELMGPKLLAETADMIGVRELRDAFREFDTNGDGRISVGELRAALKALLGERLSQREVDEILQDVDLNGDGLVDFEEFVRMMSR

SEQ ID NO: 11669 - protein, 317 aa, Homo sapiens
MPWDARRPGGGADGGPEASGAARSRAQKQCRKSSFAFYQAVRDLLPVWLLEDMRASEAFHWDERGRAAAYSPSEALLYALVHDHQAYAHYLLATFPRRALAPPSAGFRCCAAPGPHVALAVRYNRVGILRRILRTLRDFPAEERARVLDRRGCSRVEGGGTSLHVACELARPECLFLLLGHGASPGLRDGGGLTPLELLLRQLGRDAGATPSAAGAPASAPGEPRQRRLLLLDLLALYTPVGAAGSARQELLGDRPRWQRLLGEDKFQWLAGLAPPSLFARAMQVLVTAISPGRFPEALDELPLPPFLQPLDLTGKG

SEQ ID NO: 11670 - protein, 254 aa, Homo sapiens
MNKLFSFWKRKNETRSQGYNLREKDLKKLHRAASVGDLKKLKEYLQIKKYDVNMQDKKYRTPLHLACANGHTDVVLFLIEQQCKINVRDSENKSPLIKAVQCQNEDCATILLNFGADPDLRDIRYNTVLHYAVCGQSLSLVEKLLEYEADLEAKNKDGYTPLLVAVINNNPKMVKFLLEKGADVNASDNYQRTALILAVSGEPPCLVKLLLQQGVELCYEGIVDSQLRNMFISMVLLHRYPQFTASHGKKKHAK

SEQ ID NO: 11671 - protein, 274 aa, Homo sapiens
MNKLFSFWKRKNETRSQGYNLREKDLKKLHRAASVGDLKKLKEYLQIKKYDVNMQDKKYSVVQSSRWLLSYTTPLNDFIRTPLHLACANGHTDVVLFLIEQQCKINVRDSENKSPLIKAVQCQNEDCATILLNFGADPDLRDIRYNTVLHYAVCGQSLSLVEKLLEYEADLEAKNKDGYTPLLVAVINNNPKMVKFLLEKGADVNASDNYQRTALILAVSGEPPCLVKLLLQQGVELCYEGIVDSQLRNMFISMVLLHRYPQFTASHGKKKHAK

SEQ ID NO: 11672 - protein, 183 aa, Homo sapiens
MASNKTTLQKMGKKQNGKSKKVEEAEPEEFVVEKVLDRRVVNGKVEYFLKWKGFTDADNTWEPEENLDCPELIEAFLNSQKAGKEKDGTKRKSLSDSESDDSKSKKKRDAADKPRGFARGLDPERIIGATDSSGELMFLMKWKDSDEADLVLAKEANMKCPQIVIAFYEERLTWHSCPEDEAQ

SEQ ID NO: 11673 - protein, 196 aa, Homo sapiens
MGSVNSRGHKAEAQVVMMGLDSAGKTTLLYKLKGHQLVETLPTVGFNVEPLKAPGHVSLTLWDVGGQAPLRASWKDYLEGTDILVYVLDSTDEARLPESAAELTEVLNDPNMAGVPFLVLANKQEAPDALPLLKIRNRLSLERFQDHCWELRGCSALTGEGLPEALQSLWSLLKSRSCMCLQARAHGAERGDSKRS

SEQ ID NO: 11674 - protein, 726 aa, Homo sapiens
MSPAPDAAPAPASISLFDLSADAPVFQGLSLVSHAPGEALARAPRTSCSGSGERESPERKLLQGPMDISEKLFCSTCDQTFQNHQEQREHYKLDWHRFNLKQRLKDKPLLSALDFEKQSSTGDLSSISGSEDSDSASEEDLQTLDRERATFEKLSRPPGFYPHRVLFQNAQGQFLYAYRCVLGPHQDPPEEAELLLQNLQSRGPRDCVVLMAAAGHFAGAIFQGREVVTHKTFHRYTVRAKRGTAQGLRDARGGPSHSAGANLRRYNEATLYKDVRDLLAGPSWAKALEEAGTILLRAPRSGRSLFFGGKGAPLQRGDPRLWDIPLATRRPTFQELQRVLHKLTTLHVYEEDPREAVRLHSPQTHWKTVREERKKPTEEEIRKICRDEKEALGQNEESPKQGSGSEGEDGFQVELELVELTVGTLDLCESEVLPKRRRRKRNKKEKSRDQEAGAHRTLLQQTQEEEPSTQSSQAVAAPLGPLLDEAKAPGQPELWNALLAACRAGDVGVLKLQLAPSPADPRVLSLLSAPLGSGGFTLLHAAAAAGRGSVVRLLLEAGADPTVQDSRARPPYTVAADKSTRNEFRRFMEKNPDAYDYNKAQVPGPLTPEMEARQATRKREQKAARRQREEQQQRQQEQEEREREEQRRFAALSDREKRALAAERRLAAQLGAPTSPIPDSAIVNTRRCWSCGASLQGLTPFHYLDFSFCSTRCLQDHRRQAGRPSS

SEQ ID NO: 11675 - protein, 204 aa, Homo sapiens
MQSALVGSWHNNGFYGHYRSQFKSESAREYHLAAKPQPPAVFLQRCQEPAQRHFFSKHDNRTSFDKGPYCLLQGIGRRKDLERLWQRHTFLRWAPCEIELRQQGPLESSYQADFRPGPGLSGLPQHLIHFVQVQPSHTRTTYQQNFCCPSQGGHYGSYKVGPQAPVTDVLPDLPGIPRPKLLQHYLHAGVSECLNWSRALNKDS

SEQ ID NO: 11676 - protein, 2161 aa, Homo sapiens
MMMMMMMKKMQHQRQQQADHANEANYARGTRLPLSGEGPTSQPNSSKQTVLSWQAAIDAARQAKAAQTMSTSAPPPVGSLSQRKRQQYAKSKKQGNSSNSRPARALFCLSLNNPIRRACISIVEWKPFDIFILLAIFANCVALAIYIPFPEDDSNSTNHNLEKVEYAFLIIFTVETFLKIIAYGLLLHPNAYVRNGWNLLDFVIVIVGLFSVILEQLTKETEGGNHSSGKSGGFDVKALRAFRVLRPLRLVSGVPSLQVVLNSIIKAMVPLLHIALLVLFVIIIYAIIGLELFIGKMHKTCFFADSDIVAEEDPAPCAFSGNGRQCTANGTECRSGWVGPNGGITNFDNFAFAMLTVFQCITMEGWTDVLYWMNDAMGFELPWVYFVSLVIFGSFFVLNLVLGVLSGEFSKEREKAKARGDFQKLREKQQLEEDLKGYLDWITQAEDIDPENEEEGGEEGKRNTSMPTSETESVNTENVSGEGENRGCCGSLCQAISKSKLSRRWRRWNRFNRRRCRAAVKSVTFYWLVIVLVFLNTLTISSEHYNQPDWLTQIQDIANKVLLALFTCEMLVKMYSLGLQAYFVSLFNRFDCFVVCGGITETILVELEIMSPLGISVFRCVRLLRIFKVTRHWTSLSNLVASLLNSMKSIASLLLLLFLFIIIFSLLGMQLFGGKFNFDETQTKRSTFDNFPQALLTVFQILTGEDWNAVMYDGIMAYGGPSSSGMIVCIYFIILFICGNYILLNVFLAIAVDNLADAESLNTAQKEEAEEKERKKIARKESLENKKNNKPEVNQIANSDNKVTIDDYREEDEDKDPYPPCDVPVGEEEEEEEEDEPEVPAGPRPRRISELNMKEKIAPIPEGSAFFILSKTNPIRVGCHKLINHHIFTNLILVFIMLSSAALAAEDPIRSHSFRNTILGYFDYAFTAIFTVEILLKMTTFGAFLHKGAFCRNYFNLLDMLVVGVSLVSFGIQSSAISVVKILRVLRVLRPLRAINRAKGLKHVVQCVFVAIRTIGNIMIVTTLLQFMFACIGVQLFKGKFYRCTDEAKSNPEECRGLFILYKDGDVDSPVVRERIWQNSDFNFDNVLSAMMALFTVSTFEGWPALLYKAIDSNGENIGPIYNHRVEISIFFIIYIIIVAFFMMNIFVGFVIVTFQEQGEKEYKNCELDKNQRQCVEYALKARPLRRYIPKNPYQYKFWYVVNSSPFEYMMFVLIMLNTLCLAMQHYEQSKMFNDAMDILNMVFTGVFTVEMVLKVIAFKPKGYFSDAWNTFDSLIVIGSIIDVALSEADPTESENVPVPTATPGNSEESNRISITFFRLFRVMRLVKLLSRGEGIRTLLWTFIKSFQALPYVALLIAMLFFIYAVIGMQMFGKVAMRDNNQINRNNNFQTFPQAVLLLFRCATGEAWQEIMLACLPGKLCDPESDYNPGEEYTCGSNFAIVYFISFYMLCAFLIINLFVAVIMDNFDYLTRDWSILGPHHLDEFKRIWSEYDPEAKGRIKHLDVVTLLRRIQPPLGFGKLCPHRVACKRLVAMNMPLNSDGTVMFNATLFALVRTALKIKTEGNLEQANEELRAVIKKIWKKTSMKLLDQVVPPAGDDEVTVGKFYATFLIQDYFRKFKKRKEQGLVGKYPAKNTTIALQAGLRTLHDIGPEIRRAISCDLQDDEPEETKREEEDDVFKRNGALLGNHVNHVNSDRRDSLQQTNTTHRPLHVQRPSIPPASDTEKPLFPPAGNSVCHNHHNHNSIGKQVPTSTNANLNNANMSKAAHGKRPSIGNLEHVSENGHHSSHKHDREPQRRSSVKRTRYYETYIRSDSGDEQLPTICREDPEIHGYFRDPHCLGEQEYFSSEECYEDDSSPTWSRQNYGYYSRYPGRNIDSERPRGYHHPQGFLEDDDSPVCYDSRRSPRRRLLPPTPASHRRSSFNFECLRRQSSQEEVPSSPIFPHRTALPLHLMQQQIMAVAGLDSSKAQKYSPSHSTRSWATPPATPPYRDWTPCYTPLIQVEQSEALDQVNGSLPSLHRSSWYTDEPDISYRTFTPASLTVPSSFRNKNSDKQRSADSLVEAVLISEGLGRYARDPKFVSATKHEIADACDLTIDEMESAASTLLNGNVRPRANGDVGPLSHRQDYELQDFGPGYSDEEPDPGRDEEDLADEMICITTL

SEQ ID NO: 11677 - protein, 2181 aa, Homo sapiens
MMMMMMMKKMQHQRQQQADHANEANYARGTRLPLSGEGPTSQPNSSKQTVLSWQAAIDAARQAKAAQTMSTSAPPPVGSLSQRKRQQYAKSKKQGNSSNSRPARALFCLSLNNPIRRACISIVEWKPFDIFILLAIFANCVALAIYIPFPEDDSNSTNHNLEKVEYAFLIIFTVETFLKIIAYGLLLHPNAYVRNGWNLLDFVIVIVGLFSVILEQLTKETEGGNHSSGKSGGFDVKALRAFRVLRPLRLVSGVPSLQVVLNSIIKAMVPLLHIALLVLFVIIIYAIIGLELFIGKMHKTCFFADSDIVAEEDPAPCAFSGNGRQCTANGTECRSGWVGPNGGITNFDNFAFAMLTVFQCITMEGWTDVLYWVNDAIGWEWPWVYFVSLIILGSFFVLNLVLGVLSGEFSKEREKAKARGDFQKLREKQQLEEDLKGYLDWITQAEDIDPENEEEGGEEGKRNTSMPTSETESVNTENVSGEGENRGCCGSLWCWWRRRGAAKAGPSGCRRWGQAISKSKLSRRWRRWNRFNRRRCRAAVKSVTFYWLVIVLVFLNTLTISSEHYNQPDWLTQIQDIANKVLLALFTCEMLVKMYSLGLQAYFVSLFNRFDCFVVCGGITETILVELEIMSPLGISVFRCVRLLRIFKVTRHWTSLSNLVASLLNSMKSIASLLLLLFLFIIIFSLLGMQLFGGKFNFDETQTKRSTFDNFPQALLTVFQILTGEDWNAVMYDGIMAYGGPSSSGMIVCIYFIILFICGNYILLNVFLAIAVDNLADAESLNTAQKEEAEEKERKKIARKESLENKKNNKPEVNQIANSDNKVTIDDYREEDEDKDPYPPCDVPVGEEEEEEEEDEPEVPAGPRPRRISELNMKEKIAPIPEGSAFFILSKTNPIRVGCHKLINHHIFTNLILVFIMLSSAALAAEDPIRSHSFRNTILGYFDYAFTAIFTVEILLKMTTFGAFLHKGAFCRNYFNLLDMLVVGVSLVSFGIQSSAISVVKILRVLRVLRPLRAINRAKGLKHVVQCVFVAIRTIGNIMIVTTLLQFMFACIGVQLFKGKFYRCTDEAKSNPEECRGLFILYKDGDVDSPVVRERIWQNSDFNFDNVLSAMMALFTVSTFEGWPALLYKAIDSNGENIGPIYNHRVEISIFFIIYIIIVAFFMMNIFVGFVIVTFQEQGEKEYKNCELDKNQRQCVEYALKARPLRRYIPKNPYQYKFWYVVNSSPFEYMMFVLIMLNTLCLAMQHYEQSKMFNDAMDILNMVFTGVFTVEMVLKVIAFKPKGYFSDAWNTFDSLIVIGSIIDVALSEADPTESENVPVPTATPGNSEESNRISITFFRLFRVMRLVKLLSRGEGIRTLLWTFIKSFQALPYVALLIAMLFFIYAVIGMQMFGKVAMRDNNQINRNNNFQTFPQAVLLLFRCATGEAWQEIMLACLPGKLCDPESDYNPGEEYTCGSNFAIVYFISFYMLCAFLIINLFVAVIMDNFDYLTRDWSILGPHHLDEFKRIWSEYDPEAKGRIKHLDVVTLLRRIQPPLGFGKLCPHRVACKRLVAMNMPLNSDGTVMFNATLFALVRTALKIKTEGNLEQANEELRAVIKKIWKKTSMKLLDQVVPPAGDDEVTVGKFYATFLIQDYFRKFKKRKEQGLVGKYPAKNTTIALQAGLRTLHDIGPEIRRAISCDLQDDEPEETKREEEDDVFKRNGALLGNHVNHVNSDRRDSLQQTNTTHRPLHVQRPSIPPASDTEKPLFPPAGNSVCHNHHNHNSIGKQVPTSTNANLNNANMSKAAHGKRPSIGNLEHVSENGHHSSHKHDREPQRRSSVKRTRYYETYIRSDSGDEQLPTICREDPEIHGYFRDPHCLGEQEYFSSEECYEDDSSPTWSRQNYGYYSRYPGRNIDSERPRGYHHPQGFLEDDDSPVCYDSRRSPRRRLLPPTPASHRRSSFNFECLRRQSSQEEVPSSPIFPHRTALPLHLMQQQIMAVAGLDSSKAQKYSPSHSTRSWATPPATPPYRDWTPCYTPLIQVEQSEALDQVNGSLPSLHRSSWYTDEPDISYRTFTPASLTVPSSFRNKNSDKQRSADSLVEAVLISEGLGRYARDPKFVSATKHEIADACDLTIDEMESAASTLLNGNVRPRANGDVGPLSHRQDYELQDFGPGYSDEEPDPGRDEEDLADEMICITTL

SEQ ID NO: 11678 - protein, 1647 aa, Homo sapiens
MMMMMMMKKMQHQRQQQADHANEANYARGTRLPLSGEGPTSQPNSSKQTVLSWQAAIDAARQAKAAQTMSTSAPPPVGSLSQRKRQQYAKSKKQGNSSNSRPARALFCLSLNNPIRRACISIVEWKPFDIFILLAIFANCVALAIYIPFPEDDSNSTNHNLEKVEYAFLIIFTVETFLKIIAYGLLLHPNAYVRNGWNLLDFVIVIVGLFSVILEQLTKETEGGNHSSGKSGGFDVKALRAFRVLRPLRLVSGVPSLQVVLNSIIKAMVPLLHIALLVLFVIIIYAIIGLELFIGKMHKTCFFADSDIVAEEDPAPCAFSGNGRQCTANGTECRSGWVGPNGGITNFDNFAFAMLTVFQCITMEGWTDVLYWMNDAMGFELPWVYFVSLVIFGSFFVLNLVLGVLSGEFSKEREKAKARGDFQKLREKQQLEEDLKGYLDWITQAEDIDPENEEEGGEEGKRNTSMPTSETESVNTENVSGEGENRGCCGSLCQAISKSKLSRRWRRWNRFNRRRCRAAVKSVTFYWLVIVLVFLNTLTISSEHYNQPDWLTQIQDIANKVLLALFTCEMLVKMYSLGLQAYFVSLFNRFDCFVVCGGITETILVELEIMSPLGISVFRCVRLLRIFKVTRHWTSLSNLVASLLNSMKSIASLLLLLFLFIIIFSLLGMQLFGGKFNFDETQTKRSTFDNFPQALLTVFQILTGEDWNAVMYDGIMAYGGPSSSGMIVCIYFIILFICGNYILLNVFLAIAVDNLADAESLNTAQKEEAEEKERKKIARKESLENKKNNKPEVNQIANSDNKVTIDDYREEDEDKDPYPPCDVPVGEEEEEEEEDEPEVPAGPRPRRISELNMKEKIAPIPEGSAFFILSKTNPIRVGCHKLINHHIFTNLILVFIMLSSAALAAEDPIRSHSFRNTILGYFDYAFTAIFTVEILLKMTTFGAFLHKGAFCRNYFNLLDMLVVGVSLVSFGIQSSAISVVKILRVLRVLRPLRAINRAKGLKHVVQCVFVAIRTIGNIMIVTTLLQFMFACIGVQLFKGKFYRCTDEAKSNPEECRGLFILYKDGDVDSPVVRERIWQNSDFNFDNVLSAMMALFTVSTFEGWPALLYKAIDSNGENIGPIYNHRVEISIFFIIYIIIVAFFMMNIFVGFVIVTFQEQGEKEYKNCELDKNQRQCVEYALKARPLRRYIPKNPYQYKFWYVVNSSPFEYMMFVLIMLNTLCLAMQHYEQSKMFNDAMDILNMVFTGVFTVEMVLKVIAFKPKGYFSDAWNTFDSLIVIGSIIDVALSEADPTESENVPVPTATPGNSEESNRISITFFRLFRVMRLVKLLSRGEGIRTLLWTFIKSFQALPYVALLIAMLFFIYAVIGMQMFGKVAMRDNNQINRNNNFQTFPQAVLLLFRCATGEAWQEIMLACLPGKLCDPESDYNPGEEYTCGSNFAIVYFISFYMLCAFLIINLFVAVIMDNFDYLTRDWSILGPHHLDEFKRIWSEYDPEAKGRIKHLDVVTLLRRIQPPLGFGKLCPHRVACKRLVAMNMPLNSDGTVMFNATLFALVRTALKIKTEGNLEQANEELRAVIKKIWKKTSMKLLDQVVPPAGDDEVTVGKFYATFLIQDYFRKFKKRKEQGLVGKYPAKNTTIALQMLERML

SEQ ID NO: 11679 - protein, 2137 aa, Homo sapiens
MMMMMMMKKMQHQRQQQADHANEANYARGTRLPLSGEGPTSQPNSSKQTVLSWQAAIDAARQAKAAQTMSTSAPPPVGSLSQRKRQQYAKSKKQGNSSNSRPARALFCLSLNNPIRRACISIVEWKPFDIFILLAIFANCVALAIYIPFPEDDSNSTNHNLEKVEYAFLIIFTVETFLKIIAYGLLLHPNAYVRNGWNLLDFVIVIVGLFSVILEQLTKETEGGNHSSGKSGGFDVKALRAFRVLRPLRLVSGVPSLQVVLNSIIKAMVPLLHIALLVLFVIIIYAIIGLELFIGKMHKTCFFADSDIVAEEDPAPCAFSGNGRQCTANGTECRSGWVGPNGGITNFDNFAFAMLTVFQCITMEGWTDVLYWMNDAMGFELPWVYFVSLVIFGSFFVLNLVLGVLSGEFSKEREKAKARGDFQKLREKQQLEEDLKGYLDWITQAEDIDPENEEEGGEEGKRNTSMPTSETESVNTENVSGEGENRGCCGSLCQAISKSKLSRRWRRWNRFNRRRCRAAVKSVTFYWLVIVLVFLNTLTISSEHYNQPDWLTQIQDIANKVLLALFTCEMLVKMYSLGLQAYFVSLFNRFDCFVVCGGITETILVELEIMSPLGISVFRCVRLLRIFKVTRHWTSLSNLVASLLNSMKSIASLLLLLFLFIIIFSLLGMQLFGGKFNFDETQTKRSTFDNFPQALLTVFQILTGEDWNAVMYDGIMAYGGPSSSGMIVCIYFIILFICGNYILLNVFLAIAVDNLADAESLNTAQKEEAEEKERKKIARKESLENKKNNKPEVNQIANSDNKVTIDDYREEDEDKDPYPPCDVPVGEEEEEEEEDEPEVPAGPRPRRISELNMKEKIAPIPEGSAFFILSKTNPIRVGCHKLINHHIFTNLILVFIMLSSAALAAEDPIRSHSFRNTILGYFDYAFTAIFTVEILLKMTTFGAFLHKGAFCRNYFNLLDMLVVGVSLVSFGIQSSAISVVKILRVLRVLRPLRAINRAKGLKHVVQCVFVAIRTIGNIMIVTTLLQFMFACIGVQLFKGKFYRCTDEAKSNPEECRGLFILYKDGDVDSPVVRERIWQNSDFNFDNVLSAMMALFTVSTFEGWPALLYKAIDSNGENIGPIYNHRVEISIFFIIYIIIVAFFMMNIFVGFVIVTFQEQGEKEYKNCELDKNQRQCVEYALKARPLRRYIPKNPYQYKFWYVVNSSPFEYMMFVLIMLNTLCLAMQHYEQSKMFNDAMDILNMVFTGVFTVEMVLKVIAFKPKGYFSDAWNTFDSLIVIGSIIDVALSEADNSEESNRISITFFRLFRVMRLVKLLSRGEGIRTLLWTFIKSFQALPYVALLIAMLFFIYAVIGMQMFGKVAMRDNNQINRNNNFQTFPQAVLLLFRCATGEAWQEIMLACLPGKLCDPESDYNPGEEYTCGSNFAIVYFISFYMLCAFLIINLFVAVIMDNFDYLTRDWSILGPHHLDEFKRIWSEYDPEAKGRIKHLDVVTLLRRIQPPLGFGKLCPHRVACKRLVAMNMPLNSDGTVMFNATLFALVRTALKIKTEGNLEQANEELRAVIKKIWKKTSMKLLDQVVPPAGDDEVTVGKFYATFLIQDYFRKFKKRKEQGLVGKYPAKNTTIALQAGLRTLHDIGPEIRRAISCDLQDDEPEETKREEEDDVFKRNGALLGNHVNHVNSDRRDSLQQTNTTHRPLHVQRPSIPPASDTEKPLFPPAGNSVCHNHHNHNSIGKQVPTSTNANLNNANMSKAAHGKRPSIGNLEHVSENGHHSSHKHDREPQRRSSVKRSDSGDEQLPTICREDPEIHGYFRDPHCLGEQEYFSSEECYEDDSSPTWSRQNYGYYSRYPGRNIDSERPRGYHHPQGFLEDDDSPVCYDSRRSPRRRLLPPTPASHRRSSFNFECLRRQSSQEEVPSSPIFPHRTALPLHLMQQQIMAVAGLDSSKAQKYSPSHSTRSWATPPATPPYRDWTPCYTPLIQVEQSEALDQVNGSLPSLHRSSWYTDEPDISYRTFTPASLTVPSSFRNKNSDKQRSADSLVEAVLISEGLGRYARDPKFVSATKHEIADACDLTIDEMESAASTLLNGNVRPRANGDVGPLSHRQDYELQDFGPGYSDEEPDPGRDEEDLADEMICITTL

SEQ ID NO: 11680 - protein, 833 aa, Homo sapiens
MSPEKQHREEDEVDSVLLSASKILNSSEGVKESGCSDTEYGCIAESENQIQPQSALKVLQQQLESFQALRMQTLQNVSMVQSEISEILNKSIIEVENPQFSSEKNLVFGTRIEKDLPTENQEENLSMEKSHHFEDSKTLHSVEEKLSGDSVNSLPQSVNVPSQIHSEDTLTLRTSTDNLSSNIIIHPSENSDILKNYNNFYRFLPTAPPNVMSQADTVILDKSKITVPFLKHGFCENLDDICHSIKQMKEELQKSHDGEVALTNELQTLQTDPDVHRNGKYDMSPIHQDKMNFIKEENLDGNLNEDIKSKRISELEALVKKLLPFRETVSKFHVHFCRKCKKLSKSEMHRGKKNEKNNKEIPITGKNITDLKFHSRVPRYTLSFLDQTKHEMKDKERQPFLVKQGSIISENEKTSKVNSVTEQCVAKIQYLQNYLKESVQIQKKVMELESENLNLKSKMKPLIFTTQSLIQKVETYEKQLKNLVEEKSTIQSKLSKTEEYSKECLKEFKKIISKYNVLQGQNKTLEEKNIQLSLEKQQMMEALDQLKSKEHKTQSDMAIVNNENNRMSIEMEAMKTNILLIQDEKEMLEKKTHQLLKEKSSLGNELKESQLEIIQLKEKERLAKTEQETLLQIIETVKDEKLNLETTLQESTAARQIMEREIENIQTYQSTAEENFLQEIKNAKSEASIYKNSLSEIGKECEMLSKMVMETKTDNQILKEELKKHSQENIKFENSISRLTEDKILLENYVRSIENERDTLEFEMRHLQREYLSLSDKICNQHNDPSKTTYISRREKFHFDNYTHEDTSSPQSRPLASDLKGYFKVKDRTLKHH

SEQ ID NO: 11681 - protein, 796 aa, Homo sapiens
MSPEKQHREEDEVDSVLLSASKILNSSEGVKESGCSDTEYGCIAESENQIQPQSALKVLQQQLESFQALRMQTLQNVSMPTENQEENLSMEKSHHFEDSKTLHSVEEKLSGDSVNSLPQSVNVPSQIHSEDTLTLRTSTDNLSSNIIIHPSENSDILKNYNNFYRFLPTAPPNVMSQADTVILDKSKITVPFLKHGFCENLDDICHSIKQMKEELQKSHDGEVALTNELQTLQTDPDVHRNGKYDMSPIHQDKMNFIKEENLDGNLNEDIKSKRISELEALVKKLLPFRETVSKFHVHFCRKCKKLSKSEMHRGKKNEKNNKEIPITGKNITDLKFHSRVPRYTLSFLDQTKHEMKDKERQPFLVKQGSIISENEKTSKVNSVTEQCVAKIQYLQNYLKESVQIQKKVMELESENLNLKSKMKPLIFTTQSLIQKVETYEKQLKNLVEEKSTIQSKLSKTEEYSKECLKEFKKIISKYNVLQGQNKTLEEKNIQLSLEKQQMMEALDQLKSKEHKTQSDMAIVNNENNRMSIEMEAMKTNILLIQDEKEMLEKKTHQLLKEKSSLGNELKESQLEIIQLKEKERLAKTEQETLLQIIETVKDEKLNLETTLQESTAARQIMEREIENIQTYQSTAEENFLQEIKNAKSEASIYKNSLSEIGKECEMLSKMVMETKTDNQILKEELKKHSQENIKFENSISRLTEDKILLENYVRSIENERDTLEFEMRHLQREYLSLSDKICNQHNDPSKTTYISRREKFHFDNYTHEDTSSPQSRPLASDLKGYFKVKDRTLKHH

SEQ ID NO: 11682 - protein, 271 aa, Homo sapiens
MWELRSIAFSRAVFAEFLATLLFVFFGLGSALNWPQALPSVLQIAMAFGLGIGTLVQALGHISGAHINPAVTVACLVGCHVSVLRAAFYVAAQLLGAVAGAALLHEITPADIRGDLAVNALSNSTTAGQAVTVELFLTLQLVLCIFASTDERRGENPGTPALSIGFSVALGHLLGIHYTGCSMNPARSLAPAVVTGKFDDHWVFWIGPLVGAILGSLLYNYVLFPPAKSLSERLAVLKGLEPDTDWEEREVRRRQSVELHSPQSLPRGTKA

SEQ ID NO: 11683 - protein, 181 aa, Homo sapiens
MLLEPGRGCCALAILLAIVDIQSGGCINITSSASQEGTRLNLICTVWHKKEEAEGFVVFLCKDRSGDCSPETSLKQLRLKRDPGIDGVGEISSQLMFTISQVTPLHSGTYQCCARSQKSGIRLQGHFFSILFTETGNYTVTGLKQRQHLEFSHNEGTLSSGFLQEKVWVMLVTSLVALQAL

SEQ ID NO: 11684 - protein, 72 aa, Homo sapiens
MLLEPGRGCCALAILLAIVDIQSGETGNYTVTGLKQRQHLEFSHNEGTLSSGFLQEKVWVMLVTSLVALQAL

SEQ ID NO: 11685 - protein, 234 aa, Homo sapiens
MLLEPGRGCCALAILLAIVDIQSGGCINITSSASQEGTRLNLICTVWHKKEEAEGFVVFLCKDRSGDCSPETSLKQLRLKRDPGIDGVGEISSQLMFTISQVTPLHSGTYQCCARSQKSGIRLQGHFFSILFTETGNYTVTGLKQRQHLEFSHNEGTLSSGFLQEKVWVMLVTSLVALQGMSKRAVSTPSNEGAIIFLPPWLFSRRRRLERMSRGREKCYSSPGYPQESSNQFH

SEQ ID NO: 11686 - protein, 125 aa, Homo sapiens
MLLEPGRGCCALAILLAIVDIQSGETGNYTVTGLKQRQHLEFSHNEGTLSSGFLQEKVWVMLVTSLVALQGMSKRAVSTPSNEGAIIFLPPWLFSRRRRLERMSRGREKCYSSPGYPQESSNQFH

SEQ ID NO: 11687 - protein, 531 aa, Homo sapiens
MCSLASGATGGRGAVENEEDLPELSDSGDEAAWEDEDDADLPHGKQQTPCLFCNRLFTSAEETFSHCKSEHQFNIDSMVHKHGLEFYGYIKLINFIRLKNPTVEYMNSIYNPVPWEKEEYLKPVLEDDLLLQFDVEDLYEPVSVPFSYPNGLSENTSVVEKLKHMEARALSAEAALARAREDLQKMKQFAQDFVMHTDVRTCSSSTSVIADLQEDEDGVYFSSYGHYGIHEEMLKDKIRTESYRDFIYQNPHIFKDKVVLDVGCGTGILSMFAAKAGAKKVLGVDQSEILYQAMDIIRLNKLEDTITLIKGKIEEVHLPVEKVDVIISEWMGYFLLFESMLDSVLYAKNKYLAKGGSVYPDICTISLVAVSDVNKHADRIAFWDDVYGFKMSCMKKAVIPEAVVEVLDPKTLISEPCGIKHIDCHTTSISDLEFSSDFTLKITRTSMCTAIAGYFDIYFEKNCHNRVVFSTGPQSTKTHWKQTVFLLEKPFSVKAGEALKGKVTVHKNKKDPRSLTVTLTLNNSTQTYGLQ

SEQ ID NO: 11688 - protein, 469 aa, Homo sapiens
MCSLASGATGYSHLLKKHFHTVSLSISLILTAWFINMNPTVEYMNSIYNPVPWEKEEYLKPVLEDDLLLQFDVEDLYEPVSVPFSYPNGLSENTSVVEKLKHMEARALSAEAALARAREDLQKMKQFAQDFVMHTDVRTCSSSTSVIADLQEDEDGVYFSSYGHYGIHEEMLKDKIRTESYRDFIYQNPHIFKDKVVLDVGCGTGILSMFAAKAGAKKVLGVDQSEILYQAMDIIRLNKLEDTITLIKGKIEEVHLPVEKVDVIISEWMGYFLLFESMLDSVLYAKNKYLAKGGSVYPDICTISLVAVSDVNKHADRIAFWDDVYGFKMSCMKKAVIPEAVVEVLDPKTLISEPCGIKHIDCHTTSISDLEFSSDFTLKITRTSMCTAIAGYFDIYFEKNCHNRVVFSTGPQSTKTHWKQTVFLLEKPFSVKAGEALKGKVTVHKNKKDPRSLTVTLTLNNSTQTYGLQ

SEQ ID NO: 11689 - protein, 1485 aa, Homo sapiens
MAAPAQPKKIVAPTVSQINAEFVTQLACKYWAPHIKKKSPFDIKVIEDIYEKEIVKSRFAIRKIMLLEFSQYLENYLWMNYSPEVSSKAYLMSICCMVNEKFRENVPAWEIFKKKPDHFPFFFKHILKAALAETDGEFSLHEQTVLLLFLDHCFNSLEVDLIRSQVQQLISLPMWMGLQLARLELELKKTPKLRKFWNLIKKNDEKMDPEAREQAYQERRFLSQLIQKFISVLKSVPLSEPVTMDKVHYCERFIELMIDLEALLPTRRWFNTILDDSHLLVHCYLSNLVRREEDGHLFSQLLDMLKFYTGFEINDQTGNALTENEMTTIHYDRITSLQRAAFAHFPELYDFALSNVAEVDTRESLVKFFGPLSSNTLHQVASYLCLLPTLPKNEDTTFDKEFLLELLVSRHERRISQIQQLNQMPLYPTEKIIWDENIVPTEYYSGEGCLALPKLNLQFLTLHDYLLRNFNLFRLESTYEIRQDIEDSVSRMKPWQSEYGGVVFGGWARMAQPIVAFTVVEVAKPNIGENWPTRVRADVTINLNVRDHIKDEWEGLRKHDVCFLITVRPTKPYGTKFDRRRPFIEQVGLVYVRGCEIQGMLDDKGRVIEDGPEPRPNLRGESRTFRVFLDPNQYQQDMTNTIQNGAEDVYETFNIIMRRKPKENNFKAVLETIRNLMNTDCVVPDWLHDIILGYGDPSSAHYSKMPNQIATLDFNDTFLSIEHLKASFPGHNVKVTVEDPALQIPPFRITFPVRSGKGKKRKDADVEDEDTEEAKTLIVEPHVIPNRGPYPYNQPKRNTIQFTHTQIEAIRAGMQPGLTMVVGPPGTGKTDVAVQIISNIYHNFPEQRTLIVTHSNQALNQLFEKIMALDIDERHLLRLGHGEEELETEKDFSRYGRVNYVLARRIELLEEVKRLQKSLGVPGDASYTCETAGYFFLYQVMSRWEEYISKVKNKGSTLPDVTEVSTFFPFHEYFANAPQPIFKGRSYEEDMEIAEGCFRHIKKIFTQLEEFRASELLRSGLDRSKYLLVKEAKIIAMTCTHAALKRHDLVKLGFKYDNILMEEAAQILEIETFIPLLLQNPQDGFSRLKRWIMIGDHHQLPPVIKNMAFQKYSNMEQSLFTRFVRVGVPTVDLDAQGRARASLCNLYNWRYKNLGNLPHVQLLPEFSTANAGLLYDFQLINVEDFQGVGESEPNPYFYQNLGEAEYVVALFMYMCLLGYPADKISILTTYNGQKHLIRDIINRRCGNNPLIGRPNKVTTVDRFQGQQNDYILLSLVRTRAVGHLRDVRRLVVAMSRARLGLYIFARVSLFQNCFELTPAFSQLTARPLHLHIIPTEPFPTTRKNGERPSHEVQIIKNMPQMANFVYNMYMHLIQTTHHYHQTLLQLPPAMVEEGEEVQNQETELETEEEAMTVQADIIPSPTDTSCRQETPAFQTDTTPSETGATSTPEAIPALSETTPTVVGAVSAPAEANTPQDATSAPEETK

SEQ ID NO: 11690 - protein, 777 aa, Homo sapiens
MEPKEATGKENMVTKKKNLAFLRSRLYMLERRKTDTVVESSVSGDHSGTLRRSQSDRTEYNQKLQEKMTPQGECSVAETLTPEEEHHMKRMMAKREKIIKELIQTEKDYLNDLELCVREVVQPLRNKKTDRLDVDSLFSNIESVHQISAKLLSLLEEATTDVEPAMQVIGEVFLQIKGPLEDIYKIYCYHHDEAHSILESYEKEEELKEHLSHCIQSLKKIYMQEGKPNLLDMGSLMIKPIQRVMKYPLLLCELRNSTPPSHPDYRALDDAFAAVKDINVNINELKRRKDLVLKYKKNDEDESLKDKLSKLNIHSISKKSKRVTNHLKILTRGESQVKDNTFNREEKLFRALEKTVRLCVKNISLCLQHIQDAMPLALQSVMDLQEISYNKDDEMDYSETLSNALNSCHDFASHLQRLILTPLSALLSLFPGPHKLIQKRYDKLLDCNSYLQRSTGEESDLAKKEYEALNAQLVEELQAFNQAARKILLNCLCSFITLLRDLMLVAQQAYSTLVPMPLLVSSISEIQNQVLEEIQNLNCVKENSATFIERKLSFEKKKPVQILPEMPHQTDIHRSKLLSTYSAEELYQAKRKCNATQEYDINLLEGDLVAVIEQKDPLGSTSRWLVDTGNVKGYVYSSFLKPYNPAKMQKVDAENRFCDDDFENISLFVSSRPASDSVTGTSESSIGDSSSSLSGTCGKFETNGTDVDSFQEVDEQIFYAVHAFQARSDHELSLQEYQRVHILRFCDLSGNKEWWLAEAQGQKGYVPANYLGKMTYA

SEQ ID NO: 11691 - protein, 219 aa, Homo sapiens
MEPKEATGKENMVTKKKNLAFLRSRLYMLERRKTDTVVESSVSGDHSGTLRRSQSDRTEYNQKLQEKMTPQGECSVAETLTPEEEHHMKRMMAKREKIIKELIQTEKDYLNDLELCVREVVQPLRNKKTDRLDVDSLFSNIESVHQISAKLLSLLEEATTDVEPAMQVIGEVFLQIKGPLEDIYKIYCYHHDEAHSILESYEKEEELKEHLSHCIQSLK

SEQ ID NO: 11692 - protein, 912 aa, Homo sapiens
MEDFARGAASPGPSRPGLVPVSIIGAEDEDFENELETNSEEQNSQFQSLEQVKRRPAHLMALLQHVALQFEPGPLLCCLHADMLGSLGPKEAKKAFLDFYHSFLEKTAVLRVPVPPNVAFELDRTRADLISEDVQRRFVQEVVQSQQVAVGRQLEDFRSKRLMGMTPWEQELAQLEAWVGRDRASYEARERHVAERLLMHLEEMQHTISTDEEKSAAVVNAIGLYMRHLGVRTKSGDKKSGRNFFRKKVMGNRRSDEPAKTKKGLSSILDAARWNRGEPQVPDFRHLKAEVDAEKPGATDRKGGVGMPSRDRNIGAPGQDTPGVSLHPLSLDSPDREPGADAPLELGDSSPQGPMSLESLAPPESTDEGAETESPEPGDEGEPGRSGLELEPEEPPGWRELVPPDTLHSLPKSQVKRQEVISELLVTEAAHVRMLRVLHDLFFQPMAECLFFPLEELQNIFPSLDELIEVHSLFLDRLMKRRQESGYLIEEIGDVLLARFDGAEGSWFQKISSRFCSRQSFALEQLKAKQRKDPRFCAFVQEAESRPRCRRLQLKDMIPTEMQRLTKYPLLLQSIGQNTEEPTEREKVELAAECCREILHHVNQAVRDMEDLLRLKDYQRRLDLSHLRQSSDPMLSEFKNLDITKKKLVHEGPLTWRVTKDKAVEVHVLLLDDLLLLLQRQDERLLLKSHSRTLTPTPDGKTMLRPVLRLTSAMTREVATDHKAFYVLFTWDQEAQIYELVAQTVSERKNWCALITETAGSLKVPAPASRPKPRPSPSSTREPLLSSSENGNGGRETSPADARTERILSDLLPFCRPGPEGQLAATALRKVLSLKQLLFPAEEDNGAGPPRDGDGVPGGGPLSPARTQEIQENLLSLEETMKQLEELEEEFCRLRPLLSQLGGNSVPQPGCT

SEQ ID NO: 11693 - protein, 879 aa, Homo sapiens
MEDFARGAASPGPSRPGLVPVSIIGAEDEDFENELETNSEEQNSQFQSLEQVKRRPAHLMALLQHVALQFEPGPLVLRVPVPPNVAFELDRTRADLISEDVQRRFVQEVVQSQQVAVGRQLEDFRSKRLMGMTPWEQELAQLEAWVGRDRASYEARERHVAERLLMHLEEMQHTISTDEEKSAAVVNAIGLYMRHLGVRTKSGDKKSGRNFFRKKVMGNRRSDEPAKTKKGLSSILDAARWNRGEPQVPDFRHLKAEVDAEKPGATDRKGGVGMPSRDRNIGAPGQDTPGVSLHPLSLDSPDREPGADAPLELGDSSPQGPMSLESLAPPESTDEGAETESPEPGDEGEPGRSGLELEPEEPPGWRELVPPDTLHSLPKSQVKRQEVISELLVTEAAHVRMLRVLHDLFFQPMAECLFFPLEELQNIFPSLDELIEVHSLFLDRLMKRRQESGYLIEEIGDVLLARFDGAEGSWFQKISSRFCSRQSFALEQLKAKQRKDPRFCAFVQEAESRPRCRRLQLKDMIPTEMQRLTKYPLLLQSIGQNTEEPTEREKVELAAECCREILHHVNQAVRDMEDLLRLKDYQRRLDLSHLRQSSDPMLSEFKNLDITKKKLVHEGPLTWRVTKDKAVEVHVLLLDDLLLLLQRQDERLLLKSHSRTLTPTPDGKTMLRPVLRLTSAMTREVATDHKAFYVLFTWDQEAQIYELVAQTVSERKNWCALITETAGSLKVPAPASRPKPRPSPSSTREPLLSSSENGNGGRETSPADARTERILSDLLPFCRPGPEGQLAATALRKVLSLKQLLFPAEEDNGAGPPRDGDGVPGGGPLSPARTQEIQENLLSLEETMKQLEELEEEFCRLRPLLSQLGGNSVPQPGCT

SEQ ID NO: 11694 - protein, 927 aa, Homo sapiens
MASLSTWSSPAEPREMEDFARGAASPGPSRPGLVPVSIIGAEDEDFENELETNSEEQNSQFQSLEQVKRRPAHLMALLQHVALQFEPGPLLCCLHADMLGSLGPKEAKKAFLDFYHSFLEKTAVLRVPVPPNVAFELDRTRADLISEDVQRRFVQEVVQSQQVAVGRQLEDFRSKRLMGMTPWEQELAQLEAWVGRDRASYEARERHVAERLLMHLEEMQHTISTDEEKSAAVVNAIGLYMRHLGVRTKSGDKKSGRNFFRKKVMGNRRSDEPAKTKKGLSSILDAARWNRGEPQVPDFRHLKAEVDAEKPGATDRKGGVGMPSRDRNIGAPGQDTPGVSLHPLSLDSPDREPGADAPLELGDSSPQGPMSLESLAPPESTDEGAETESPEPGDEGEPGRSGLELEPEEPPGWRELVPPDTLHSLPKSQVKRQEVISELLVTEAAHVRMLRVLHDLFFQPMAECLFFPLEELQNIFPSLDELIEVHSLFLDRLMKRRQESGYLIEEIGDVLLARFDGAEGSWFQKISSRFCSRQSFALEQLKAKQRKDPRFCAFVQEAESRPRCRRLQLKDMIPTEMQRLTKYPLLLQSIGQNTEEPTEREKVELAAECCREILHHVNQAVRDMEDLLRLKDYQRRLDLSHLRQSSDPMLSEFKNLDITKKKLVHEGPLTWRVTKDKAVEVHVLLLDDLLLLLQRQDERLLLKSHSRTLTPTPDGKTMLRPVLRLTSAMTREVATDHKAFYVLFTWDQEAQIYELVAQTVSERKNWCALITETAGSLKVPAPASRPKPRPSPSSTREPLLSSSENGNGGRETSPADARTERILSDLLPFCRPGPEGQLAATALRKVLSLKQLLFPAEEDNGAGPPRDGDGVPGGGPLSPARTQEIQENLLSLEETMKQLEELEEEFCRLRPLLSQLGGNSVPQPGCT

SEQ ID NO: 11695 - protein, 948 aa, Homo sapiens
MASLSTWSSPAEPREMEDFARGAASPGPSRPGLVPVSIIGAEDEDFENELETNSEEQNSQFQSLEQVKRRPAHLMALLQHVALQFEPGPLVLRVPVPPNVAFELDRTRADLISEDVQRRFVQEVVQSQQVAVGRQLEDFRSKRLMGMTPWEQELAQLEAWVGRDRASYEARERHVAERLLMHLEEMQHTISTDEEKSAAVVNAIGLYMRHLGVRTKSGDKKSGRNFFRKKVMGNRRSDEPAKTKKGLSSILDAARWNRGEPQVPDFRHLKAEVDAEKPGATDRKGGVGMPSRDRNIGAPGQDTPGVSLHPLSLDSPDREPGADAPLELGDSSPQGPMSLESLAPPESTDEGAETESPEPGDEGEPGRSGLELEPEEPPGWRELVPPDTLHSLPKSQVKRQEVISELLVTEAAHVRMLRVLHDLFFQPMAECLFFPLEELQNIFPSLDELIEVHSLFLDRLMKRRQESGYLIEEIGDVLLARFDGAEGSWFQKISSRFCSRQSFALEQLKAKQRKDPRFCAFVQEAESRPRCRRLQLKDMIPTEMQRLTKYPLLLQSIGQNTEEPTEREKVELAAECCREILHHVNQAVRDMEDLLRLKDYQRRLDLSHLRQSSDPMLSEFKNLDITKKKLVHEGPLTWRVTKDKAVEVHVLLLDDLLLLLQRQDERLLLKSHSRTLTPTPDGKTMLRPVLRLTSAMTREVATDHKAFYVLFTWDQEAQIYELVAQTVSERKNWCALITETAGSLKVPAPASRPKPRPSPSSTREPLLSSSENGNGGRETSPADARTERILSDLLPFCRPGPEGQLAATALRKGVGGGILPPETPPVSAWGELCPPAWLHLRFPPRKAFCKKERNGGEDVRDHPHPHSCRSISHPEGLRRGSCGPRLGGAQLGLLAPHEPRPSLPPALCLGDSGLHSGGHHGDPGHLSIACGGHPSTPTPKCLRSVFIP

SEQ ID NO: 11696 - protein, 290 aa, Homo sapiens
MFRLLSSCCSCLRTTEETRRNVTIPIIGLNNSGKTVLVEAFQKLLPSKTDHCMKSELTTLLLDEYELSIYDLNGDLKGREAWPNYYAQAHGLVFVLDSSDIRRMQEVKIILTHLLSDKRVAGKPILILANKQDKKKALMPCDIIDYLLLKKLVKENKCPCRVEPCSAIRNLERRNHQPIVEGLRWLLAVIDTCQLPPTSSISISKNNTGSGERCSSHSFSTRTGMSKEKRQHLEQCSIEAKPLKSILQKEGTRLWSKKNMSVTFALDEPMKEGECSRRMRAQNTTKLCYN

SEQ ID NO: 11697 - protein, 256 aa, Homo sapiens
MFRLLSSCCSCLRTTEETRRNVTIPIIGLNNSGKTVLVEAFQKLLPSKTDHCMKSELTTLLLDEYELSIYDLNGDLKGREAWPNYYAQAHGLVFVLDSSDIRRMQEVKIILTHLLSDKRVAGKPILILANKQDKKKALMPCDIIDYLLLKKLVKENKCPCRVEPCSAIRNLERRNHQPIVEGLRWLLAVIDTCQLPPTSSISISKNNTGSGERCSSHSFSTRTGMSKEKRQHLEQCSIEAKPLKSILQPSNQSYTH

SEQ ID NO: 11698 - protein, 346 aa, Homo sapiens
MALDVKSRAKRYEKLDFLGEGQFATVYKARDKNTNQIVAIKKIKLGHRSEAKDGINRTALREIKLLQELSHPNIIGLLDAFGHKSNISLVFDFMETDLEVIIKDNSLVLTPSHIKAYMLMTLQGLEYLHQHWILHRDLKPNNLLLDENGVLKLADFGLAKSFGSPNRAYTHQVVTRWYRAPELLFGARMYGVGVDMWAVGCILAELLLRVPFLPGDSDLDQLTRIFETLGTPTEEQWPDMCSLPDYVTFKSFPGIPLHHIFSAAGDDLLDLIQGLFLFNPCARITATQALKMKYFSNRPGPTPGCQLPRPNCPVETLKEQSNPALAIKRKRTEALEQGGLPKKLIF

SEQ ID NO: 11699 - protein, 511 aa, Homo sapiens
MKLFWLLFTIGFCWAQYSSNTQQGRTSIVHLFEWRWVDIALECERYLAPKGFGGVQVSPPNENVAIHNPFRPWWERYQPVSYKLCTRSGNEDEFRNMVTRCNNVGVRIYVDAVINHMCGNAVSAGTSSTCGSYFNPGSRDFPAVPYSGWDFNDGKCKTGSGDIENYNDATQVRDCRLSGLLDLALGKDYVRSKIAEYMNHLIDIGVAGFRIDASKHMWPGDIKAILDKLHNLNSNWFPEGSKPFIYQEVIDLGGEPIKSSDYFGNGRVTEFKYGAKLGTVIRKWNGEKMSYLKNWGEGWGFMPSDRALVFVDNHDNQRGHGAGGASILTFWDARLYKMAVGFMLAHPYGFTRVMSSYRWPRYFENGKDVNDWVGPPNDNGVTKEVTINPDTTCGNDWVCEHRWRQIRNMVNFRNVVDGQPFTNWYDNGSNQVAFGRGNRGFIVFNNDDWTFSLTLQTGLPAGTYCDVISGDKINGNCTGIKIYVSDDGKAHFSISNSAEDPFIAIHAESKL

SEQ ID NO: 11700 - protein, 102 aa, Homo sapiens
MAGQAFRKFLPLFDRVLVERSAAETVTKGGIMLPEKSQGKVLQATVVAVGSGSKGKGGEIQPVSVKVGDKVLLPEYGGTKVVLDDKDYFLFRDGDILGKYVD

SEQ ID NO: 11701 - protein, 534 aa, Homo sapiens
MLRRRGSPGMGVHVGAALGALWFCLTGALEVQVPEDPVVALVGTDATLCCSFSPEPGFSLAQLNLIWQLTDTKQLVHSFAEGQDQGSAYANRTALFPDLLAQGNASLRLQRVRVADEGSFTCFVSIRDFGSAAVSLQVAAPYSKPSMTLEPNKDLRPGDTVTITCSSYQGYPEAEVFWQDGQGVPLTGNVTTSQMANEQGLFDVHSILRVVLGANGTYSCLVRNPVLQQDAHSSVTITPQRSPTGAVEVQVPEDPVVALVGTDATLRCSFSPEPGFSLAQLNLIWQLTDTKQLVHSFTEGRDQGSAYANRTALFPDLLAQGNASLRLQRVRVADEGSFTCFVSIRDFGSAAVSLQVAAPYSKPSMTLEPNKDLRPGDTVTITCSSYRGYPEAEVFWQDGQGVPLTGNVTTSQMANEQGLFDVHSVLRVVLGANGTYSCLVRNPVLQQDAHGSVTITGQPMTFPPEALWVTVGLSVCLIALLVALAFVCWRKIKQSCEEENAGAEDQDGEGEGSKTALQPLKHSDSKEDDGQEIA

SEQ ID NO: 11702 - protein, 316 aa, Homo sapiens
MLRRRGSPGMGVHVGAALGALWFCLTGALEVQVPEDPVVALVGTDATLCCSFSPEPGFSLAQLNLIWQLTDTKQLVHSFAEGQDQGSAYANRTALFPDLLAQGNASLRLQRVRVADEGSFTCFVSIRDFGSAAVSLQVAAPYSKPSMTLEPNKDLRPGDTVTITCSSYRGYPEAEVFWQDGQGVPLTGNVTTSQMANEQGLFDVHSVLRVVLGANGTYSCLVRNPVLQQDAHGSVTITGQPMTFPPEALWVTVGLSVCLIALLVALAFVCWRKIKQSCEEENAGAEDQDGEGEGSKTALQPLKHSDSKEDDGQEIA

SEQ ID NO: 11703 - protein, 493 aa, Homo sapiens
MLRRRGSPGMGVHVGAALGALWFCLTGALEVQVPEDPVVALVGTDATLCCSFSPEPGFSLAQLNLIWQLTDTKQLVHSFAEGQDQGSAYANRTALFPDLLAQGNASLRLQRVRVADEGSFTCFVSIRDFGSAAVSLQVAAPYSKPSMTLEPNKDLRPGDTVTITCSSYQGYPEAEVFWQDGQGVPLTGNVTTSQMANEQGLFDVHSILRVVLGANGTYSCLVRNPVLQQDAHSSVTITPQRSPTGAVEVQVPEDPVVALVGTDATLRCSFSPEPGFSLAQLNLIWQLTDTKQLVHSFTEGRDQGSAYANRTALFPDLLAQGNASLRLQRVRVADEGSFTCFVSIRDFGSAAVSLQVAAPYSKPSMTLEPNKDLRPGDTVTITCSSYRGYPEAEVFWQDGQGVPLTGNVTTSQMANEQGLFDVHSVLRVVLGANGTYSCLVRNPVLQQDAHGSVTITGQPMTFPPGPASSAVPLSPAHPPHGSMCWSHWFSRGL

SEQ ID NO: 11704 - protein, 533 aa, Homo sapiens
MLRRRGSPGMGVHVGAALGALWFCLTGALEVQVPEDPVVALVGTDATLCCSFSPEPGFSLAQLNLIWQLTDTKQLVHSFAEGQDQGSAYANRTALFPDLLAQGNASLRLQRVRVADEGSFTCFVSIRDFGSAAVSLQVAAPYSKPSMTLEPNKDLRPGDTVTITCSSYQGYPEAEVFWQDGQGVPLTGNVTTSQMANEQGLFDVHSILRVVLGANGTYSCLVRNPVLQQDAHSSVTITPQRSPTGAVEVQVPEDPVVALVGTDATLRCSFSPEPGFSLAQLNLIWQLTDTKQLVHSFTEGRDQGSAYANRTALFPDLLAQGNASLRLQRVRVADEGSFTCFVSIRDFGSAAVSLQVAAPYSKPSMTLEPNKDLRPGDTVTITCSSYRGYPEAEVFWQDGQGVPLTGNVTTSQMANEQGLFDVHSVLRVVLGANGTYSCLVRNPVLQQDAHGSVTITGQPMTFPPEALWVTVGLSVCLIALLVALAFVCWRKIKQSCEEENAGAEDQDGEGEGSKTALQPLKHSDSKEGKDTWA

SEQ ID NO: 11705 - protein, 756 aa, Homo sapiens
MHLKIVLAFLALSLITIFALAYVLLTSPGGSSQPPHCPSVSHRAQPWPHPGQSQLFADLSREELTAVMRFLTQRLGPGLVDAAQAQPSDNCIFSVELQLPPKAAALAHLDRGSPPPAREALAIVLFGGQPQPNVSELVVGPLPHPSYMRDVTVERHGGPLPYHRRPVLRAEFTQMWRHLKEVELPKAPIFLSSTFNYNGSTLAAVHATPRGLRSGDRATWMALYHNISGVGLFLHPVGLELLLDHRALDPAHWTVQQVFYLGHYYADLGQLEREFKSGRLEVVRVPLPPPNGASSLRSRNSPGPLPPLQFSPQGSQYSVQGNLVVSSLWSFTFGHGVFSGLRIFDVRFQGERIAYEVSVQECVSIYGADSPKTMLTRYLDSSFGLGRNSRGLVRGVDCPYQATMVDIHILVGKGAVQLLPGAVCVFEEAQGLPLRRHHNYLQNHFYGGLASSALVVRSVSSVGNYDYIWDFVLYPNGALEGRVHATGYINTAFLKGGEEGLLFGNRVGERVLGTVHTHAFHFKLDLDVAGLKNWVVAEDVVFKPVAAPWNPEHWLQRPQLTRQVLGKEDLTAFSLGSPLPRYLYLASNQTNAWGHQRGYRIQIHSPLGIHIPLESDMERALSWGRYQLVVTQRKEEESQSSSIYHQNDIWTPTVTFADFINNETLLGEDLVAWVTASFLHIPHAEDIPNTVTLGNRVGFLLRPYNFFDEDPSIFSPGSVYFEKGQDAGLCSINPVACLPDLAACVPDLPPFSYHGF

SEQ ID NO: 11706 - protein, 729 aa, Homo sapiens
MHLKIVLAFLALSLITIFALAYVLLTSPGGSSQPPHCPSVSHRAQPWPHPGQSQLFADLSREELTAVMRFLTQRLGPGLVDAAQAQPSDNCIFSVELQLPPKAAALAHLDRGSPPPAREALAIVLFGGQPQPNVSELVVGPLPHPSYMRDVTVERHGGPLPYHRRPVLRAEFTQMWRHLKEVELPKAPIFLSSTFNYNGSTLAAVHATPRGLRSGDRATWMALYHNISGVGLFLHPVGLELLLDHRALDPAHWTVQQVFYLGHYYADLGQLEREFKSGRLEVVRVPLPPPNGASSLRSRNSPGPLPPLQFSPQGSQYSVQGNLVVSSLWSFTFGHGVFSGLRIFDVRFQGERIAYEVSVQECVSIYGADSPKTMLTRYLDSSFGLGRNSRGLVRGVDCPYQATMVDIHILVGKGAVQLLPGAVCVFEEAQGLPLRRHHNYLQNHFYGGLASSALVVRSVSSVGNYDYIWDFVLYPNGALEGRVHATGYINTAFLKGGEEGLLFGNRVGERVLGTVHTHAFHFKLDLDVAGLKNWVVAEDVVFKPVAAPWNPEHWLQRPQLTRQVLGKEDLTAFSLGSPLPRYLYLASNQTNAWGHQRGYQLVVTQRKEEESQSSSIYHQNDIWTPTVTFADFINNETLLGEDLVAWVTASFLHIPHAEDIPNTVTLGNRVGFLLRPYNFFDEDPSIFSPGSVYFEKGQDAGLCSINPVACLPDLAACVPDLPPFSYHGF

SEQ ID NO: 11707 - protein, 752 aa, Homo sapiens
MENLESRLKNAPYFRCEKGTDSIPLCRKCETRVLAWKIFSTKEWFCRINDISQRRFLVGILKQLNSLYLLHYFQNILQTTQGKDFIYNRSRIDLSKKEGKVVKSSLNQMLDKTVEQKMKEILYWFANSTQWTKANYTLLLLQMCNPKLLLTAANVIRVLFLREENNISGLNQDITDVCFSPEKDHSSKSATSQVYWTAKTQHTSLPLSKAPENEHFLGAASNPEEPWRNSLRCISEMNRLFSGKADITKPGYDPCNLLVDLDDIRDLSSGFSKYRDFIRYLPIHLSKYILRMLDRHTLNKCASVSQHWAAMAQQVKMDLSAHGFIQNQITFLQGSYTRGIDPNYANKVSIPVPKMVDDGKSMRVKHPKWKLRTKNEYNLWTAYQNEETQQVLMEERNVFCGTYNVRILSDTWDQNRVIHYSGGDLIAVSSNRKIHLLDIIQVKAIPVEFRGHAGSVRALFLCEEENFLLSGSYDLSIRYWDLKSGVCTRIFGGHQGTITCMDLCKNRLVSGGRDCQVKVWDVDTGKCLKTFRHKDPILATRINDTYIVSSCERGLVKVWHIAMAQLVKTLSGHEGAVKCLFFDQWHLLSGSTDGLVMAWSMVGKYERCLMAFKHPKEVLDVSLLFLRVISACADGKIRIYNFFNGNCMKVIKANGRGDPVLSFFIQGNRISVCHISTFAKRINVGWNGIEPSATAQGGNASLTECAHVRLHIAGHLPASRLPVAAVQPMTGGMAPTTAPTHVLAMLILFSGV

SEQ ID NO: 11708 - protein, 252 aa, Homo sapiens
MDLCKNRLVSGGRDCQVKVWDVDTGKCLKTFRHKDPILATRINDTYIVSSCERGLVKVWHIAMAQLVKTLSGHEGAVKCLFFDQWHLLSGSTDGLVMAWSMVGKYERCLMAFKHPKEVLDVSLLFLRVISACADGKIRIYNFFNGNCMKVIKANGRGDPVLSFFIQGNRISVCHISTFAKRINVGWNGIEPSATAQGGNASLTECAHVRLHIAGHLPASRLPVAAVQPMTGGMAPTTAPTHVLAMLILFSGV

SEQ ID NO: 11709 - protein, 142 aa, Homo sapiens
MIRFILIQNRAGKTRLAKWYMQFDDDEKQKLIEEVHAVVTVRDAKHTNFVEFRNFKIIYRRYAGLYFCICVDVNDNNLAYLEAIHNFVEVLNEYFHNVCELDLVFNFYKVYTVVDEMFLAGEIRETSQTKVLKQLLMLQSLE

SEQ ID NO: 11710 - protein, 104 aa, Homo sapiens
MIRFILIQNRAGKTRLAKWYMQFDDDEKQKLIEEVHAVVTVRDAKHTNFVEVLNEYFHNVCELDLVFNFYKVYTVVDEMFLAGEIRETSQTKVLKQLLMLQSLE

SEQ ID NO: 11711 - protein, 445 aa, Homo sapiens
MTELRQRVAHEPVAPPEDKESESEAKVDGETASDSESRAESAPLPVSADDTPEVLNRALSNLSSRWKNWWVRGILTLAMIAFFFIIIYLGPMVLMIIVMCVQIKCFHEIITIGYNVYHSYDLPWFRTLSWYFLLCVNYFFYGETVTDYFFTLVQREEPLRILSKYHRFISFTLYLIGFCMFVLSLVKKHYRLQFYMFGWTHVTLLIVVTQSHLVIHNLFEGMIWFIVPISCVICNDIMAYMFGFFFGRTPLIKLSPKKTWEGFIGGFFATVVFGLLLSYVMSGYRCFVCPVEYNNDTNSFTVDCEPSDLFRLQEYNIPGVIQSVIGWKTVRMYPFQIHSIALSTFASLIGPFGGFFASGFKRAFKIKDFANTIPGHGGIMDRFDCQYLMATFVNVYIASFIRGPNPSKLIQQFLTLRPDQQLHIFNTLRSHLIDKGMLTSTTEDE

SEQ ID NO: 11712 - protein, 250 aa, Homo sapiens
MSRLRHPRTRWKNWWVRGILTLAMIAFFFIIIYLGPMVLMIIVMCVQIKCFHEIITIGYNVYHSYDLPWFRTLSWYFLLCVNYFFYGETVTDYFFTLVQREEPLRILSKYHRFISFTLYLIGFCMFVLSLVKKHYRLQFYMFGWTHVTLLIVVTQSHLVIHNLFEGMIWFIVPISCVICNDIMAYMFGFFFGRTPLIKLSPKKTWEGFIGGFFATVVFGLLLSYVMSGYRCFVCPVEYNNDTNSFTVDCE

SEQ ID NO: 11713 - protein, 383 aa, Homo sapiens
MFWTFKEWFWLERFWLPPTIKWSDLEDHDGLVFVKPSHLYVTIPYAFLLLIIRRVFEKFVASPLAKSFGIKETVRKVTPNTVLENFFKHSTRQPLQTDIYGLAKKCNLTERQVERWFRSRRNQERPSRLKKFQEACWRFAFYLMITVAGIAFLYDKPWLYDLWEVWNGYPKQPLLPSQYWYYILEMSFYWSLLFRLGFDVKRKDFLAHIIHHLAAISLMSFSWCANYIRSGTLVMIVHDVADIWLESAKMFSYAGWTQTCNTLFFIFSTIFFISRLIVFPFWILYCTLILPMYHLEPFFSYIFLNLQLMILQVLHLYWGYYILKMLNRCIFMKSIQDVRSDDEDYEEEEEEEEEEATKGKEMDCLKNGLRAERHLIPNGQHGH

SEQ ID NO: 11714 - protein, 364 aa, Homo sapiens
MPLLLLLPLLWAGALAMDPNFWLQVQESVTVQEGLCVLVPCTFFHPIPYYDKNSPVHGYWFREGAIISRDSPVATNKLDQEVQEETQGRFRLLGDPSRNNCSLSIVDARRRDNGSYFFRMERGSTKYSYKSPQLSVHVTDLTHRPKILIPGTLEPGHSKNLTCSVSWACEQGTPPIFSWLSAAPTSLGPRTTHSSVLIITPRPQDHGTNLTCQVKFAGAGVTTERTIQLNVTYVPQNPTTGIFPGDGSGKQETRAGVVHGAIGGAGVTALLALCLCLIFFIVKTHRRKAARTAVGRNDTHPTTGSASPKHQKKSKLHGPTETSSCSGAAPTVEMDEELHYASLNFHGMNPSKDTSTEYSEVRTQ

SEQ ID NO: 11715 - protein, 310 aa, Homo sapiens
MPLLLLLPLLWAGALAMDPNFWLQVQESVTVQEGLCVLVPCTFFHPIPYYDKNSPVHGYWFREGAIISRDSPVATNKLDQEVQEETQGRFRLLGDPSRNNCSLSIVDARRRDNGSYFFRMERGSTKYSYKSPQLSVHVTDLTHRPKILIPGTLEPGHSKNLTCSVSWACEQGTPPIFSWLSAAPTSLGPRTTHSSVLIITPRPQDHGTNLTCQVKFAGAGVTTERTIQLNVTYVPQNPTTGIFPGDGSGKQETRAGVVHGAIGGAGVTALLALCLCLIFFIVKTHRRKAARTAVGRNDTHPTTGSASPVR

SEQ ID NO: 11716 - protein, 237 aa, Homo sapiens
MPLLLLLPLLWADLTHRPKILIPGTLEPGHSKNLTCSVSWACEQGTPPIFSWLSAAPTSLGPRTTHSSVLIITPRPQDHGTNLTCQVKFAGAGVTTERTIQLNVTYVPQNPTTGIFPGDGSGKQETRAGVVHGAIGGAGVTALLALCLCLIFFIVKTHRRKAARTAVGRNDTHPTTGSASPKHQKKSKLHGPTETSSCSGAAPTVEMDEELHYASLNFHGMNPSKDTSTEYSEVRTQ

SEQ ID NO: 11717 - protein, 360 aa, Homo sapiens
MQIIRHSEQTLKTALISKNPVLVSQYEKLNAGEQRLMNEAFQPASDLFGPITLHSPSDWITSHPEAPQDFEQFFSDPYRKTPSPNKRSIYIQSIGSLGNTRIISEEYIKWLTGYCKAYFYGLRVKLLEPVPVSVTRCSFRVNENTHNLQIHAGDILKFLKKKKPEDAFCVVGITMIDLYPRDSWNFVFGQASLTDGVGIFSFARYGSDFYSMHYKGKVKKLKKTSSSDYSIFDNYYIPEITSVLLLRSCKTLTHEIGHIFGLRHCQWLACLMQGSNHLEEADRRPLNLCPICLHKLQCAVGFSIVERYKALVRWIDDESSDTPGATPEHSHEDNGNLPKPVEAFKEWKEWIIKCLAVLQK

SEQ ID NO: 11718 - protein, 302 aa, Homo sapiens
MQIIRHSEQTLKTALISKNPVLVSQYEKLNAGEQRLMNEAFQPASDLFGPITLHSPSDWITSHPEAPQDFEQFFSDPYRKTPSPNKRSIYIQSIGDILKFLKKKKPEDAFCVVGITMIDLYPRDSWNFVFGQASLTDGVGIFSFARYGSDFYSMHYKGKVKKLKKTSSSDYSIFDNYYIPEITSVLLLRSCKTLTHEIGHIFGLRHCQWLACLMQGSNHLEEADRRPLNLCPICLHKLQCAVGFSIVERYKALVRWIDDESSDTPGATPEHSHEDNGNLPKPVEAFKEWKEWIIKCLAVLQK

SEQ ID NO: 11719 - protein, 357 aa, Homo sapiens
MAPRRVRSFLRGLPALLLLLLFLGPWPAASHGGKYSREKNQPKPSPKRESGEEFRMEKLNQLWEKAQRLHLPPVRLAELHADLKIQERDELAWKKLKLDGLDEDGEKEARLIRNLNVILAKYGLDGKKDARQVTSNSLSGTQEDGLDDPRLEKLWHKAKTSGKFSGEELDKLWREFLHHKEKVHEYNVLLETLSRTEEIHENVISPSDLSDIKGSVLHSRHTELKEKLRSINQGLDRLRRVSHQGYSTEAEFEEPRVIDLWDLAQSANLTDKELEAFREELKHFEAKIEKHNHYQKQLEIAHEKLRHAESVGDGERVSRSREKHALLEGRTKELGYTVKKHLQDLSGRISRARHNEL

SEQ ID NO: 11720 - protein, 992 aa, Homo sapiens
MRKLFSFGRRLGQALLSSMDQEYAGPGYDIRDWELRKIHRAAIKGDAAEVERCLTRRFRDLDARDRKDRTVLHLACAHGRVQVVTLLLHRRCQIDICDRLNRTPLMKAVHSQEEACAIVLLECGANPNIEDIYGNTALHYAVYNKGTSLAERLLSHHANIEALNKEGNTPLLFAINSRRQHMVEFLLKNQANIHAVDNFKRTALILAVQHNLSSIVTLLLQQNIRISSQDMFGQTAEDYALCSDLRSIRQQILEHKNKMLKNHLRNDNQETAAMKPANLKKRKERAKAEHNLKVASEEKQERLQRSENKQPQDSQSYGKKKDAMYGNFMLKKDIAMLKEELYAIKNDSLRKEKKYIQEIKSITEINANFEKSVRLNEKMITKTVARYSQQLNDLKAENARLNSELEKEKHNKERLEAEVESLHSSLATAINEYNEIVERKDLELVLWRADDVSRHEKMGSNISQLTDKNELLTEQVHKARVKFNTLKGKLRETRDALREKTLALGSVQLDLRQAQHRIKEMKQMHPNGEAKESQSIGKQNSLEERIRQQELENLLLERQLEDARKEGDNKEIVINIHRDCLENGKEDLLEERNKELMKEYNYLKEKLLQCEKEKAEREVIVREFQEELVDHLKTFSISESPLEGTSHCHINLNETWTSKKKLFQVEIQPEEKHEEFRKLFELISLLNYTADQIRKKNRELEEEATGYKKCLEMTINMLNAFANEDFSCHGDLNTDQLKMDILFKKLKQKFNDLVAEKEAVSSECVNLAKDNEVLHQELLSMRNVQEKCEKLEKDKKMLEEEVLNLKTHMEKDMVELGKLQEYKSELDERAVQEIEKLEEIHLQKQAEYEKQLEQLNKDNTASLKKKELTLKDVECKFSKMKTAYEEVTTELEEFKEAFAGAVKANNSMSKKLMKSDKKIAVISTKLFTEKQRMKYFLSTLPTRPEPELPCVENLNSIELNRKYIPKTAIRIPTSNPQTSNNCKNFLTEVLLC

SEQ ID NO: 11721 - protein, 205 aa, Homo sapiens
MKTAYEEVTTELEEFKEAFAGAVKANNSMSKKLMKSDKKIAVISTKLFTEKQRMKYFLSTLPTRPEPELPCVENLNSIELNRKYIPKTAIRIPTSNPQTSNNCKNFLTEMELDRVEQIITGTKKSFAMLSTCSRLLSFVESTAPRKHRRALPIMRSLVPNRRTTVASTESRTNRPGGVRSPGLQLEGTSTLQWEQGPIAHPRHRC

SEQ ID NO: 11722 - protein, 147 aa, Homo sapiens
MALRACGLIIFRRCLIPKVDNNAIEFLLLQASDGIHHWTPPKGHVEPGEDDLETALRETQEEAGIEAGQLTIIEGFKRELNYVARNKPKTVIYWLAEVKDYDVEIRLSHEHQAYRWLGLEEACQLAQFKEMKAALQEGHQFLCSIEA

SEQ ID NO: 11723 - protein, 1011 aa, Homo sapiens
MRKLLSFGRRLGQALLSSMDQEYAGRGYHIRDWELRKIHRAAIKGDAAEVEHCLTRRFRDLDVRDRKDRTVLHLACAHGRVQVVTLLLDRKCQINICDRLNRTPLMKAVHCQEEACAIILLKRGANPNIKDIYGNTALHYAVYNEGTSLAERLLSHHANIEALNKEGNTPLLFAINSRRQHMVEFLLKNQANIHAVDNFKRTALILAVQHNLSSIVTLLLQQNIHISSQDMFGQTAEDYAFCCDLRSIQQQILEHKNKMLKNHLRNDNQETAAMKPENLKKRKKRKKLKKRKEGAKAEHNLKVASEEKQERLERSENKQPQDSQSYGKKKDEMFGNFMLKRDIAMLKEELYAIKNDSLRKEKKYIQEIKSITEINANFEKSVRLNEEMITKKVAQYSQQLNDLKAENARLNSKLEKEKHNKERLEAEVESLHSNLATAINEYNEILERKDLELVLWRADDVSRHETMGSNISQLTDKNELLTEQVHKARVKFNTLKGKLRETRDALREKTLALESVQLDLKQAQHRIKEMKQMHPNGEAKESQSIGKQNSSEERIRQRELENLLLERQLEDARKEGDNKEIVINIHRDCLENGKEDLLEERNKELMNEYNYLKEKLLQYEKEKAEREVIVREFQEELVDHLKKFSMSESPLEGTSHCHINLDETWTSKKKLFQVEIQPEEKHEEFRKVFELISLLNYTADQIRKKNRELEEEATGYKKCLEMTINMLNAFANEDFSCHGDLNTDQLKMDILFKKLKQKFDDLMAEKEAVSSKCVNLAKDNEVLHQELLSMGKVQEKCEKLEKDKKMLEEKVLNLKTHMEKDMVELGKVQEYKSELDERAMQAIEKLEEIHLQKQAEYEKQLEQLNKDNTASLKKKELTLKDVECKFSKMKTAYEDVTTELEEYKEAFAVALKANSSMSEKITKSDKKIAVISTKLFMEKERMEYFLSTLPMRPDPELPCVENLNSIELNRKYIPKMAIRIPTSNPQTSNNCKNSLTELLLRWALAPIYFLL

SEQ ID NO: 11724 - protein, 822 aa, Homo sapiens; identical to SEQ ID NO: 215

SEQ ID NO: 11725 - protein, 825 aa, Homo sapiens; identical to SEQ ID NO: 216

SEQ ID NO: 11726 - protein, 459 aa, Homo sapiens
MPRSCRERVQGSKQQLRLQFPPRIRKTPKLTFYRPDNILVKLNTTAILREGALYQRQVEQELQRVDKLVDGAGDFSEFFEWQKKMQAKDREEQLAASECRRLQGKLSHEEAVLARQSLMQENKQRVEQQKEQMAKLMLQRAERRLREDRSRKELVEQVIEGQKNAKAAQTKLAKGRQQTVQEAIEESRGLLQRRAQAAQEEQRRRCELISQLRALETQPTRKGKLVDLTQIPGYGLEGEMSIVELRERLALLKENQRRKEEEKRDQIIQGKHTKSQELQNMVEQISLCRAAMGRSAALRWEEKKALAAAPAAPSQDERVQQLRRRISERAAERSRQAALLHVSAPRTARPKPRVSPDWWEEPGRLKAGAGWGWRARRAGTGVPGRGWRGDRVRSAAGRYAAAGAGGGGGVPARADAFPGLQAQLEAQHWLELERSRERRLQALQQGGSGPGPARRLEAA

SEQ ID NO: 11727 - protein, 281 aa, Homo sapiens
MSHGTYYECEPRGGQQPLEFSGGRAGPGELGDMCEHEASIDLSAYIESGEEQLLSDLFAVKPAPEARGLKGPGTPAFPHYLPPDPRPFAYPPHTFGPDRKALGPGIYSSPGSYDPRAVAVKEEPRGPEGSRAASRGSYNPLQYQVAHCGQTAMHLPPTLAAPGQPLRVLKAPLATAAPPCSPLLKAPSPAGPLHKGKKAVNKDSLEYRLRRERNNIAVRKSRDKAKRRILETQQKVLEYMAENERLRSRVEQLTQELDTLRNLFRQIPEAANLIKGVGGCS

SEQ ID NO: 11728 - protein, 144 aa, Homo sapiens
MIKFFLMVNKQGQTRLSKYYEHVDINKRTLLETEVIKSCLSRSNEQCSFIEYKDFKLIYRQYAALFIVVGVNDTENEMAIYEFIHNFVEVLDEYFSRVSELDIMFNLDKVHIILDEMVLNGCIVETNRARILAPLLILDKMSES

SEQ ID NO: 11729 - protein, 159 aa, Homo sapiens
MIKFFLMVNKQGQTRLSKYYEHVDINKRTLLETEVIKSCLSRSNEQCSFIEYKDFKLIYRQYAALFIVVGVNDTENEMAIYEFIHNFVEVLDEYFSRVSELDVSFFNTVFHSTWQMHSGPYQEPIDELPKICSALEPQQTCFSPDSSSFKGAASTTPIY

SEQ ID NO: 11730 - protein, 135 aa, Homo sapiens
MIKFFLMVNKQGQTRLSKYYEHVDINKRTLLETEVIKSCLSRSNEQCSFIEYKDFKLIYRQYAALFIVVGVNDTENEMAIYEFIHNFVEVLDEYFSRVEPIDELPKICSALEPQQTCFSPDSSSFKGAASTTPIY

SEQ ID NO: 11731 - protein, 149 aa, Homo sapiens
MIKFFLMVNKQGQTRLSKYYEHVDINKRTLLETEVIKSCLSRSNEQCSFIEYKDFKLIYRQYAALFIVVGVNDTENEMAIYEFIHNFVEVLDEYFSRVSELDVSFFNTVFHSTWQMHSGPYQTRSCSVTQAGVQRCDHGSLHPGSPGLK

SEQ ID NO: 11732 - protein, 295 aa, Homo sapiens
MAGLNVSLSFFFATFALCEAARRASKALLPVGAYEVFAREAMRTLVELGPWAGDFGPDLLLTLLFLLFLAHGVTLDGASANPTVSLQEFLMAEQSLPGTLLKLAAQGLGMQAACTLMRLCWAWELSDLHLLQSLMAQSCSSALRTSVPHGALVEAACAFCFHLTLLHLRHSPPAYSGPAVALLVTVTAYTAGPFTSAFFNPALAASVTFACSGHTLLEYVQVYWLGPLTGMVLAVLLHQGRLPHLFQRNLFYGQKNKYRAPRGKPAPASGDTQTPAKGSSVREPGRSGVEGPHSS

SEQ ID NO: 11733 - protein, 234 aa, Homo sapiens
MEMGRRIHSELRNRAPSDVKELALDNSRSNEGKLEALTDEFEELEFLSKINGGLTSISDLPKLKLRKLELRVSGGLEVLAEKCPNLTHLYLSGNKIKDLSTIEPLKQLENLKSLDLFNCEVTNLNDYGENVFKLLLQLTYLDSCYWDHKEAPYSDIEDHVEGLDDEEEGEHEEEYDEDAQVVEDEEGEEEEEEGEEEDVSGGDEEDEEGYNDGEVDGEEDEEELGEEERGQKRK

SEQ ID NO: 11734 - protein, 131 aa, Homo sapiens
MEMGKWIHLELRNRTPSDVKELFLDNSQSNEGKLEGLTDEFEELELLNTINIGLTSIANLPKLNKLKKLELSSNRASVGLEVLAEKCPNLIHLNLSGNKIKDLSTIEPLKKLENLESLDLFTCEVTNLNNY

SEQ ID NO: 11735 - protein, 764 aa, Homo sapiens
MGSNLSPQLCLMPFILGLLSGGVTTTPWSLARPQGSCSLEGVEIKGGSFRLLQEGQALEYVCPSGFYPYPVQTRTCRSTGSWSTLKTQDQKTVRKAECRAIHCPRPHDFENGEYWPRSPYYNVSDEISFHCYDGYTLRGSANRTCQVNGRWSGQTAICDNGAGYCSNPGIPIGTRKVGSQYRLEDSVTYHCSRGLTLRGSQRRTCQEGGSWSGTEPSCQDSFMYDTPQEVAEAFLSSLTETIEGVDAEDGHGPGEQQKRKIVLDPSGSMNIYLVLDGSDSIGASNFTGAKKCLVNLIEKVASYGVKPRYGLVTYATYPKIWVKVSEADSSNADWVTKQLNEINYEDHKLKSGTNTKKALQAVYSMMSWPDDVPPEGWNRTRHVIILMTDGLHNMGGDPITVIDEIRDLLYIGKDRKNPREDYLDVYVFGVGPLVNQVNINALASKKDNEQHVFKVKDMENLEDVFYQMIDESQSLSLCGMVWEHRKGTDYHKQPWQAKISVIRPSKGHESCMGAVVSEYFVLTAAHCFTVDDKEHSIKVSVGGEKRDLEIEVVLFHPNYNINGKKEAGIPEFYDYDVALIKLKNKLKYGQTIRPICLPCTEGTTRALRLPPTTTCQQQKEELLPAQDIKALFVSEEEKKLTRKEVYIKNGDKKGSCERDAQYAPGYDKVKDISEVVTPRFLCTGGVSPYADPNTCRGDSGGPLIVHKRSRFIQVGVISWGVVDVCKNQKRQKQVPAHARDFHINLFQVLPWLKEKLQDEDLGFL

SEQ ID NO: 11736 - protein, 621 aa, Homo sapiens
MGSNLSPQLCLMPFILGLLSGGVTTTPWSLARPQGSCSLEGVEIKGGSFRLLQEGQALEYVCPSGFYPYPVQTRTCRSTGSWSTLKTQDQKTVRKAECRAIHCPRPHDFENGEYWPRSPYYNVSDEISFHCYDGYTLRGSANRTCQVNGRWSGQTAICDNGAGYCSNPGIPIGTRKVGSQYRLEDSVTYHCSRGLTLRGSQRRTCQEGGSWSGTEPSCQDSFMYDTPQEVAEAFLSSLTETIEGVDAEDGHGPGEQQKRKIVLDPSGSMNIYLVLDGSDSIGASNFTGAKKCLVNLIEKVASYGVKPRYGLVTYATYPKIWVKVSEADSSNADWVTKQLNEINYEDHKLKSGTNTKKALQAVYSMMSWPDDVPPEGWNRTRHVIILMTDGLHNMGGDPITVIDEIRDLLYIGKDRKNPREDYLDVYVFGVGPLVNQVNINALASKKDNEQHVFKVKDMENLEDVFYQMIDESQSLSLCGMVWEHRKGTDYHKQPWQAKISVIRPSKGHESCMGAVVSEYFVLTAAHCFTVDDKEHSIKVSVGKDATEGPGLHLCSPGNTSHFLQILHSTHPQCSPIPCTPDQSGMGEDVKLGMTRGQRQEAAHKEVVPTLLLQEGRSGTWR

SEQ ID NO: 11737 - protein, 823 aa, Homo sapiens
MKLFGFGSRRGQTAEGSIDHVYTGSGYRIRDSELQKIHRAAVKGDAAEVERCLARRSGDLDARDKQHRTALHLACASGHVQVVTLLVNRKCQIDICDKENRTPLIQAVHCQEEACAVILLKHGANPNLKDIYGNTALHYAVYSESTSLAEKLLSHGAHIEALDKDSNTPLLFAIICKKEKMVEFLLKKKASTHAVDRLRRSALMLAVYYDSPGIVSILLKQNIDVFAQDMCGRDAEDYAISHHLTKIQQQILEHKQKILKKEKSDVGSSDESAVSIFHELRVDSLPASDDKDLSVATKQCVPEKVSEPLPGPSHEKGNRIVNGQGEGPPAKHPSLKPTTGVEDPAVKGAVQRKNVQTLRAEQALPVASEEEQERHERSEKKQPQVKKGNNTNKSEKIQLSENICDSTSSAAAGRLTQQRKIGKTYPQQFPKKLKEEHDKCTLKQENEEKTNVNMLYKKNREELERKEKQYKKEVEAKQLEPTVQSLEMKSKTARNTPNRDFHNHEETKGLMDENCILKADIAILRQEICTMKNDNLEKENKYLKDIKIVKETNAALEKYIKLNEEMITETAFRYQQELNDLKAENTRLNAELLKEKESKKRLEADIESYQSRLAAAIGKHSESVKTERNVKLALERTQDVSVQVEMSSAISKVKDENEFLTEQLSETQIKFNALKDKFRKTRDSLRKKSLALETVQNDLRKTQQQTQEMKEMYQNAEAKVNNSTGKWNCVEERICHLQRENAWLVQQLDDVHQKEDHKEIVTNIQRGFIESGKKDLVLEEKSKKLMNECDHLKESLFQYEREKAEGVVSIKEDKYFQTSRKKI

SEQ ID NO: 11738 - protein, 395 aa, Homo sapiens
MNFKINVFICRCTLKQENEEKTNVNMLYKKNREELERKEKQYKKEVEAKQLEPTVQSLEMKSKTARNTPNRDFHNHEETKGLMDENCILKADIAILRQEICTMKNDNLEKENKYLKDIKIVKETNAALEKYIKLNEEMITETAFRYQQELNDLKAENTRLNAELLKEKESKKRLEADIESYQSRLAAAIGKHSESVKTERNVKLALERTQDVSVQVEMSSAISKVKDENEFLTEQLSETQIKFNALKDKFRKTRDSLRKKSLALETVQNDLRKTQQQTQEMKEMYQNAEAKVNNSTGKWNCVEERICHLQRENAWLVQQLDDVHQKEDHKEIVTNIQRGFIESGKKDLVLEEKSKKLMNECDHLKESLFQYEREKAEGVVSIKEDKYFQTSRKKI

SEQ ID NO: 11739 - protein, 1054 aa, Homo sapiens
MAAVKEPLEFHAKRPWRPEEAVEDPDEEDEDNTSEAENGFSLEEVLRLGGTKQDYLMLATLDENEEVIDGGKKGAIDDLQQGELEAFIQNLNLAKYTKASLVEEDEPAEKENSSKKEVKIPKINNKNTAESQRTSVNKVKNKNRPEPHSDENGSTTPKVKKDKQNIFEFFERQTLLLRPGGKWYDLEYSNEYSLKPQPQDVVSKYKTLAQKLYQHEINLFKSKTNSQKGASSTWMKAIVSSGTLGDRMAAMILLIQDDAVHTLQFVETLVNLVKKKGSKQQCLMALDTFKELLITDLLPDNRKLRIFSQRPFDKLEQLSSGNKDSRDRRLILWYFEHQLKHLVAEFVQVLETLSHDTLVTTKTRALTVAHELLCNKPEEEKALLVQVVNKLGDPQNRIATKASHLLETLLCKHPNMKGVVSGEVERLLFRSNISSKAQYYAICFLNQMALSHEESELANKLITVYFCFFRTCVKKKDVESKMLSALLTGVNRAYPYSQTGDDKVREQIDTLFKVLHIVNFNTSVQALMLLFQVMNSQQTISDRYYTALYRKMLDPGLMTCSKQAMFLNLVYKSLKADIVLRRVKAFVKRLLQVTCQQMPPFICGALYLVSEILKAKPGLRSQLDDHPESDDEENFIDANDDEDMEKFTDADKETEIVKKLETEETVPETDVETKKPEVASWVHFDNLKGGKQLNKYDPFSRNPLFCGAENTSLWELKKLSVHFHPSVALFAKTILQGNYIQYSGDPLQDFTLMRFLDRFVYRNPKPHKGKENTDSVVMQPKRKHFIKDIRHLPVNSKEFLAKEESQIPVDEVFFHRYYKKVAVKEKQKRDADEESIEDVDDEEFEELIDTFEDDNCFSSGKDDMDFAGNVKKRTKGAKDNTLDEDSEGSDDELGNLDDDEVSLGSMDDEEFAEVDEDGGTFMDVLDDESESVPELEVHSKVSTKKSKRKGTDDFDFAGSFQGPRKKKRNLNDSSLFVSAEEFGHLLDENMGSKFDNIGMNAMANKDNASLKQLRWEAERDDWLHNRDAKSIIKKKKHFKKKRIKTTQKTKKQRK

SEQ ID NO: 11740 - protein, 695 aa, Homo sapiens
MADIKTGIFAKNVQKRLNRAQEKVLQKLGKADETKDEQFEEYVQNFKRQEAEGTRLQRELRGYLAAIKGMQEASMKLTESLHEVYEPDWYGREDVKMVGEKCDVLWEDFHQKLVDGSLLTLDTYLGQFPDIKNRIAKRSRKLVDYDSARHHLEALQSSKRKDESRISKAEEEFQKAQKVFEEFNVDLQEELPSLWSRRVGFYVNTFKNVSSLEAKFHKEIAVLCHKLYEVMTKLGDQHADKAFTIQGAPSDSGPLRIAKTPSPPEEPSPLPSPTASPNHTLAPASPAPARPRSPSQTRKGPPVPPLPKVTPTKELQQENIISFFEDNFVPEISVTTPSQNEVPEVKKEETLLDLDFDPFKPEVTPAGSAGVTHSPMSQTLPWDLWTTSTDLVQPASGGSFNGFTQPQDTSLFTMQTDQSMICNLAESEQAPPTEPKAEEPLAAVTPAVGLDLGMDTRAEEPVEEAVIIPGADADAAVGTLVSAAEGAPGEEAEAEKATVPAGEGVSLEEAKIGTETTEGAESAQPEAEELEATVPQEKVIPSVVIEPASNHEEEGENEITIGAEPKETTEDAAPPGPTSETPELATEQKPIQDPQPTPSAPAMGAADQLASAREASQELPPGFLYKVETLHDFEAANSDELTLQRGDVVLVVPSDSEADQDAGWLVGVKESDWLQYRDLATYKGLFPENFTRRLD

SEQ ID NO: 11741 - protein, 653 aa, Homo sapiens
MADIKTGIFAKNVQKRLNRAQEKVLQKLGKADETKDEQFEEYVQNFKRQEAEGTRLQRELRGYLAAIKGMQEASMKLTESLHEVYEPDWYGREDVKMVGEKCDVLWEDFHQKLVDGSLLTLDTYLGQFPDIKNRIAKRSRKLVDYDSARHHLEALQSSKRKDESRISKAEEEFQKAQKVFEEFNVDLQEELPSLWSRRVGFYVNTFKNVSSLEAKFHKEIAVLCHKLYEVMTKLGDQHADKAFTIQGAPSDSGPLRIAKTPSPPEEPSPLPSPTASPNHTLAPASPAPARPRSPSQTRKGPPVPPLPKVTPTKELQQENIISFFEDNFVPEISVTTPSQNEVPEVKKEETLLDLDFDPFKPEVTPAGSAGVTHSPMSQTLPWDLWTTSTDLVQPASGGSFNGFTQPQDTSLFTMQTDQSMICNLIIPGADADAAVGTLVSAAEGAPGEEAEAEKATVPAGEGVSLEEAKIGTETTEGAESAQPEAEELEATVPQEKVIPSVVIEPASNHEEEGENEITIGAEPKETTEDAAPPGPTSETPELATEQKPIQDPQPTPSAPAMGAADQLASAREASQELPPGFLYKVETLHDFEAANSDELTLQRGDVVLVVPSDSEADQDAGWLVGVKESDWLQYRDLATYKGLFPENFTRRLD

SEQ ID NO: 11742 - protein, 1023 aa, Homo sapiens
MGKGVGRDKYEPAAVSEQGDKKGKKGKKDRDMDELKKEVSMDDHKLSLDELHRKYGTDLSRGLTSARAAEILARDGPNALTPPPTTPEWIKFCRQLFGGFSMLLWIGAILCFLAYSIQAATEEEPQNDNLYLGVVLSAVVIITGCFSYYQEAKSSKIMESFKNMVPQQALVIRNGEKMSINAEEVVVGDLVEVKGGDRIPADLRIISANGCKVDNSSLTGESEPQTRSPDFTNENPLETRNIAFFSTNCVEGTARGIVVYTGDRTVMGRIATLASGLEGGQTPIAAEIEHFIHIITGVAVFLGVSFFILSLILEYTWLEAVIFLIGIIVANVPEGLLATVTVCLTLTAKRMARKNCLVKNLEAVETLGSTSTICSDKTGTLTQNRMTVAHMWFDNQIHEADTTENQSGVSFDKTSATWLALSRIAGLCNRAVFQANQENLPILKRAVAGDASESALLKCIELCCGSVKEMRERYAKIVEIPFNSTNKYQLSIHKNPNTSEPQHLLVMKGAPERILDRCSSILLHGKEQPLDEELKDAFQNAYLELGGLGERVLGFCHLFLPDEQFPEGFQFDTDDVNFPIDNLCFVGLISMIDPPRAAVPDAVGKCRSAGIKVIMVTGDHPITAKAIAKGVGIISEGNETVEDIAARLNIPVSQVNPRDAKACVVHGSDLKDMTSEQLDDILKYHTEIVFARTSPQQKLIIVEGCQRQGAIVAVTGDGVNDSPALKKADIGVAMGIAGSDVSKQAADMILLDDNFASIVTGVEEGRLIFDNLKKSIAYTLTSNIPEITPFLIFIIANIPLPLGTVTILCIDLGTDMVPAISLAYEQAESDIMKRQPRNPKTDKLVNERLISMAYGQIGMIQALGGFFTYFVILAENGFLPIHLLGLRVDWDDRWINDVEDSYGQQWTYEQRKIVEFTCHTAFFVSIVVVQWADLVICKTRRNSVFQQGMKNKILIFGLFEETALAAFLSYCPGMGVALRMYPLKPTWWFCAFPYSLLIFVYDEVRKLIIRRRPGGWVEKETYY

SEQ ID NO: 11743 - protein, 681 aa, Homo sapiens
MGKGVGRDKYEPAAVSEQGDKKGKKGKKDRDMDELKKEVSMDDHKLSLDELHRKYGTDLSRGLTSARAAEILARDGPNALTPPPTTPEWIKFCRQLFGGFSMLLWIGAILCFLAYSIQAATEEEPQNDNLYLGVVLSAVVIITGCFSYYQEAKSSKIMESFKNMVPQQALVIRNGEKMSINAEEVVVGDLVEVKGGDRIPADLRIISANGCKVDNSSLTGESEPQTRSPDFTNENPLETRNIAFFSTNCVEGTARGIVVYTGDRTVMGRIATLASGLEGGQTPIAAEIEHFIHIITGVAVFLGVSFFILSLILEYTWLEAVIFLIGIIVANVPEGLLATVTVCLTLTAKRMARKNCLVKNLEAVETLGSTSTICSDKTGTLTQNRMTVAHMWFDNQIHEADTTENQSGVSFDKTSATWLALSRIAGLCNRAVFQANQENLPILKRAVAGDASESALLKCIELCCGSVKEMRERYAKIVEIPFNSTNKYQLSIHKNPNTSEPQHLLVMKGAPERILDRCSSILLHGKEQPLDEELKDAFQNAYLELGGLGERVLGFCHLFLPDEQFPEGFQFDTDDVNFPIDNLCFVGLISMIDPPRAAVPDAVGKCRSAGIKVIMVTGDHPITAKAIAKGVGIISEGSGPMSRGKSWSSPATQPSSSVSWWCSGPTWSSVRPGGIRSSSRG

SEQ ID NO: 11744 - protein, 992 aa, Homo sapiens
MDELKKEVSMDDHKLSLDELHRKYGTDLSRGLTSARAAEILARDGPNALTPPPTTPEWIKFCRQLFGGFSMLLWIGAILCFLAYSIQAATEEEPQNDNLYLGVVLSAVVIITGCFSYYQEAKSSKIMESFKNMVPQQALVIRNGEKMSINAEEVVVGDLVEVKGGDRIPADLRIISANGCKVDNSSLTGESEPQTRSPDFTNENPLETRNIAFFSTNCVEGTARGIVVYTGDRTVMGRIATLASGLEGGQTPIAAEIEHFIHIITGVAVFLGVSFFILSLILEYTWLEAVIFLIGIIVANVPEGLLATVTVCLTLTAKRMARKNCLVKNLEAVETLGSTSTICSDKTGTLTQNRMTVAHMWFDNQIHEADTTENQSGVSFDKTSATWLALSRIAGLCNRAVFQANQENLPILKRAVAGDASESALLKCIELCCGSVKEMRERYAKIVEIPFNSTNKYQLSIHKNPNTSEPQHLLVMKGAPERILDRCSSILLHGKEQPLDEELKDAFQNAYLELGGLGERVLGFCHLFLPDEQFPEGFQFDTDDVNFPIDNLCFVGLISMIDPPRAAVPDAVGKCRSAGIKVIMVTGDHPITAKAIAKGVGIISEGNETVEDIAARLNIPVSQVNPRDAKACVVHGSDLKDMTSEQLDDILKYHTEIVFARTSPQQKLIIVEGCQRQGAIVAVTGDGVNDSPALKKADIGVAMGIAGSDVSKQAADMILLDDNFASIVTGVEEGRLIFDNLKKSIAYTLTSNIPEITPFLIFIIANIPLPLGTVTILCIDLGTDMVPAISLAYEQAESDIMKRQPRNPKTDKLVNERLISMAYGQIGMIQALGGFFTYFVILAENGFLPIHLLGLRVDWDDRWINDVEDSYGQQWTYEQRKIVEFTCHTAFFVSIVVVQWADLVICKTRRNSVFQQGMKNKILIFGLFEETALAAFLSYCPGMGVALRMYPLKPTWWFCAFPYSLLIFVYDEVRKLIIRRRPGGWVEKETYY

SEQ ID NO: 11745 - protein, 1023 aa, Homo sapiens
MAFKVGRDKYEPAAVSEQGDKKGKKGKKDRDMDELKKEVSMDDHKLSLDELHRKYGTDLSRGLTSARAAEILARDGPNALTPPPTTPEWIKFCRQLFGGFSMLLWIGAILCFLAYSIQAATEEEPQNDNLYLGVVLSAVVIITGCFSYYQEAKSSKIMESFKNMVPQQALVIRNGEKMSINAEEVVVGDLVEVKGGDRIPADLRIISANGCKVDNSSLTGESEPQTRSPDFTNENPLETRNIAFFSTNCVEGTARGIVVYTGDRTVMGRIATLASGLEGGQTPIAAEIEHFIHIITGVAVFLGVSFFILSLILEYTWLEAVIFLIGIIVANVPEGLLATVTVCLTLTAKRMARKNCLVKNLEAVETLGSTSTICSDKTGTLTQNRMTVAHMWFDNQIHEADTTENQSGVSFDKTSATWLALSRIAGLCNRAVFQANQENLPILKRAVAGDASESALLKCIELCCGSVKEMRERYAKIVEIPFNSTNKYQLSIHKNPNTSEPQHLLVMKGAPERILDRCSSILLHGKEQPLDEELKDAFQNAYLELGGLGERVLGFCHLFLPDEQFPEGFQFDTDDVNFPIDNLCFVGLISMIDPPRAAVPDAVGKCRSAGIKVIMVTGDHPITAKAIAKGVGIISEGNETVEDIAARLNIPVSQVNPRDAKACVVHGSDLKDMTSEQLDDILKYHTEIVFARTSPQQKLIIVEGCQRQGAIVAVTGDGVNDSPALKKADIGVAMGIAGSDVSKQAADMILLDDNFASIVTGVEEGRLIFDNLKKSIAYTLTSNIPEITPFLIFIIANIPLPLGTVTILCIDLGTDMVPAISLAYEQAESDIMKRQPRNPKTDKLVNERLISMAYGQIGMIQALGGFFTYFVILAENGFLPIHLLGLRVDWDDRWINDVEDSYGQQWTYEQRKIVEFTCHTAFFVSIVVVQWADLVICKTRRNSVFQQGMKNKILIFGLFEETALAAFLSYCPGMGVALRMYPLKPTWWFCAFPYSLLIFVYDEVRKLIIRRRPGGWVEKETYY

SEQ ID NO: 11746 - protein, 1429 aa, Homo sapiens
MTNPWEEKVCKMAQTSLLQGKQFYCREWVFHKLQHCLQEKSNCCNSAVNAPSLVMNSGNNASGVSGKGAAWGVLLVGGPGSGKTALCTELLWPSSPASLQRGLHRQALAFHFCKAQDSDTLCVGGFIRGLVAQICRSGLLQGYEDKLRDPAVQSLLQPGECERNPAEAFKRCVLLPLLGMKPPQQSLYLLVDSVDEGCNITEGEQTSTSLSGTVAALLAGHHEFFPPWLLLLCSARKQSKAVTKMFTGFRKISLDDLRKAYIVKDVQQYILHRLDQEEALRQHLTKETAEMLNQLHIKSSGCFLYLERVLDGVVENFIMLREIRDIPGTLNGLYLWLCQRLFVRKQFAKVQPILNVILAACRPLTITELYHAVWTKNMSLTLEDFQRKLDILSKLLVDGLGNTKILFHYSFAEWLLDVKHCTQKYLCNAAEGHRMLAMSYTCQAKNLTPLEAQEFALHLINSNLQLETAELALWMIWNGTPVRDSLSTLIPKEQEVLQLLVKAGAHVNSEDDRTSCIVRQALEREDSIRTLLDNGASVNQCDSNGRTLLANAAYSGSLDVVNLLVSRGADLEIEDAHGHTPLTLAARQGHTKVVNCLIGCGANINHTDQDGWTALRSAAWGGHTEVVSALLYAGVKVDCADADSRTALRAAAWGGHEDIVLNLLQHGAEVNKADNEGRTALIAAAYMGHREIVEHLLDHGAEVNHEDVDGRTALSVAALCVPASKGHASVVSLLIDRGAEVDHCDKDGMTPLLVAAYEGHVDVVDLLLEGGADVDHTDNNGRTPLLAAASMGHASVVNTLLFWGAAVDSIDSEGRTVLSIASAQGNVEVVRTLLDRGLDENHRDDAGWTPLHMAAFEGHRLICEALIEQGARTNEIDNDGRIPFILASQEGHYDCVQILLENKSNIDQRGYDGRNALRVAALEGHRDIVELLFSHGADVNCKDADGRPTLYILALENQLTMAEYFLENGANVEASDAEGRTALHVSCWQGHMEMVQVLIAYHADVNAADNEKRSALQSAAWQGHVKVVQLLIEHGAVVDHTCNQGATALCIAAQEGHIDVVQVLLEHGADPNHADQFGRTAMRVAAKNGHSQIIKLLEKYGASSLNGCSPSPVHTMEQKPLQSLSSKVQSLTIKSNSSGSTGGGDMQPSLRGLPNGPTHAFSSPSESPDSTVDRQKSSLSNNSLKSSKNSSLRTTSSTATAQTVPIDSFHNLSFTEQIQQHSLPRSRSRQSIVSPSSTTQSLGQSHNSPSSEFEWSQVKPSLKSTKASKGGKSENSAKSGSAGKKAKQSNSSQPKVLEYEMTQFDRRGPIAKSGTAAPPKQMPAESQCKIMIPSAQQEIGRSQQQFLIHQQSGEQKKRNGIMTNPNYHLQSNQVFLGRVSVPRTMQDRGHQEVLEGYPSSETELSLKQALKLQIEGSDPSFNYKKETPL

SEQ ID NO: 11747 - protein, 1250 aa, Homo sapiens
MKPPQQSLYLLVDSVDEGCNITEGEQTSTSLSGTVAALLAGHHEFFPPWLLLLCSARKQSKAVTKMFTGFRKISLDDLRKAYIVKDVQQYILHRLDQEEALRQHLTKETAEMLNQLHIKSSGCFLYLERVLDGVVENFIMLREIRDIPGTLNGLYLWLCQRLFVRKQFAKVQPILNVILAACRPLTITELYHAVWTKNMSLTLEDFQRKLDILSKLLVDGLGNTKILFHYSFAEWLLDVKHCTQKYLCNAAEGHRMLAMSYTCQAKNLTPLEAQEFALHLINSNLQLETAELALWMIWNGTPVRDSLSTLIPKEQEVLQLLVKAGAHVNSEDDRTSCIVRQALEREDSIRTLLDNGASVNQCDSNGRTLLANAAYSGSLDVVNLLVSRGADLEIEDAHGHTPLTLAARQGHTKVVNCLIGCGANINHTDQDGWTALRSAAWGGHTEVVSALLYAGVKVDCADADSRTALRAAAWGGHEDIVLNLLQHGAEVNKADNEGRTALIAAAYMGHREIVEHLLDHGAEVNHEDVDGRTALSVAALCVPASKGHASVVSLLIDRGAEVDHCDKDGMTPLLVAAYEGHVDVVDLLLEGGADVDHTDNNGRTPLLAAASMGHASVVNTLLFWGAAVDSIDSEGRTVLSIASAQGNVEVVRTLLDRGLDENHRDDAGWTPLHMAAFEGHRLICEALIEQGARTNEIDNDGRIPFILASQEGHYDCVQILLENKSNIDQRGYDGRNALRVAALEGHRDIVELLFSHGADVNCKDADGRPTLYILALENQLTMAEYFLENGANVEASDAEGRTALHVSCWQGHMEMVQVLIAYHADVNAADNEKRSALQSAAWQGHVKVVQLLIEHGAVVDHTCNQGATALCIAAQEGHIDVVQVLLEHGADPNHADQFGRTAMRVAAKNGHSQIIKLLEKYGASSLNGCSPSPVHTMEQKPLQSLSSKVQSLTIKSNSSGSTGGGDMQPSLRGLPNGPTHAFSSPSESPDSTVDRQKSSLSNNSLKSSKNSSLRTTSSTATAQTVPIDSFHNLSFTEQIQQHSLPRSRSRQSIVSPSSTTQSLGQSHNSPSSEFEWSQVKPSLKSTKASKGGKSENSAKSGSAGKKAKQSNSSQPKVLEYEMTQFDRRGPIAKSGTAAPPKQMPAESQCKIMIPSAQQEIGRSQQQFLIHQQSGEQKKRNGIMTNPNYHLQSNQVFLGRVSVPRTMQDRGHQEVLEGYPSSETELSLKQALKLQIEGSDPSFNYKKETPL

SEQ ID NO: 11748 - protein, 511 aa, Homo sapiens
MSGGFELQPRDGGPRVALAPGETVIGRGPLLGITDKRVSRRHAILEVAGGQLRIKPIHTNPCFYQSSEKSQLLPLKPNLWCYLNPGDSFSLLVDKYIFRILSIPSEVEMQCTLRNSQVLDEDNILNETPKSPVINLPHETTGASQLEGSTEIAKTQMTPTNSVSFLGENRDCNKQQPILAERKRILPTWMLAEHLSDQNLSVPAISGGNVIQGSGKEEICKDKSQLNTTQQGRRQLISSGSSENTSAEQDTGEECKNTDQEESTISSKEMPQSFSAITLSNTEMNNIKTNAQRNKLPIEELGKVSKHKIATKRTPHKEDEAMSCSENCSSAQGDSLQDESQGSHSESSSNPSNPETLHAKATDSVLQGSEGNKVKRTSCMYGANCYRKNPVHFQHFSHPGDSDYGGVQIVGQDETDDRPECPYGPSCYRKNPQHKIEYRHNTLPVRNVLDEDNDNVGQPNEYDLNDSFLDDEEEDYEPTDEDSDWEPGKEDEEKEDVEELLKEAKRFMKRK

SEQ ID NO: 11749 - protein, 339 aa, Homo sapiens
MSTVHEILCKLSLEGDHSTPPSAYGSVKAYTNFDAERDALNIETAIKTKGVDEVTIVNILTNRSNAQRQDIAFAYQRRTKKELASALKSALSGHLETVILGLLKTPAQYDASELKASMKGLGTDEDSLIEIICSRTNQELQEINRVYKEMYKTDLEKDIISDTSGDFRKLMVALAKGRRAEDGSVIDYELIDQDARDLYDAGVKRKGTDVPKWISIMTERSVPHLQKVFDRYKSYSPYDMLESIRKEVKGDLENAFLNLVQCIQNKPLYFADRLYDSMKGKGTRDKVLIRIMVSRSEVDMLKIRSEFKRKYGKSLYYYIQQDTKGDYQKALLYLCGGDD

SEQ ID NO: 11750 - protein, 357 aa, Homo sapiens
MGRQLAGCGDAGKKASFKMSTVHEILCKLSLEGDHSTPPSAYGSVKAYTNFDAERDALNIETAIKTKGVDEVTIVNILTNRSNAQRQDIAFAYQRRTKKELASALKSALSGHLETVILGLLKTPAQYDASELKASMKGLGTDEDSLIEIICSRTNQELQEINRVYKEMYKTDLEKDIISDTSGDFRKLMVALAKGRRAEDGSVIDYELIDQDARDLYDAGVKRKGTDVPKWISIMTERSVPHLQKVFDRYKSYSPYDMLESIRKEVKGDLENAFLNLVQCIQNKPLYFADRLYDSMKGKGTRDKVLIRIMVSRSEVDMLKIRSEFKRKYGKSLYYYIQQDTKGDYQKALLYLCGGDD

SEQ ID NO: 11751 - protein, 337 aa, Homo sapiens
MNPESSIFIEDYLKYFQDQVSRENLLQLLTDDEAWNGFVAAAELPRDEADELRKALNKLASHMVMKDKNRHDKDQQHRQWFLKEFPRLKRELEDHIRKLRALAEEVEQVHRGTTIANVVSNSVGTTSGILTLLGLGLAPFTEGISFVLLDTGMGLGAAAAVAGITCSVVELVNKLRARAQARNLDQSGTNVAKVMKEFVGGNTPNVLTLVDNWYQVTQGIGRNIRAIRRARANPQLGAYAPPPHIIGRISAEGGEQVERVVEGPAQAMSRGTMIVGAATGGILLLLDVVSLAYESKHLLEGAKSESAEELKKRAQELEGKLNFLTKIHEMLQPGQDQ

SEQ ID NO: 11752 - protein, 151 aa, Homo sapiens
MSSFSTTTVSFLLLLAFQLLGQTRANPMYNAVSNADLMDFKNLLDHLEEKMPLEDEVVPPQVLSEPNEEAGAALSPLPEVPPWTGEVSPAQRDGGALGRGPWDSSDRSALLKSKLRALLTAPRSLRRSSCFGGRMDRIGAQSGLGCNSFRY

SEQ ID NO: 11753 - protein, 1435 aa, Homo sapiens
MMQGNKKCTDAFSDSSSIGSVLDDADREVSSLTDRAFRSLCISEDTSFHDSYLAVSPDITRQVFGTFHQRTVGHTQRKSGIWSQLPSQGTEHSGWAATFQQLPKYVQGEEKYPKTSPPPTPVQRRLEVPVSGLRSSNKPVSKVSTLIKSFDRTESQRCESRPTASKPPALKNPPKFAPLPENSVNFCFDSAFLTVRRVPAEVSNTHQNSYQPGRKHGEQESSKNPEMACHGSSSFLPAANDTATLCESKFPSPHHKPVTGEPGRGKGTFLHSENSAFESWNAHQPKLLERKDTAGTVPESKAPKHYGDTTLLREPCPPERTVSPCQVQASCSQEENRLAAGALSTSIPWGCRDPGAQVFAVEGKAPSSQPDSQEKPAQPPWRKPKTGKKGKESLQDTLEEKTQTNQRGPPLYTKHNPQEQFSENNALDLPVEPNEHYDPPFNISKLLTPIIPSKHALDSADSQPAERTPSPPGQLNGYQEKEPSECQSRDSYKSKAPSLLFNLKDVRKRVKSTYSSSPLLKVLDEKTRGKVDGKQEPVSNGVILPNGLEESPPNELSKERPADDPTASHINPQKDPTADPSEPSADSYLTLSTAPTIAKAPFYVNGEAAERSSYENKEVEGELEMGPAGSSWCPDSREHRPRKHLSLRLCNRDPEPGGATEKMKTHQLENGLSRSVSQETEPEREAGLQNTHLNQKFFPGPLSPEEEDVFYSDSQSDFMPSLKGKAKFSTSSSDQSFASFDDQQKMWFTENQREDRRKDVSAGDSQKDEKENVMRKDELQYCALSNGHACLENRSQGEALQRERESVSGGRTRKASAEEANFRGSWIGENKGTTFSQAKDLTPSPSSASNRHMLFTIKDNTLRATPVIKPIMLPLLRTMSLEDSLSSGHKEEELPRPEWGEDPGFCAPENQDILGTSTPTNTRGTRVKCMANEVMEDPGQGSSMARMEASQPAPKGNFPSMPLVGEGDRVKAPPDAAPGLVASNCKSGSADSGKLAAPWHIPTIALPEGDIEDQPPPWQPENCWEEQTPGFKSHFLSTPRAGPPGRRLVPSERANSPNPGSPGESSACSPAASNIWEESSQAPGGPELLPEEPNQASPWASSSPARVTRREDLTHALVWEGGSDPLLELSAEDLRTLSPRGSLLDVATSPAGTSGRLELPAQLERTASKPPAVPPKTEKALRRAKKLASKRRKTDQAQEKHGESQEGKPCPEDLEQTQQRPLCPRERPRHNFPVVRSLPPPVHRHSVSGFSEPVGRRPGGPQSLTPLPAYPATQKVLQDPQSGEYFVFDLPLQVKIKTFYDPETGKYVKVSIPSSEGASPEPPPPDALAAPYVLYPGFQPVPVTALMPLRCSSQLSAPTFLRQGPRASAARARTQSVHESGLQLDPGPHGDCTPHSAGQRPHGPPQSPGEEGVEAPGLGIISTDDLEDFATEGIS

SEQ ID NO: 11754 - protein, 719 aa, Homo sapiens
MMQGNKKCTDAFSDSSSIGSVLDDADREVSSLTDRAFRSLCISEDTSFHDSYLAVSPDITRQVFGTFHQRTVGHTQRKSGIWSQLPSQGTEHSGWAATFQQLPKYVQGEEKYPKTSPPPTPVQRRLEVPVSGLRSSNKPVSKVSTLIKSFDRTESQRCESRPTASKPPALKNPPKFAPLPENSVNFCFDSAFLTVRRVPAEVSNTHQNSYQPGRKHGEQESSKNPEMACHGSSSFLPAANDTATLCESKFPSPHHKPVTGEPGRGKGTFLHSENSAFESWNAHQPKLLERKDTAGTVPESKAPKHYGDTTLLREPCPPERTVSPCQVQASCSQEENRLAAGALSTSIPWGCRDPGAQVFAVEGKAPSSQPDSQEKPAQPPWRKPKTGKKGKESLQDTLEEKTQTNQRGPPLYTKHNPQEQFSENNALDLPVEPNEHYDPPFNISKLLTPIIPSKHALDSADSQPAERTPSPPGQLNGYQEKEPSECQSRDSYKSKAPSLLFNLKDVRKRVKSTYSSSPLLKVLDEKTRGKVDGKQEPVSNGVILPNGLEESPPNELSKERPADDPTASHINPQKDPTADPSEPSADSYLTLSTAPTIAKAPFYVNGEAAERSSYENKEVEGELEMGPAGSSWCPDSREHRPRKHLSLRLCNRDPEPGGATEKMKTHQLENGLSRSVSQETEPEREAGLQNTHTHTHTHTHTHDHQHILSLFRSIKSRRQ

SEQ ID NO: 11755 - protein, 411 aa, Homo sapiens
MSKDALNLAQMQEQTLQLEQQSKLKQLVNEDLRKQEESVQKHHQTFLESIRAAGTLFGEGFRAFVTDRDKVTATVAGLTLLAVGVYSAKNATAVTGRYIEARLGKPSLVRETSRITVLEALRHPIQQVSRRLLSRPQDVLEGVVLSPSLEARVRDIAIMTRNIKKNRGLYRHILLYGPPGTGKTLFAKKLALHSGMDYAIMTGGDVAPMGREGVTAMHKLFDWANTSRRGLLLFVDEADAFLRKRATEKISEDLRATLNAFLYRTGQHSNKFMLILASCHPEQFDWAINACIDVMVHFDLPGQEERARLVRMYLNEYVLKPATEGKRRLKLAQFDYGRKCLEIARLTEGMSCRKIAQLAVSWQATAYASKDGVLTEAMMDACVQDFVQQHQQMMRWLKGERPGPEDEQPSS

SEQ ID NO: 11756 - protein, 589 aa, Homo sapiens
MLHLHHSCLCFRSWLPAMLAVLLSLAPSASSDISASRPNILLLMADDLGIGDIGCYGNNTMRTPNIDRLAEDGVKLTQHISAASLCTPSRAAFLTGRYPVRSGMVSSIGYRVLQWTGASGGLPTNETTFAKILKEKGYATGLIGKWHLGLNCESASDHCHHPLHHGFDHFYGMPFSLMGDCARWELSEKRVNLEQKLNFLFQVLALVALTLVAGKLTHLIPVSWMPVIWSALSAVLLLASSYFVGALIVHADCFLMRNHTITEQPMCFQRTTPLILQEVASFLKRNKHGPFLLFVSFLHVHIPLITMENFLGKSLHGLYGDNVEEMDWMVGRILDTLDVEGLSNSTLIYFTSDHGGSLENQLGNTQYGGWNGIYKGGKGMGGWEGGIRVPGIFRWPGVLPAGRVIGEPTSLMDVFPTVVRLAGGEVPQDRVIDGQDLLPLLLGTAQHSDHEFLMHYCERFLHAARWHQRDRGTMWKVHFVTPVFQPEGAGACYGRKVCPCFGEKVVHHDPPLLFDLSRDPSETHILTPASEPVFYQVMERVQQAVWEHQRTLSPVPLQLDRLGNIWRPWLQPCCGPFPLCWCLREDDPQ

SEQ ID NO: 11757 - protein, 499 aa, Homo sapiens
MCELYSKRDTLGLRKKHIGPSCKVFFASDPIKIVRAQRQYMFDENGEQYLDCINNVAHVGHCHPGVVKAALKQMELLNTNSRFLHDNIVEYAKRLSATLPEKLSVCYFTNSGSEANDLALRLARQFRGHQDVITLDHAYHGHLSSLIEISPYKFQKGKDVKKEFVHVAPTPDTYRGKYREDHADSASAYADEVKKIIEDAHNSGRKIAAFIAESMQSCGGQIIPPAGYFQKVAEYVHGAGGVFIADEVQVGFGRVGKHFWSFQMYGEDFVPDIVTMGKPMGNGHPVACVVTTKEIAEAFSSSGMEYFNTYGGNPVSCAVGLAVLDIIENEDLQGNAKRVGNYLTELLKKQKAKHTLIGDIRGIGLFIGIDLVKDHLKRTPATAEAQHIIYKMKEKRVLLSADGPHRNVLKIKPPMCFTEEDAKFMVDQLDRILTVLEEAMGTKTESVTSENTPCKTKMLKEAHIELLRDSTTDSKENPSRKRNGMCTDTHSLLSKRLKT

SEQ ID NO: 11758 - protein, 493 aa, Homo sapiens
MCELYSKRDTLGLRKKHIGPSCKVFFASDPIKIVRAQRQYMFDENGEQYLDCINNVAHGVVKAALKQMELLNTNSRFLHDNIVEYAKRLSATLPEKLSVCYFTNSGSEANDLALRLARQFRGHQDVITLDHAYHGHLSSLIEISPYKFQKGKDVKKEFVHVAPTPDTYRGKYREDHADSASAYADEVKKIIEDAHNSGRKIAAFIAESMQSCGGQIIPPAGYFQKVAEYVHGAGGVFIADEVQVGFGRVGKHFWSFQMYGEDFVPDIVTMGKPMGNGHPVACVVTTKEIAEAFSSSGMEYFNTYGGNPVSCAVGLAVLDIIENEDLQGNAKRVGNYLTELLKKQKAKHTLIGDIRGIGLFIGIDLVKDHLKRTPATAEAQHIIYKMKEKRVLLSADGPHRNVLKIKPPMCFTEEDAKFMVDQLDRILTVLEEAMGTKTESVTSENTPCKTKMLKEAHIELLRDSTTDSKENPSRKRNGMCTDTHSLLSKRLKT

SEQ ID NO: 11759 - protein, 441 aa, Homo sapiens
MGHCHPGVVKAALKQMELLNTNSRFLHDNIVEYAKRLSATLPEKLSVCYFTNSGSEANDLALRLARQFRGHQDVITLDHAYHGHLSSLIEISPYKFQKGKDVKKEFVHVAPTPDTYRGKYREDHADSASAYADEVKKIIEDAHNSGRKIAAFIAESMQSCGGQIIPPAGYFQKVAEYVHGAGGVFIADEVQVGFGRVGKHFWSFQMYGEDFVPDIVTMGKPMGNGHPVACVVTTKEIAEAFSSSGMEYFNTYGGNPVSCAVGLAVLDIIENEDLQGNAKRVGNYLTELLKKQKAKHTLIGDIRGIGLFIGIDLVKDHLKRTPATAEAQHIIYKMKEKRVLLSADGPHRNVLKIKPPMCFTEEDAKFMVDQLDRILTVLEEAMGTKTESVTSENTPCKTKMLKEAHIELLRDSTTDSKENPSRKRNGMCTDTHSLLSKRLKT

SEQ ID NO: 11760 - protein, 1243 aa, Homo sapiens [sequence omitted]

SEQ ID NO: 11761 - protein, 1199 aa, Homo sapiens
MGDMTNSDFYSKNQRNESSHGGEFGCTMEELRSLMELRGTEAVVKIKETYGDTEAICRRLKTSPVEGLPGTAPDLEKRKQIFGQNFIPPKKPKTFLQLVWEALQDVTLIILEIAAIISLGLSFYHPPGEGNEGCATAQGGAEDEGEAEAGWIEGAAILLSVICVVLVTAFNDWSKEKQFRGLQSRIEQEQKFTVVRAGQVVQIPVAEIVVGDIAQVKYGDLLPADGLFIQGNDLKIDESSLTGESDQVRKSVDKDPMLLSGTHVMEGSGRMLVTAVGVNSQTGIIFTLLGAGGEEEEKKDKKGVKKGDGLQLPAADGAAASNAADSANASLVNGKMQDGNVDASQSKAKQQDGAAAMEMQPLKSAEGGDADDRKKASMHKKEKSVLQGKLTKLAVQIGKAGLVMSAITVIILVLYFTVDTFVVNKKPWLPECTPVYVQYFVKFFIIGVTVLVVAVPEGLPLAVTISLAYSVKKMMKDNNLVRHLDACETMGNATAICSDKTGTLTTNRMTVVQAYVGDVHYKEIPDPSSINTKTMELLINAIAINSAYTTKILPPEKEGALPRQVGNKTECGLLGFVLDLKQDYEPVRSQMPEEKLYKVYTFNSVRKSMSTVIKLPDESFRMYSKGASEIVLKKCCKILNGAGEPRVFRPRDRDEMVKKVIEPMACDGLRTICVAYRDFPSSPEPDWDNENDILNELTCICVVGIEDPVRPEVPEAIRKCQRAGITVRMVTGDNINTARAIAIKCGIIHPGEDFLCLEGKEFNRRIRNEKGEIEQERIDKIWPKLRVLARSSPTDKHTLVKGIIDSTHTEQRQVVAVTGDGTNDGPALKKADVGFAMGIAGTDVAKEASDIILTDDNFSSIVKAVMWGRNVYDSISKFLQFQLTVNVVAVIVAFTGACITQDSPLKAVQMLWVNLIMDTFASLALATEPPTETLLLRKPYGRNKPLISRTMMKNILGHAVYQLALIFTLLFVGEKMFQIDSGRNAPLHSPPSEHYTIIFNTFVMMQLFNEINARKIHGERNVFDGIFRNPIFCTIVLGTFAIQIVIVQFGGKPFSCSPLQLDQWMWCIFIGLGELVWGQVIATIPTSRLKFLKEAGRLTQKEEIPEEELNEDVEEIDHAERELRRGQILWFRGLNRIQTQIEVVNTFKSGASFQGALRRQSSVTSQSQDVANLSSPSRVSLSNALSSPTSLPPAAAGQG

SEQ ID NO: 11762 - protein, 1185 aa, Homo sapiens
MGDMTNSDFYSKNQRNESSHGGEFGCTMEELRSLMELRGTEAVVKIKETYGDTEAICRRLKTSPVEGLPGTAPDLEKRKQIFGQNFIPPKKPKTFLQLVWEALQDVTLIILEIAAIISLGLSFYHPPGEGNEGCATAQGGAEDEGEAEAGWIEGAAILLSVICVVLVTAFNDWSKEKQFRGLQSRIEQEQKFTVVRAGQVVQIPVAEIVVGDIAQVKYGDLLPADGLFIQGNDLKIDESSLTGESDQVRKSVDKDPMLLSGTHVMEGSGRMLVTAVGVNSQTGIIFTLLGAGGEEEEKKDKKGVKKGDGLQLPAADGAAASNAADSANASLVNAKQQDGAAAMEMQPLKSAEGGDADDRKKASMHKKEKSVLQGKLTKLAVQIGKAGLVMSAITVIILVLYFTVDTFVVNKKPWLPECTPVYVQYFVKFFIIGVTVLVVAVPEGLPLAVTISLAYSVKKMMKDNNLVRHLDACETMGNATAICSDKTGTLTTNRMTVVQAYVGDVHYKEIPDPSSINTKTMELLINAIAINSAYTTKILPPEKEGALPRQVGNKTECGLLGFVLDLKQDYEPVRSQMPEEKLYKVYTFNSVRKSMSTVIKLPDESFRMYSKGASEIVLKKCCKILNGAGEPRVFRPRDRDEMVKKVIEPMACDGLRTICVAYRDFPSSPEPDWDNENDILNELTCICVVGIEDPVRPEVPEAIRKCQRAGITVRMVTGDNINTARAIAIKCGIIHPGEDFLCLEGKEFNRRIRNEKGEIEQERIDKIWPKLRVLARSSPTDKHTLVKGIIDSTHTEQRQVVAVTGDGTNDGPALKKADVGFAMGIAGTDVAKEASDIILTDDNFSSIVKAVMWGRNVYDSISKFLQFQLTVNVVAVIVAFTGACITQDSPLKAVQMLWVNLIMDTFASLALATEPPTETLLLRKPYGRNKPLISRTMMKNILGHAVYQLALIFTLLFVGEKMFQIDSGRNAPLHSPPSEHYTIIFNTFVMMQLFNEINARKIHGERNVFDGIFRNPIFCTIVLGTFAIQIVIVQFGGKPFSCSPLQLDQWMWCIFIGLGELVWGQVIATIPTSRLKFLKEAGRLTQKEEIPEEELNEDVEEIDHAERELRRGQILWFRGLNRIQTQIEVVNTFKSGASFQGALRRQSSVTSQSQDVANLSSPSRVSLSNALSSPTSLPPAAAGQG

SEQ ID NO: 11763 - protein, 1154 aa, Homo sapiens
MGDMTNSDFYSKNQRNESSHGGEFGCTMEELRSLMELRGTEAVVKIKETYGDTEAICRRLKTSPVEGLPGTAPDLEKRKQIFGQNFIPPKKPKTFLQLVWEALQDVTLIILEIAAIISLGLSFYHPPGEGNEGCATAQGGAEDEGEAEAGWIEGAAILLSVICVVLVTAFNDWSKEKQFRGLQSRIEQEQKFTVVRAGQVVQIPVAEIVVGDIAQVKYGDLLPADGLFIQGNDLKIDESSLTGESDQVRKSVDKDPMLLSGTHVMEGSGRMLVTAVGVNSQTGIIFTLLGAGGEEEEKKDKKAKQQDGAAAMEMQPLKSAEGGDADDRKKASMHKKEKSVLQGKLTKLAVQIGKAGLVMSAITVIILVLYFTVDTFVVNKKPWLPECTPVYVQYFVKFFIIGVTVLVVAVPEGLPLAVTISLAYSVKKMMKDNNLVRHLDACETMGNATAICSDKTGTLTTNRMTVVQAYVGDVHYKEIPDPSSINTKTMELLINAIAINSAYTTKILPPEKEGALPRQVGNKTECGLLGFVLDLKQDYEPVRSQMPEEKLYKVYTFNSVRKSMSTVIKLPDESFRMYSKGASEIVLKKCCKILNGAGEPRVFRPRDRDEMVKKVIEPMACDGLRTICVAYRDFPSSPEPDWDNENDILNELTCICVVGIEDPVRPEVPEAIRKCQRAGITVRMVTGDNINTARAIAIKCGIIHPGEDFLCLEGKEFNRRIRNEKGEIEQERIDKIWPKLRVLARSSPTDKHTLVKGIIDSTHTEQRQVVAVTGDGTNDGPALKKADVGFAMGIAGTDVAKEASDIILTDDNFSSIVKAVMWGRNVYDSISKFLQFQLTVNVVAVIVAFTGACITQDSPLKAVQMLWVNLIMDTFASLALATEPPTETLLLRKPYGRNKPLISRTMMKNILGHAVYQLALIFTLLFVGEKMFQIDSGRNAPLHSPPSEHYTIIFNTFVMMQLFNEINARKIHGERNVFDGIFRNPIFCTIVLGTFAIQIVIVQFGGKPFSCSPLQLDQWMWCIFIGLGELVWGQVIATIPTSRLKFLKEAGRLTQKEEIPEEELNEDVEEIDHAERELRRGQILWFRGLNRIQTQIEVVNTFKSGASFQGALRRQSSVTSQSQDVANLSSPSRVSLSNALSSPTSLPPAAAGQG

SEQ ID NO: 11764 - protein, 1229 aa, Homo sapiens
MGDMTNSDFYSKNQRNESSHGGEFGCTMEELRSLMELRGTEAVVKIKETYGDTEAICRRLKTSPVEGLPGTAPDLEKRKQIFGQNFIPPKKPKTFLQLVWEALQDVTLIILEIAAIISLGLSFYHPPGEGNEGCATAQGGAEDEGEAEAGWIEGAAILLSVICVVLVTAFNDWSKEKQFRGLQSRIEQEQKFTVVRAGQVVQIPVAEIVVGDIAQVKYGDLLPADGLFIQGNDLKIDESSLTGESDQVRKSVDKDPMLLSGTHVMEGSGRMLVTAVGVNSQTGIIFTLLGAGGEEEEKKDKKGVKKGDGLQLPAADGAAASNAADSANASLVNAKQQDGAAAMEMQPLKSAEGGDADDRKKASMHKKEKSVLQGKLTKLAVQIGKAGLVMSAITVIILVLYFTVDTFVVNKKPWLPECTPVYVQYFVKFFIIGVTVLVVAVPEGLPLAVTISLAYSVKKMMKDNNLVRHLDACETMGNATAICSDKTGTLTTNRMTVVQAYVGDVHYKEIPDPSSINTKTMELLINAIAINSAYTTKILPPEKEGALPRQVGNKTECGLLGFVLDLKQDYEPVRSQMPEEKLYKVYTFNSVRKSMSTVIKLPDESFRMYSKGASEIVLKKCCKILNGAGEPRVFRPRDRDEMVKKVIEPMACDGLRTICVAYRDFPSSPEPDWDNENDILNELTCICVVGIEDPVRPEVPEAIRKCQRAGITVRMVTGDNINTARAIAIKCGIIHPGEDFLCLEGKEFNRRIRNEKGEIEQERIDKIWPKLRVLARSSPTDKHTLVKGIIDSTHTEQRQVVAVTGDGTNDGPALKKADVGFAMGIAGTDVAKEASDIILTDDNFSSIVKAVMWGRNVYDSISKFLQFQLTVNVVAVIVAFTGACITQDSPLKAVQMLWVNLIMDTFASLALATEPPTETLLLRKPYGRNKPLISRTMMKNILGHAVYQLALIFTLLFVGEKMFQIDSGRNAPLHSPPSEHYTIIFNTFVMMQLFNEINARKIHGERNVFDGIFRNPIFCTIVLGTFAIQIVIVQFGGKPFSCSPLQLDQWMWCIFIGLGELVWGQVIATIPTSRLKFLKEAGRLTQKEEIPEEELNEDVEEIDHAERELRRGQILWFRGLNRIQTQIRVVKAFRSSLYEGLEKPESRTSIHNFMAHPEFRIEDSQPHIPLIDDTDLEEDAALKQNSSPPSSLNKNNSAIDSGINLTTDTSKSATSSSPGSPIHSLETSL

SEQ ID NO: 11765 - protein, 1198 aa, Homo sapiens
MGDMTNSDFYSKNQRNESSHGGEFGCTMEELRSLMELRGTEAVVKIKETYGDTEAICRRLKTSPVEGLPGTAPDLEKRKQIFGQNFIPPKKPKTFLQLVWEALQDVTLIILEIAAIISLGLSFYHPPGEGNEGCATAQGGAEDEGEAEAGWIEGAAILLSVICVVLVTAFNDWSKEKQFRGLQSRIEQEQKFTVVRAGQVVQIPVAEIVVGDIAQVKYGDLLPADGLFIQGNDLKIDESSLTGESDQVRKSVDKDPMLLSGTHVMEGSGRMLVTAVGVNSQTGIIFTLLGAGGEEEEKKDKKAKQQDGAAAMEMQPLKSAEGGDADDRKKASMHKKEKSVLQGKLTKLAVQIGKAGLVMSAITVIILVLYFTVDTFVVNKKPWLPECTPVYVQYFVKFFIIGVTVLVVAVPEGLPLAVTISLAYSVKKMMKDNNLVRHLDACETMGNATAICSDKTGTLTTNRMTVVQAYVGDVHYKEIPDPSSINTKTMELLINAIAINSAYTTKILPPEKEGALPRQVGNKTECGLLGFVLDLKQDYEPVRSQMPEEKLYKVYTFNSVRKSMSTVIKLPDESFRMYSKGASEIVLKKCCKILNGAGEPRVFRPRDRDEMVKKVIEPMACDGLRTICVAYRDFPSSPEPDWDNENDILNELTCICVVGIEDPVRPEVPEAIRKCQRAGITVRMVTGDNINTARAIAIKCGIIHPGEDFLCLEGKEFNRRIRNEKGEIEQERIDKIWPKLRVLARSSPTDKHTLVKGIIDSTHTEQRQVVAVTGDGTNDGPALKKADVGFAMGIAGTDVAKEASDIILTDDNFSSIVKAVMWGRNVYDSISKFLQFQLTVNVVAVIVAFTGACITQDSPLKAVQMLWVNLIMDTFASLALATEPPTETLLLRKPYGRNKPLISRTMMKNILGHAVYQLALIFTLLFVGEKMFQIDSGRNAPLHSPPSEHYTIIFNTFVMMQLFNEINARKIHGERNVFDGIFRNPIFCTIVLGTFAIQIVIVQFGGKPFSCSPLQLDQWMWCIFIGLGELVWGQVIATIPTSRLKFLKEAGRLTQKEEIPEEELNEDVEEIDHAERELRRGQILWFRGLNRIQTQIRVVKAFRSSLYEGLEKPESRTSIHNFMAHPEFRIEDSQPHIPLIDDTDLEEDAALKQNSSPPSSLNKNNSAIDSGINLTTDTSKSATSSSPGSPIHSLETSL

SEQ ID NO: 11766 - protein, 1168 aa, Homo sapiens
MGDMTNSDFYSKNQRNESSHGGEFGCTMEELRSLMELRGTEAVVKIKETYGDTEAICRRLKTSPVEGLPGTAPDLEKRKQIFGQNFIPPKKPKTFLQLVWEALQDVTLIILEIAAIISLGLSFYHPPGEGNEGCATAQGGAEDEGEAEAGWIEGAAILLSVICVVLVTAFNDWSKEKQFRGLQSRIEQEQKFTVVRAGQVVQIPVAEIVVGDIAQVKYGDLLPADGLFIQGNDLKIDESSLTGESDQVRKSVDKDPMLLSGTHVMEGSGRMLVTAVGVNSQTGIIFTLLGAGGEEEEKKDKKGKMQDGNVDASQSKAKQQDGAAAMEMQPLKSAEGGDADDRKKASMHKKEKSVLQGKLTKLAVQIGKAGLVMSAITVIILVLYFTVDTFVVNKKPWLPECTPVYVQYFVKFFIIGVTVLVVAVPEGLPLAVTISLAYSVKKMMKDNNLVRHLDACETMGNATAICSDKTGTLTTNRMTVVQAYVGDVHYKEIPDPSSINTKTMELLINAIAINSAYTTKILPPEKEGALPRQVGNKTECGLLGFVLDLKQDYEPVRSQMPEEKLYKVYTFNSVRKSMSTVIKLPDESFRMYSKGASEIVLKKCCKILNGAGEPRVFRPRDRDEMVKKVIEPMACDGLRTICVAYRDFPSSPEPDWDNENDILNELTCICVVGIEDPVRPEVPEAIRKCQRAGITVRMVTGDNINTARAIAIKCGIIHPGEDFLCLEGKEFNRRIRNEKGEIEQERIDKIWPKLRVLARSSPTDKHTLVKGIIDSTHTEQRQVVAVTGDGTNDGPALKKADVGFAMGIAGTDVAKEASDIILTDDNFSSIVKAVMWGRNVYDSISKFLQFQLTVNVVAVIVAFTGACITQDSPLKAVQMLWVNLIMDTFASLALATEPPTETLLLRKPYGRNKPLISRTMMKNILGHAVYQLALIFTLLFVGEKMFQIDSGRNAPLHSPPSEHYTIIFNTFVMMQLFNEINARKIHGERNVFDGIFRNPIFCTIVLGTFAIQIVIVQFGGKPFSCSPLQLDQWMWCIFIGLGELVWGQVIATIPTSRLKFLKEAGRLTQKEEIPEEELNEDVEEIDHAERELRRGQILWFRGLNRIQTQIEVVNTFKSGASFQGALRRQSSVTSQSQDVANLSSPSRVSLSNALSSPTSLPPAAAGQG

SEQ ID NO: 11767 - protein, 1212 aa, Homo sapiens
MGDMTNSDFYSKNQRNESSHGGEFGCTMEELRSLMELRGTEAVVKIKETYGDTEAICRRLKTSPVEGLPGTAPDLEKRKQIFGQNFIPPKKPKTFLQLVWEALQDVTLIILEIAAIISLGLSFYHPPGEGNEGCATAQGGAEDEGEAEAGWIEGAAILLSVICVVLVTAFNDWSKEKQFRGLQSRIEQEQKFTVVRAGQVVQIPVAEIVVGDIAQVKYGDLLPADGLFIQGNDLKIDESSLTGESDQVRKSVDKDPMLLSGTHVMEGSGRMLVTAVGVNSQTGIIFTLLGAGGEEEEKKDKKGKMQDGNVDASQSKAKQQDGAAAMEMQPLKSAEGGDADDRKKASMHKKEKSVLQGKLTKLAVQIGKAGLVMSAITVIILVLYFTVDTFVVNKKPWLPECTPVYVQYFVKFFIIGVTVLVVAVPEGLPLAVTISLAYSVKKMMKDNNLVRHLDACETMGNATAICSDKTGTLTTNRMTVVQAYVGDVHYKEIPDPSSINTKTMELLINAIAINSAYTTKILPPEKEGALPRQVGNKTECGLLGFVLDLKQDYEPVRSQMPEEKLYKVYTFNSVRKSMSTVIKLPDESFRMYSKGASEIVLKKCCKILNGAGEPRVFRPRDRDEMVKKVIEPMACDGLRTICVAYRDFPSSPEPDWDNENDILNELTCICVVGIEDPVRPEVPEAIRKCQRAGITVRMVTGDNINTARAIAIKCGIIHPGEDFLCLEGKEFNRRIRNEKGEIEQERIDKIWPKLRVLARSSPTDKHTLVKGIIDSTHTEQRQVVAVTGDGTNDGPALKKADVGFAMGIAGTDVAKEASDIILTDDNFSSIVKAVMWGRNVYDSISKFLQFQLTVNVVAVIVAFTGACITQDSPLKAVQMLWVNLIMDTFASLALATEPPTETLLLRKPYGRNKPLISRTMMKNILGHAVYQLALIFTLLFVGEKMFQIDSGRNAPLHSPPSEHYTIIFNTFVMMQLFNEINARKIHGERNVFDGIFRNPIFCTIVLGTFAIQIVIVQFGGKPFSCSPLQLDQWMWCIFIGLGELVWGQVIATIPTSRLKFLKEAGRLTQKEEIPEEELNEDVEEIDHAERELRRGQILWFRGLNRIQTQIRVVKAFRSSLYEGLEKPESRTSIHNFMAHPEFRIEDSQPHIPLIDDTDLEEDAALKQNSSPPSSLNKNNSAIDSGINLTTDTSKSATSSSPGSPIHSLETSL

SEQ ID NO: 11768 - protein, 648 aa, Homo sapiens
MSWLFGVNKGPKGEGAGPPPPLPPAQPGAEGGGDRGLGDRPAPKDKWSNFDPTGLERAAKAARELEHSRYAKEALNLAQMQEQTLQLEQQSKLKEYEAAVEQLKSEQIRAQAEERRKTLSEETRQHQARAQYQDKLARQRYEDQLKQQQLLNEENLRKQEESVQKQEAMRRATVEREMELRHKNEMLRVETEARARAKAERENADIIREQIRLKASEHRQTVLESIRTAGTLFGEGFRAFVTDRDKVTATVAGLTLLAVGVYSAKNATAVTGRFIEARLGKPSLVRETSRITVLEALRHPIQVSRRLLSRPQDVLEGVVLSPSLEARVRDIAIATRNTKKNRGLYRHILLYGPPGTGKTLFAKKLALHSGMDYAIMTGGDVAPMGREGVTAMHKLFDWANTSRRGLLLFMDEADAFLRKRATEEISKDLRATLNAFLYHMGQHSNKFMLVLASNLPEQFDCAINSRIDVMVHFDLPQQEERERLVRLHFDNCVLKPATEGKRRLKLAQFDYGRKCSEVARLTEGMSGREIAQLAVSWQATAYASKDGVLTEAMMDACVQDAVQQYRQKMRWLKAEGPGRGVEHPLSGVQGETLTSWSLATDPSYPCLAGPCTFRICSWMGTGLCPGPLSPRMSCGGGRPFCPPGHPLL

SEQ ID NO: 11769 - protein, 166 aa, Homo sapiens
MCLCRPLLPQRAQYQDKLARQRYEDQLKQQQLLNEENLRKQEESVQKQEAMRRATVEREMELRHKNEMLRVETEARARAKAERENADIIREQIRLKASEHRQTVLESIRTAGTLFGEGFRAFVTDRDKVTATVNIFIKQGWQVAERQHVGASWSPRSCPCRLCTAL

SEQ ID NO: 11770 - protein, 602 aa, Homo sapiens
MQLEALNLLHTLVWARSLCRAGAVQTQERLSGSASPEQVPAGECCALQEYEAAVEQLKSEQIRAQAEERRKTLSEETRQHQARAQYQDKLARQRYEDQLKQQQLLNEENLRKQEESVQKQEAMRRATVEREMELRHKNEMLRVETEARARAKAERENADIIREQIRLKASEHRQTVLESIRTAGTLFGEGFRAFVTDRDKVTATVAGLTLLAVGVYSAKNATAVTGRFIEARLGKPSLVRETSRITVLEALRHPIQVSRRLLSRPQDVLEGVVLSPSLEARVRDIAIATRNTKKNRGLYRHILLYGPPGTGKTLFAKKLALHSGMDYAIMTGGDVAPMGREGVTAMHKLFDWANTSRRGLLLFMDEADAFLRKRATEEISKDLRATLNAFLYHMGQHSNKFMLVLASNLPEQFDCAINSRIDVMVHFDLPQQEERERLVRLHFDNCVLKPATEGKRRLKLAQFDYGRKCSEVARLTEGMSGREIAQLAVSWQATAYASKDGVLTEAMMDACVQDAVQQYRQKMRWLKAEGPGRGVEHPLSGVQGETLTSWSLATDPSYPCLAGPCTFRICSWMGTGLCPGPLSPRMSCGGGRPFCPPGHPLL

SEQ ID NO: 11771 - protein, 299 aa, Homo sapiens
MHSLATAAPVPTTLAQVDREKIYQWINELSSPETRENALLELSKKRESVPDLAPMLWHSFGTIAALLQEIVNIYPSINPPTLTAHQSNRVCNALALLQCVASHPETRSAFLAAHIPLFLYPFLHTVSKTRPFEYLRLTSLGVIGALVKTDEQEVINFLLTTEIIPLCLRIMESGSELSKTVATFILQKILLDDTGLAYICQTYERFSHVAMILGKMVLQLSKEPSARLLKHVVRCYLRLSDNPRAREALRQCLPDQLKDTTFAQVLKDDTTTKRWLAQLVKNLQEGQVTDPRGIPLPPQ

SEQ ID NO: 11772 - protein, 331 aa, Homo sapiens
MHSLATAAPVPTTLAQVDREKIYQWINELSSPETRENALLELSKKRESVPDLAPMLWHSFGTIAALLQEIVNIYPSINPPTLTAHQSNRVCNALALLQCVASHPETRSAFLAAHIPLFLYPFLHTVSKTRPFEYLRLTSLGVIVETGFHHVGQADLELPTSSDLPASASQSAGITGALVKTDEQEVINFLLTTEIIPLCLRIMESGSELSKTVATFILQKILLDDTGLAYICQTYERFSHVAMILGKMVLQLSKEPSARLLKHVVRCYLRLSDNPRAREALRQCLPDQLKDTTFAQVLKDDTTTKRWLAQLVKNLQEGQVTDPRGIPLPPQ

SEQ ID NO: 11773 - protein, 258 aa, Homo sapiens
MHSLATAAPVPTTLAQVDREKIYQWINELSSPETRENALLELSKKRESVPDLAPMLWHSFGTIAALLQEIVNIYPSINPPTLTAHQSNRVCNALALLQCVASHPETRSAFLAAHIPLFLYPFLHTVSKTRPFEYLRLTSLGVIGALVKTDEQEVINFLLTTEIIPLCLRIMESGSELSKTVATFILQKILLDDTGLAYICQTYERFSHVAMILGKMVLQLSKEPSARLLKHVVRCYLRLSDNPRFSDLTFCWSSFQRK

SEQ ID NO: 11774 - protein, 861 aa, Homo sapiens
MTSERSRIPCLSAAAAEGTGKKQQEGRAMATLDRKVPSPEAFLGKPWSSWIDAAKLHCSDNVDLEEAGKEGGKSREVMRLNKEDMHLFGHYPAHDDFYLVVCSACNQVVKPQVFQSHCERRHGSMCRPSPSPVSPASNPRTSLVQVKTKACLSGHHSASSTSKPFKTPKDNLLTSSSKQHTVFPAKGSRDKPCVPVPVVSLEKIPNLVKADGANVKMNSTTTTAVSASSTSSSAVSTPPLIKPVLMSKSVPPSPEKILNGKGILPTTIDKKHQNGTKNSNKPYRRLSEREFDPNKHCGVLDPETKKPCTRSLTCKTHSLSHRRAVPGRKKQFDLLLAEHKAKSREKEVKDKEHLLTSTREILPSQSGPAQDSLLGSSGSSGPEPKVASPAKSRPPNSVLPRPSSANSISSSTSSNHSGHTPEPPLPPVGGDLASRLSSDEGEMDGADESEKLDCQFSTHHPRPLAFCSFGSRLMGRGYYVFDRRWDRFRFALNSMVEKHLNSQMWKKIPPAADSPLPSPAAHITTPVPASVLQPFSNPSAVYLPSAPISSRLTSSYIMTSAMLSNAAFVTSPDPSALMSHTTAFPHVAATLSIMDSTFKAPSAVSPIPAVIPSPSHKPSKTKTSKSSKVKDLSTRSDESPSNKKRKPQSSTSSSSSSSSSSLQTSLSSPLSGPHKKNCVLNASSALNSYQAAPPYNSLSVHNSNNGVSPLSAKLEPSGRTSLPGGPADIVRQVGAVGGSSDSCPLSVPSLALHAGDLSLASHNAVSSLPLSFDKSEGKKRKNSSSSSKACKITKMPGMNSVHKKNPPSLLAPVPDPVNSTSSRQVGKNSSLALSQSSPSSISSPGHSRQNTNRTGRIRTLP

SEQ ID NO: 11775 - protein, 146 aa, Homo sapiens
MTSERSRIPCLSAAAAEGTGKKQQEGRAMATLDRKVPSPEAFLGKPWSSWIDAAKLHCSDNVDLEEAGKEGGKSREVMRLNKEDMHLFGHYPAHDDFYLVVCSACNQVVKPQVFQSHCGRKQDNRRNEGISRSGPESSQAIEKHQV

SEQ ID NO: 11776 - protein, 738 aa, Homo sapiens
MCRPSPSPVSPASNPRTSLVQVKTKACLSGHHSASSTSKPFKTPKDNLLTSSSKQHTVFPAKGSRDKPCVPVPVVSLEKIPNLVKADGANVKMNSTTTTAVSASSTSSSAVSTPPLIKPVLMSKSVPPSPEKILNGKGILPTTIDKKHQNGTKNSNKPYRRLSEREFDPNKHCGVLDPETKKPCTRSLTCKTHSLSHRRAVPGRKKQFDLLLAEHKAKSREKEVKDKEHLLTSTREILPSQSGPAQDSLLGSSGSSGPEPKVASPAKSRPPNSVLPRPSSANSISSSTSSNHSGHTPEPPLPPVGGDLASRLSSDEGEMDGADESEKLDCQFSTHHPRPLAFCSFGSRLMGRGYYVFDRRWDRFRFALNSMVEKHLNSQMWKKIPPAADSPLPSPAAHITTPVPASVLQPFSNPSAVYLPSAPISSRLTSSYIMTSAMLSNAAFVTSPDPSALMSHTTAFPHVAATLSIMDSTFKAPSAVSPIPAVIPSPSHKPSKTKTSKSSKVKDLSTRSDESPSNKKRKPQSSTSSSSSSSSSSLQTSLSSPLSGPHKKNCVLNASSALNSYQAAPPYNSLSVHNSNNGVSPLSAKLEPSGRTSLPGGPADIVRQVGAVGGSSDSCPLSVPSLALHAGDLSLASHNAVSSLPLSFDKSEGKKRKNSSSSSKACKITKMPGMNSVHKKNPPSLLAPVPDPVNSTSSRQVGKNSSLALSQSSPSSISSPGHSRQKNTNRTGRIRTLP

SEQ ID NO: 11777 - protein, 95 aa, Homo sapiens
MAHFKDDLQTNVEIIPGESAPRKESPRPPAPPSSAAGVGGCSNHSPSVQESPLSPPALAQLGSAQQPSMRTELSFSEKKDTMIIWQITITVWCQR

SEQ ID NO: 11778 - protein, 1461 aa, Homo sapiens
MALSVDSSWHRWQWRVRDGFPHCPSETTPLLSPEKGRQSYNLTQQRVVFPNNSIFHQDWEEVSRRYPGNRTCTTKYTLFTFLPRNLFEQFHRWANLYFLFLVILNWMPSMEVFHREITMLPLAIVLFVIMIKDGMEDFKRHRFDKAINCSNIRIYERKEQTYVQKCWKDVRVGDFIQMKCNEIVPADILLLFSSDPNGICHLETASLDGETNLKQRCVVKGFSQQEVQFEPELFHNTIVCEKPNNHLNKFKGYMEHPDQTRTGFGCESLLLRGCTIRNTEMAVGIVIYAGHETKAMLNNSGPRYKRSKIERRMNIDIFFCIGILILMCLIGAVGHSIWNGTFEEHPPFDVPDANGSFLPSALGGFYMFLTMIILLQVLIPISLYVSIELVKLGQVFFLSNDLDLYDEETDLSIQCRALNIAEDLGQIQYIFSDKTGTLTENKMVFRRCTIMGSEYSHQENAKRLETPKELDSDGEEWTQYQCLSFSARWAQDPATMRSQKGAQPLRRSQSARVPIQGHYRQRSMGHRESSQPPVAFSSSIEKDVTPDKNLLTKVRDAALWLETLSDSRPAKASLSTTSSIADFFLALTICNSVMVSTTTEPRQRVTIKPSSKALGTSLEKIQQLFQKLKLLSLSQSFSSTAPSDTDLGESLGANVATTDSDERDDASVCSGGDSTDDGGYRSSMWDQGDILESGSGTSLEEALEAPATDLARPEFCYEAESPDEAALVHAAHAYSFTLVSRTPEQVTVRLPQGTCLTFSLLCTLGFDSVRKRMSVVVRHPLTGEIVVYTKGADSVIMDLLEDPACVPDINMEKKLRKIRARTQKHLDLYARDGLRTLCIAKKVVSEEDFRRWASFRREAEASLDNRDELLMETAQHLENQLTLLGATGIEDRLQEGVPDTIATLREAGIQLWVLTGDKQETAVNIAHSCRLLNQTDTVYTINTENQETCESILNCALEELKQFRELQKPDRKLFGFRLPSKTPSITSEAVVPEAGLVIDGKTLNAIFQGKLEKKFLELTQYCRSVLCCRSTPLQKSMIVKLVRDKLRVMTLSIGDGANDVSMIQAADIGIGISGQEGMQAVMSSDFAITRFKHLKKLLLVHGHWCYSRLARMVVYYLYKNVCYVNLLFWYQFFCGFSSSTMIDYWQMIFFNLFFTSLPPLVFGVLDKDISAETLLALPELYKSGQNSECYNLSTFWISMVDAFYQSLICFFIPYLAYKGSDIDVFTFGTPINTISLTTILLHQAMEMKTWTIFHGVVLLGSFLMYFLVSLLYNATCVICNSPTNPYWVMEGQLSNPTFYLVCFLTPVVALLPRYFFLSLQGTCGKSLISKAQKIDKLPPDKRNLEIQSWRSRQRPAPVPEVARPTHHPVSSITGQDFSASTPKSSNPPKRKHVEESVLHEQRCGTECMRDDSCSGDSSAQLSSGEHLLGPNRIMAYSRGQTDMCRCSKRSSHRRSQSSLTI

SEQ ID NO: 11779 - protein, 529 aa, Homo sapiens
MALSVDSSWHRWQWRVRDGFPHCPSETTPLLSPEKGRQSYNLTQQRVVFPNNSIFHQDWEEVSRRYPGNRTCTTKYTLFTFLPRNLFEQFHRWANLYFLFLVILNWMPSMEVFHREITMLPLAIVLFVIMIKDGMEDFKRHRFDKAINCSNIRIYERKEQTYVQKCWKDVRVGDFIQMKCNEIVPADILLLFSSDPNGICHLETASLDGETNLKQRCVVKGFSQQEVQFEPELFHNTIVCEKPNNHLNKFKGYMEHPDQTRTGFGCESLLLRGCTIRNTEMAVGIVIYAGHETKAMLNNSGPRYKRSKIERRMNIDIFFCIGILILMCLIGAVGHSIWNGTFEEHPPFDVPDANGSFLPSALGGFYMFLTMIILLQVLIPISLYVSIELVKLGQVFFLSNDLDLYDEETDLSIQCRALNIAEDLGQIQYIFSDKTGTLTENKMVFRRCTIMGSEYSHQENGIEAPKGSIPLSKRKYPALLRNEEIKDILLALLEAVWHFHKLLPVSLWSSLSQIRAVPITCKLSFVYKG

SEQ ID NO: 11780 - protein, 501 aa, Homo sapiens
MKKEGRKRWKRKEDKKRVVVSNLLFEGWSHKENPNRHHRGNQIKTSKYTVLSFVPKNIFEQLHRFANLYFVGIAVLNFIPVVNAFQPEVSMIPICVILAVTAIKDAWEDLRRYKSDKVINNRECLIYSRKEQTYVQKCWKDVRVGDFIQMKCNEIVPADILLLFSSDPNGICHLETASLDGETNLKQRCVVKGFSQQEVQFEPELFHNTIVCEKPNNHLNKFKGYMEHPDQTRTGFGCESLLLRGCTIRNTEMAVGIVIYAGHETKAMLNNSGPRYKRSKIERRMNIDIFFCIGILILMCLIGAVGHSIWNGTFEEHPPFDVPDANGSFLPSALGGFYMFLTMIILLQVLIPISLYVSIELVKLGQVFFLSNDLDLYDEETDLSIQCRALNIAEDLGQIQYIFSDKTGTLTENKMVFRRCTIMGSEYSHQENGIEAPKGSIPLSKRKYPALLRNEEIKDILLALLEAVWHFHKLLPVSLWSSLSQIRAVPITCKLSFVYKG

SEQ ID NO: 11781 - protein, 318 aa, Homo sapiens
MLHHHCRRNPELQEELQIQAAVAAGDVHTVRKMLEQGYSPNGRDANGWTLLHFSAARGKERCVRVFLEHGADPTVKDLIGGFTALHYAAMHGRARIARLMLESEYRSDIINAKSNDGWTPLHVAAHYGRDSFVRLLLEFKAEVDPLSDKGTTPLQLAIIRERSSCVKILLDHNANIDIQNGFLLRYAVIKSNHSYCRMFLQRGADTNLGRLEDGQTPLHLSALRDDVLCARMLYNYGADTNTRNYEGQTPLAVSISISGSSRPCLDFLQEVTRQPRNLQDLCRIKIRQCIGLQNLKLLDELPIAKVMKDYLKHKFDDI

SEQ ID NO: 11782 - protein, 274 aa, Homo sapiens
MLHHHCRRNPELQEELQIQAAVAAGDVHTVRKMLEQGYSPNGRDANGWTLLHFSAARGKERCVRVFLEHGADPTVKDLIGGFTALHYAAMHGRARIARLMLESEYRSDIINAKSNDGWTPLHVAAHYGRDSFVRLLLEFKAEVDPLSDKGTTPLQLAIIRERSSCVKILLDHNANIDIQNGFLLRYAVIKSNHSYCRMFLQRGADTNLGRLEDGQTPLHLSALRDDVLCARMLYNYGADTNTRNYEGQTPLAVSISISGSSRPCLDFLQEVTSM

SEQ ID NO: 11783 - protein, 123 aa, Homo sapiens
MALNNVSLSSGDQRSRVAYRSSHGDLRPRASALAMVSGDGFLVSRPEAIHLGPRQAVRPSVRAESRRVDGGGRSPREPDGRGRSRQARFSPYPIPAVEPDLLRSVLQQRLIALGGVIAARISV

SEQ ID NO: 11784 - protein, 147 aa, Homo sapiens
MALNNVSLSSGDQRSRVAYRSSHGDLRPRASALAMVSGDGFLVSRPEAIHLGPRQAVRPSVRAESRRVDGGGRSPREPDGRGRSRQARFSPYPIPAVEPDLLRSVLQQRLIALGVTTWTLKLSESATPDLRWCSTCSHSNIFEILVI

SEQ ID NO: 11785 - protein, 400 aa, Homo sapiens
MEVLRPQLIRIDGRNYRKNPVQEQTYQHEEDEEDFYQGSMECADEPCDAYEVEQTPQGFRSTLRAPSLLYNLIHLNTSNDCGFQKITLDCQNIYTWKSRHIVGKRGDTRKKIEMETKTSISIPKPGQDGEIVITGQHRNGVISARTRIDVLLDTFRRKQPFTHFLAFFLNEVEVQEGFLRFQEEVLAKCSMDHGVDSSIFQNPKKLHLTIGMLVLLSEEEIQQTCEMLQQCKEEFINDISGGKPLEVEMAGIEYMNDDPGMVDVLYAKVHMKDGSNRLQELVDRVLERFQASGLIVKEWNSVKLHATVMNTLFRKDPNAEGRYNLYTAEGKYIFKERESFDGRNILKSFALLPRLEYNDAISAHCNLCLPGSSDSPASASQVAGITGVSDAYSQSLPGKS

SEQ ID NO: 11786 - protein, 357 aa, Homo sapiens
MEVLRPQLIRIDGRNYRKNPVQEQTYQHEEDEEDFYQGSMECADEPCDAYEVEQTPQGFRSTLRAPSLLYKHIVGKRGDTRKKIEMETKTSISIPKPGQDGEIVITGQHRNGVISARTRIDVLLDTFRRKQPFTHFLAFFLNEVEVQEGFLRFQEEVLAKCSMDHGVDSSIFQNPKKLHLTIGMLVLLSEEEIQQTCEMLQQCKEEFINDISGGKPLEVEMAGIEYMNDDPGMVDVLYAKVHMKDGSNRLQELVDRVLERFQASGLIVKEWNSVKLHATVMNTLFRKDPNAEGRYNLYTAEGKYIFKERESFDGRNILKLFENFYFGSLKLNSIHISQRFTVDSFGNYASCGQIDFS

SEQ ID NO: 11787 - protein, 1047 aa, Homo sapiens
MTDNIPLQPVRQKKRMDSRPRAGCCEWLRCCGGGEARPRTVWLGHPEKRDQRYPRNVINNQKYNFFTFLPGVLFNQFKYFFNLYFLLLACSQFVPEMRLGALYTYWVPLGFVLAVTVIREAVEEIRCYVRDKEVNSQVYSRLTARGTVKVKSSNIQVGDLIIVEKNQRVPADMIFLRTSEKNGSCFLRTDQLDGETDWKLRLPVACTQRLPTAADLLQIRSYVYAEEPNIDIHNFVGTFTREDSDPPISESLSIENTLWAGTVVASGTVVGVVLYTGRELRSVMNTSNPRSKIGLFDLEVNCLTKILFGALVVVSLVMVALQHFAGRWYLQIIRFLLLFSNIIPISLRVNLDMGKIVYSWVIRRDSKIPGTVVRSSTIPEQLGRISYLLTDKTGTLTQNEMIFKRLHLGTVAYGLDSMDEVQSHIFSIYTQQSQDPPAQKGPTLTTKVRRTMSSRVHEAVKAIALCHNVTPVYESNGVTDQAEAEKQYEDSCRVYQASSPDEVALVQWTESVGLTLVGRDQSSMQLRTPGDQILNFTILQIFPFTYESKRMGIIVRDESTGEITFYMKGADVVMAGIVQYNDWLEEECGNMAREGLRVLVVAKKSLAEEQYQDFEARYVQAKLSVHDRSLKVATVIESLEMEMELLCLTGVEDQLQADVRPTLETLRNAGIKVWMLTGDKLETATCTAKNAHLVTRNQDIHVFRLVTNRGEAHLELNAFRRKHDCALVISGDSLEVCLKYYEYEFMELACQCPAVVCCRCAPTQKAQIVRLLQERTGKLTCAVGDGGNDVSMIQESDCGVGVEGKEGKQASLAADFSITQFKHLGRLLMVHGRNSYKRSAALSQFVIHRSLCISTMQAVFSSVFYFASVPLYQGFLIIGYSTIYTMFPVFSLVLDKDVKSEVAMLYPELYKDLLKGRPLSYKTFLIWVLISIYQGSTIMYGALLLFESEFVHIVAISFTSLILTELLMVALTIQTWHWLMTVAELLSLACYIASLVFLHEFIDVYFIATLSFLWKVSVITLVSCLPLYVLKYLRRRFSPPSYSKLTS

SEQ ID NO: 11788 - protein, 926 aa, Homo sapiens
MTDNIPLQPVRQKKRMDSRPRAGCCEWLRCCGGGEARPRTVWLGHPEKRDQRYPRNVINNQKYNFFTFLPGVLFNQFKYFFNLYFLLLACSQFVPEMRLGALYTYWVPLGFVLAVTVIREAVEEIRCYVRDKEVNSQVYSRLTARGTVVGVVLYTGRELRSVMNTSNPRSKIGLFDLEVNCLTKILFGALVVVSLVMVALQHFAGRWYLQIIRFLLLFSNIIPISLRVNLDMGKIVYSWVIRRDSKIPGTVVRSSTIPEQLGRISYLLTDKTGTLTQNEMIFKRLHLGTVAYGLDSMDEVQSHIFSIYTQQSQDPPAQKGPTLTTKVRRTMSSRVHEAVKAIALCHNVTPVYESNGVTDQAEAEKQYEDSCRVYQASSPDEVALVQWTESVGLTLVGRDQSSMQLRTPGDQILNFTILQIFPFTYESKRMGIIVRDESTGEITFYMKGADVVMAGIVQYNDWLEEECGNMAREGLRVLVVAKKSLAEEQYQDFEARYVQAKLSVHDRSLKVATVIESLEMEMELLCLTGVEDQLQADVRPTLETLRNAGIKVWMLTGDKLETATCTAKNAHLVTRNQDIHVFRLVTNRGEAHLELNAFRRKHDCALVISGDSLEVCLKYYEYEFMELACQCPAVVCCRCAPTQKAQIVRLLQERTGKLTCAVGDGGNDVSMIQESDCGVGVEGKEGKQASLAADFSITQFKHLGRLLMVHGRNSYKRSAALSQFVIHRSLCISTMQAVFSSVFYFASVPLYQGFLIIGYSTIYTMFPVFSLVLDKDVKSEVAMLYPELYKDLLKGRPLSYKTFLIWVLISIYQGSTIMYGALLLFESEFVHIVAISFTSLILTELLMVALTIQTWHWLMTVAELLSLACYIASLVFLHEFIDVYFIATLSFLWKVSVITLVSCLPLYVLKYLRRRFSPPSYSKLTS

SEQ ID NO: 11789 - protein, 1938 aa, Homo sapiens
MSRWLWPWSNCVKERVCRYLLHHYLGHFFQEHLSLDQLSLDLYKGSVALRDIHLEIWSVNEVLESMESPLELVEGFVGSIEVAVPWAALLTDHCTVRVSGLQLTLQPRRGPAPGAADSQSWASCMTTSLQLAQECLRDGLPEPSEPPQPLEGLEMFAQTIETVLRRIKVTFLDTVVRVEHSPGDGERGVAVEVRVQRLEYCDEAVRDPSQAPPVDVHQPPAFLHKLLQLAGVRLHYEELPAQEEPPEPPLQIGSCSGYMELMVKLKQNEAFPGPKLEVAGQLGSLHLLLTPRQLQQLQELLSAVSLTDHEGLADKLNKSRPLGAEDLWLIEQDLNQQLQAGAVAEPLSPDPLTNPLLNLDNTDLFFSMAGLTSSVASALSELSLSDVDLASSVRSDMASRRLSAQAHPAGKMAPNPLLDTMRPDSLLKMTLGGVTLTLLQTSAPSSGPPDLATHFFTEFDATKDGPFGSRDFHHLRPRFQRACPCSHVRLTGTAVQLSWELRTGSRGRRTTSMEVHFGQLEVLECLWPRGTSEPEYTEILTFPGTLGSQASARPCAHLRHTQILRRVPKSRPRRSVACHCHSELALDLANFQADVELGALDRLAALLRLATVPAEPPAGLLTEPLPAMEQQTVFRLSAPRATLRLRFPIADLRPEPDPWAGQAVRAEQLRLELSEPQFRSELSSGPGPPVPTHLELTCSDLHGIYEDGGKPPVPCLRVSKALDPKSTGRKYFLPQVVVTVNPQSSSTQWEVAPEKGEELELSVESPCELREPEPSPFSSKRTMYETEEMVIPGDPEEMRTFQSRTLALSRCSLEVILPSVHIFLPSKEVYESIYNRINNDLLMWEPADLLPTPDPAAQPSGFPGPSGFWHDSFKMCKSAFKLANCFDLTPDSDSDDEDAHFFSVGASGGPQAAAPEAPSLHLQSTFSTLVTVLKGRITALCETKDEGGKRLEAVHGELVLDMEHGTLFSVSQYCGQPGLGYFCLEAEKATLYHRAAVDDYPLPSHLDLPSFAPPAQLAPTIYPSEEGVTERGASGRKGQGRGPHMLSTAVRIHLDPHKNVKEFLVTLRLHKATLRHYMALPEQSWHSQLLEFLDVLDDPVLGYLPPTVITILHTHLFSCSVDYRPLYLPVRVLITAETFTLSSNIIMDTSTFLLRFILDDSALYLSDKCEVETLDLRRDYVCVLDVDLLELVIKTWKGSTEGKLSQPLFELRCSNNVVHVHSCADSCALLVNLLQYVMSTGDLHPPPRPPSPTEIAGQKLSESPASLPSCPPVETALINQRDLADALLDTERSLRELAQPSGGHLPQASPISVYLFPGERSGAPPPSPPVGGPAGSLGSCSEEKEDEREEEGDGDTLDSDEFCILDAPGLGIPPRDGEPVVTQLHPGPIVVRDGYFSRPIGSTDLLRAPAHFPVPSTRVVLREVSLVWHLYGGRDFGPHPGHRARTGLSGPRSSPSRCSGPNRPQNSWRTQGGSGRQHHVLMEIQLSKVSFQHEVYPAEPATGPAAPSQELEERPLSRQVFIVQELEVRDRLASSQINKFLYLHTSERMPRRAHSNMLTIKALHVAPTTNLGGPECCLRVSLMPLRLNVDQDALFFLKDFFTSLVAGINPVVPGETSAEARPETRAQPSSPLEGQAEGVETTGSQEAPGGGHSPSPPDQQPIYFREFRFTSEVPIWLDYHGKHVTMDQVGTFAGLLIGLAQLNCSELKLKRLCCRHGLLGVDKVLGYALNEWLQDIRKNQLPGLLGGVGPMHSVVQLFQGFRDLLWLPIEQYRKDGRLMRGLQRGAASFGSSTASAALELSNRLVQAIQATAETVYDILSPAAPVSRSLQDKRSARRLRRGQQPADLREGVAKAYDTVREGILDTAQTICDVASRGHEQKGLTGAVGGVIRQLPPTVVKPLILATEATSSLLGGMRNQIVPDAHKDHALKWRSDSAQD

SEQ ID NO: 11790 - protein, 1940 aa, Homo sapiens
MSRWLWPWSNCVKERVCRYLLHHYLGHFFQEHLSLDQLSLDLYKGSVALRDIHLEIWSVNEVLESMESPLELVEGFVGSIEVAVPWAALLTDHCTVRVSGLQLTLQPRRGPAPGAADSQSWASCMTTSLQLAQECLRDGLPEPSEPPQPLEGLEMFAQTIETVLRRIKVTFLDTVVRVEHSPGDGERGVAVEVRVQRLEYCDEAVRDPSQAPPVDVHQPPAFLHKLLQLAGVRLHYEELPAQEEPPEPPLQIGSCSGYMELMVKLKQNEAFPGPKLEVAGQLGSLHLLLTPRQLQQLQELLSAVSLTDHEGLADKLNKSRPLGAEDLWLIEQDLNQQLQAGAVAEPLSPDPLTNPLLNLDNTDLFFSMAGLTSSVASALSELSLSDVDLASSVRSDMASRRLSAQAHPAGKMAPNPLLDTMRPDSLLKMTLGGVTLTLLQTSAPSSGPPDLATHFFTEFDATKDGPFGSRDFHHLRPRFQRACPCSHVRLTGTAVQLSWELRTGSRGRRTTSMEVHFGQLEVLECLWPRGTSEPEYTEILTFPGTLGSQASARPCAHLRHTQILRRVPKSRPRRSVACHCHSELALDLANFQADVELGALDRLAALLRLATVPAEPPAGLLTEPLPAMEQQTVFRLSAPRATLRLRFPIADLRPEPDPWAGQAVRAEQLRLELSEPQFRSELSSGPGPPVPTHLELTCSDLHGIYEDGGKPPVPCLRVSKALDPKSTGRKYFLPQVVVTVNPQSSSTQWEVAPEKGEELELSVESPCELREPEPSPFSSKRTMYETEEMVIPGDPEEMRTFQSRTLALSRCSLEVILPSVHIFLPSKEVYESIYNRINNDLLMWEPADLLPTPDPAAQPSGFPGPSGFWHDSFKMCKSAFKLANCFDLTPDSDSDDEDAHFFSVGASGGPQAAAPEAPSLHLQSTFSTLVTVLKGRITALCETKDEGGKRLEAVHGELVLDMEHGTLFSVSQYCGQPGLGYFCLEAEKATLYHRAAVDDYPLPSHLDLPSFAPPAQLAPTIYPSEEGVTERGASGRKGQGRGPHMLSTAVRIHLDPHKNVKEFLVTLRLHKATLRHYMALPEQSWHSQLLEFLDVLDDPVLGYLPPTVITILHTHLFSCSVDYRPLYLPVRVLITAETFTLSSNIIMDTSTFLLRFILDDSALYLSDKCEVETLDLRRDYVCVLDVDLLELVIKTWKGSTEGKLSQPLFELRCSNNVVHVHSCADSCALLVNLLQYVMSTGDLHPPPRPPSPTEIAGQKVQLSESPASLPSCPPVETALINQRDLADALLDTERSLRELAQPSGGHLPQASPISVYLFPGERSGAPPPSPPVGGPAGSLGSCSEEKEDEREEEGDGDTLDSDEFCILDAPGLGIPPRDGEPVVTQLHPGPIVVRDGYFSRPIGSTDLLRAPAHFPVPSTRVVLREVSLVWHLYGGRDFGPHPGHRARTGLSGPRSSPSRCSGPNRPQNSWRTQGGSGRQHHVLMEIQLSKVSFQHEVYPAEPATGPAAPSQELEERPLSRQVFIVQELEVRDRLASSQINKFLYLHTSERMPRRAHSNMLTIKALHVAPTTNLGGPECCLRVSLMPLRLNVDQDALFFLKDFFTSLVAGINPVVPGETSAEARPETRAQPSSPLEGQAEGVETTGSQEAPGGGHSPSPPDQQPIYFREFRFTSEVPIWLDYHGKHVTMDQVGTFAGLLIGLAQLNCSELKLKRLCCRHGLLGVDKVLGYALNEWLQDIRKNQLPGLLGGVGPMHSVVQLFQGFRDLLWLPIEQYRKDGRLMRGLQRGAASFGSSTASAALELSNRLVQAIQATAETVYDILSPAAPVSRSLQDKRSARRLRRGQQPADLREGVAKAYDTVREGILDTAQTICDVASRGHEQKGLTGAVGGVIRQLPPTVVKPLILATEATSSLLGGMRNQIVPDAHKDHALKWRSDSAQD

SEQ ID NO: 11791 - protein, 331 aa, Homo sapiens
MAVAMVKLCERAGLPLLAAPLLRSLLPRAPQPGPAQPRSVQGQRCPARHPPGNLVCERGAGVNGVTAGAGGRLRGLHRGGRALGCSAHRPLHSARVRPPAHLAAPPGSSARGCRLTELGYALNEWLQDIRKNQLPGLLGGVGPMHSVVQLFQGFRDLLWLPIEQYRKDGRLMRGLQRGAASFGSSTASAALELSNRLVQAIQATAETVYDILSPAAPVSRSLQDKRSARRLRRGQQPADLREGVAKAYDTVREGILDTAQTICDVASRGHEQKGLTGAVGGVIRQLPPTVVKPLILATEATSSLLGGMRNQIVPDAHKDHALKWRSDSAQD

SEQ ID NO: 11792 - protein, 121 aa, Homo sapiens
MSRWLWPWSNCVKERVCRYLLHHYLGHFFQEHLSLDQLSLDLYKGSVALRDIHLEIWVRSQARVQEVCERGAGVNGVTAGAGGRLRGLHRGGRALGCSAHRPLHSARVRPPAHLAAPPGSR

SEQ ID NO: 11793 - protein, 311 aa, Homo sapiens
MAKDFQDIQQLSSEENDHPFHQGEGPGTRRLNPRRGNPFLKGPPPAQPLAQRLCSMVCFSLLALSFNILLLVVICVTGSQSEGHGGAQLQAELRSLKEAFSNFSSSTLTEVQAISTHGGSVGDKITSLGAKLEKQQQDLKADHDALLFHLKHFPVDLRFVACQMELLHSNGSQRTCCPVNWVEHQGSCYWFSHSGKAWAEAEKYCQLENAHLVVINSWEEQKFIVQHTNPFNTWIGLTDSDGSWKWVDGTDYRHNYKNWAVTQPDNWHGHELGGSEDCVEVQPDGRWNDDFCLQVYRWVCEKRRNATGEVA

SEQ ID NO: 11794 - protein, 292 aa, Homo sapiens
MAKDFQDIQQLSSEENDHPFHQGPPPAQPLAQRLCSMVCFSLLALSFNILLLVVICVTGSQSEGHGGAQLQAELRSLKEAFSNFSSSTLTEVQAISTHGGSVGDKITSLGAKLEKQQQDLKADHDALLFHLKHFPVDLRFVACQMELLHSNGSQRTCCPVNWVEHQGSCYWFSHSGKAWAEAEKYCQLENAHLVVINSWEEQKFIVQHTNPFNTWIGLTDSDGSWKWVDGTDYRHNYKNWAVTQPDNWHGHELGGSEDCVEVQPDGRWNDDFCLQVYRWVCEKRRNATGEVA

SEQ ID NO: 11795 - protein, 287 aa, Homo sapiens
MAKDFQDIQQLSSEENDHPFHQGPPPAQPLAQRLCSMVCFSLLALSFNILLLVVICVTGSQSAQLQAELRSLKEAFSNFSSSTLTEVQAISTHGGSVGDKITSLGAKLEKQQQDLKADHDALLFHLKHFPVDLRFVACQMELLHSNGSQRTCCPVNWVEHQGSCYWFSHSGKAWAEAEKYCQLENAHLVVINSWEEQKFIVQHTNPFNTWIGLTDSDGSWKWVDGTDYRHNYKNWAVTQPDNWHGHELGGSEDCVEVQPDGRWNDDFCLQVYRWVCEKRRNATGEVA

SEQ ID NO: 11796 - protein, 232 aa, Homo sapiens
MAGDVGGRSCTDSELLLHPELLSQEFLLLTLEQKNIAVETDVRVNKDSLTDLYVQHAIPLPQRDLPKNRWGKMMEKKREQHEIKNETKRSSTVDGLRKRPLIVFDGSSTSTSIKVKKTENGDNDRLKPPPQASFTSNAFRKLSNSSSSVSPLILSSNLPVNNKTEHNNNDAKQNHDLTHRKSPSGPVKSPPLSPVGTTPVKLKRAAPKEEAEAMNNLKPPQAKRKIQHVTWP

SEQ ID NO: 11797 - protein, 228 aa, Homo sapiens
MRRLRVTTHASLRPSTSLPQRFLRGALWVADWGLLATTMAGDVGGRSCTDSELLLHPELLSQEFLLLTLEQKNIAVETDVRVNKDSLTDLYVQHAIPLPQRDLPKNRWGKMMEKKREQHEIKNETKRSSTVDGLRKRPLIVFDGSSTSTSIKVKKTENGDNDRLKPPPQNHDLTHRKSPSGPVKSPPLSPVGTTPVKLKRAAPKEEAEAMNNLKPPQAKRKIQHVTWP

SEQ ID NO: 11798 - protein, 1384 aa, Homo sapiens
MMHLRLFCILLAAVSGAEGWGYYGCDEELVGPLYARSLGASSYYSLLTAPRFARLHGISGWSPRIGDPNPWLQIDLMKKHRIRAVATQGSFNSWDWVTRYMLLYGDRVDSWTPFYQRGHNSTFFGNVNESAVVRHDLHFHFTARYIRIVPLAWNPRGKIGLRLGLYGCPYKADILYFDGDDAISYRFPRGVSRSLWDVFAFSFKTEEKDGLLLHAEGAQGDYVTLELEGAHLLLHMSLGSSPIQPRPGHTTVSAGGVLNDQHWHYVRVDRFGRDVNFTLDGYVQRFILNGDFERLNLDTEMFIGGLVGAARKNLAYRHNFRGCIENVIFNRVNIADLAVRRHSRITFEGKVAFRCLDPVPHPINFGGPHNFVQVPGFPRRGRLAVSFRFRTWDLTGLLLFSRLGDGLGHVELTLSEGQVNVSIAQSGRKKLQFAAGYRLNDGFWHEVNFVAQENHAVISIDDVEGAEVRVSYPLLIRTGTSYFFGGCPKPASRWDCHSNQTAFHGCMELLKVDGQLVNLTLVEGRRLGFYAEVLFDTCGITDRCSPNMCEHDGRCYQSWDDFICYCELTGYKGETCHTPLYKESCEAYRLSGKTSGNFTIDPDGSGPLKPFVVYCDIRENRAWTVVRHDRLWTTRVTGSSMERPFLGAIQYWNASWEEVSALANASQHCEQWIEFSCYNSRLLNTAGGYPYSFWIGRNEEQHFYWGGSQPGIQRCACGLDRSCVDPALYCNCDADQPQWRTDKGLLTFVDHLPVTQVVIGDTNRSTSEAQFFLRPLRCYGDRNSWNTISFHTGAALRFPPIRANHSLDVSFYFRTSAPSGVFLENMGGPYCQWRRPYVRVELNTSRDVVFAFDVGNGDENLTVHSDDFEFNDDEWHLVRAEINVKQARLRVDHRPWVLRPMPLQTYIWMEYDQPLYVGSAELKRRPFVGCLRAMRLNGVTLNLEGRANASEGTSPNCTGHCAHPRLPCFHGGRCVERYSYYTCDCDLTAFDGPYCNHDIGGFFEPGTWMRYNLQSALRSAAREFSHMLSRPVPGYEPGYIPGYDTPGYVPGYHGPGYRLPDYPRPGRPVPGYRGPVYNVTGEEVSFSFSTSSAPAVLLYVSSFVRDYMAVLIKDDGTLQLRYQLGTSPYVYQLTTRPVTDGQPHSINITRVYRNLFIQVDYFPLTEQKFSLLVDSQLDSPKALYLGRVMETGVIDPEIQRYNTPGFSGCLSGVRFNNVAPLKTHFRTPRPMTAELAEALRVQGELSESNCGAMPRLVSEVPPELDPWYLPPDFPYYHDEGWVAILLGFLVAFLLLGLVGMLVLFYLQNHRYKGSYHTNEPKAAHEYHPGSKPPLPTSGPAQVPTPTAAPNQAPASAPAPAPTPAPAPGPRDQNLPQILEESRSE

SEQ ID NO: 11799 - protein, 147 aa, Homo sapiens
MGTPASVVSEPPPWQAPIEARGRKQASANIFQDAELLQIQALFQRSGDQLAEERAQIIWECAGDHRVAEALKRLRRKRPPRQKPLGHSLHHCSRLRILEPHSALANPQSATETASSEQYLHSRKKSARIRRNWRKSGPTSYLHQIRH

SEQ ID NO: 11800 - protein, 339 aa, Homo sapiens
MAAAVAAAPGALGSLHAGGARLVAACSAWLCPGLRLPGSLAGRRAGPAIWAQGWVPAAGGPAPKRGYSSEMKTEDELRVRHLEEENRGIVVLGINRAYGKNSLSKNLIKMLSKAVDALKSDKKVRTIIIRSEVPGIFCAGADLKERAKMSSSEVGPFVSKIRAVINDIANLPVPTIAAIDGLALGGGLELALACDIRVAASSAKMGLVETKLAIIPGGGGTQRLPRAIGMSLAKELIFSARVLDGKEAKAVGLISHVLEQNQEGDAAYRKALDLAREFLPQGPVAMRVAKLAINQGMEVDLVTGLAIEEACYAQTIPTKDRLEGLLAFKEKRPPRYKGE

SEQ ID NO: 11801 - protein, 310 aa, Homo sapiens
MAAAVAAAPGALGSLHAGGARLVAACSAWLCPGLRLPGSLAGRRAGPAIWAQGWVPAAGGPAPKRGYSSEMKTEDELRVRHLEEENRGIVVLGINRAYGKNSLSKNLIKMLSKAVDALKSDKKVRTIIIRSEVPGIFCAANLPVPTIAAIDGLALGGGLELALACDIRVAASSAKMGLVETKLAIIPGGGGTQRLPRAIGMSLAKELIFSARVLDGKEAKAVGLISHVLEQNQEGDAAYRKALDLAREFLPQGPVAMRVAKLAINQGMEVDLVTGLAIEEACYAQTIPTKDRLEGLLAFKEKRPPRYKGE

SEQ ID NO: 11802 - protein, 108 aa, Homo sapiens
MILQRLFRFSSVIRSAVSVHLRRNIGVTAVAFNKELDPIQKLFVDKIREYKSKRQTSGGPVDASSEYQQELERELFKLKQMFGNADMNTFPTFKFEDPKFEVIEKPQA

SEQ ID NO: 11803 - protein, 116 aa, Homo sapiens
MHCDGGISMILQRLFRFSSVIRSAVSVHLRRNIGVTAVAFNKELDPIQKLFVDKIREYKSKRQTSGGPVDASSEYQQELERELFKLKQMFGNADMNTFPTFKFEDPKFEVIEKPQA

SEQ ID NO: 11804 - protein, 823 aa, Homo sapiens
MAASEAAAAAGSAALAAGARAVPAATTGAAAAASGPWVPPGPRLRGSRPRPAGATQQPAVPAPPAGELIQPSVSELSRAVRTNILCTVRGCGKILPNSPALNMHLVKSHRLQDGIVNPTIRKDLKTGPKFYCCPIEGCPRGPERPFSQFSLVKQHFMKMHAEKKHKCSKCSNSYGTEWDLKRHAEDCGKTFRCTCGCPYASRTALQSHIYRTGHEIPAEHRDPPSKKRKMENCAQNQKLSNKTIESLNNQPIPRPDTQELEASEIKLEPSFEDSCGSNTDKQTLTTPPRYPQKLLLPKPKVALVKLPVMQFSVMPVFVPTADSSAQPVVLGVDQGSATGAVHLMPLSVGTLILGLDSEACSLKESLPLFKIANPIAGEPISTGVQVNFGKSPSNPLQELGNTCQKNSISSINVQTDLSYASQNFIPSAQWATADSSVSSCSQTDLSFDSQVSLPISVHTQTFLPSSKVTSSIAAQTDAFMDTCFQSGGVSRETQTSGIESPTDDHVQMDQAGMCGDIFESVHSSYNVATGNIISNSLVAETVTHSLLPQNEPKTLNQDIEKSAPIINFSAQNSMLPSQNMTDNQTQTIDLLSDLENILSSNLPAQTLDHRSLLSDTNPGPDTQLPSGPAQNPGIDFDIEEFFSASNIQTQTEESELSTMTTEPVLESLDIETQTDFLLADTSAQSYGCRGNSNFLGLEMFDTQTQTDLNFFLDSSPHLPLGSILKHSSFSVSTDSSDTETQTEGVSTAKNIPALESKVQLNSTETQTMSSGFETLGSLFFTSNETQTAMDDFLLADLAWNTMESQFSSVETQTSAEPHTVSNF

SEQ ID NO: 11805 - protein, 667 aa, Homo sapiens
MKMHAEKKHKCSKCSNSYGTEWDLKRHAEDCGKTFRCTCGCPYASRTALQSHIYRTGHEIPAEHRDPPSKKRKMENCAQNQKLSNKTIESLNNQPIPRPDTQELEASEIKLEPSFEDSCGSNTDKQTLTTPPRYPQKLLLPKPKVALVKLPVMQFSVMPVFVPTADSSAQPVVLGVDQGSATGAVHLMPLSVGTLILGLDSEACSLKESLPLFKIANPIAGEPISTGVQVNFGKSPSNPLQELGNTCQKNSISSINVQTDLSYASQNFIPSAQWATADSSVSSCSQTDLSFDSQVSLPISVHTQTFLPSSKVTSSIAAQTDAFMDTCFQSGGVSRETQTSGIESPTDDHVQMDQAGMCGDIFESVHSSYNVATGNIISNSLVAETVTHSLLPQNEPKTLNQDIEKSAPIINFSAQNSMLPSQNMTDNQTQTIDLLSDLENILSSNLPAQTLDHRSLLSDTNPGPDTQLPSGPAQNPGIDFDIEEFFSASNIQTQTEESELSTMTTEPVLESLDIETQTDFLLADTSAQSYGCRGNSNFLGLEMFDTQTQTDLNFFLDSSPHLPLGSILKHSSFSVSTDSSDTETQTEGVSTAKNIPALESKVQLNSTETQTMSSGFETLGSLFFTSNETQTAMDDFLLADLAWNTMESQFSSVETQTSAEPHTVSNF

SEQ ID NO: 11806 - protein, 193 aa, Homo sapiens
MEQHFLGCVKRAWDSAEVAPEPQPPPIVSSEDRGPWPLPLYPVLGEYSLDSCDLGLLSSPCWRLPGVYWQNGLSPGVQSTLEPSTAKPTEFSWPGTQKQQEAPVEEVGQAEEPDRLRLQQLPWSSPLHPWDRQQDTEVCDSGCLLERRHPPALQPWRHLPGFSDCLEWILRVGFAAFSVLWACCSRICGAKQP

SEQ ID NO: 11807 - protein, 772 aa, Homo sapiens
MAEAHQAVAFQFTVTPDGVDFRLSREALKHVYLSGINSWKKRLIRIKNGILRGVYPGSPTSWLVVIMATVGSSFCNVDISLGLVSCIQRCLPQGCGPYQTPQTRALLSMAIFSTGVWVTGIFFFRQTLKLLLCYHGWMFEMHGKTSNLTRIWAMCIRLLSSRHPMLYSFQTSLPKLPVPRVSATIQRYLESVRPLLDDEEYYRMELLAKEFQDKTAPRLQKYLVLKSWWASNYVSDWWEEYIYLRGRSPLMVNSNYYVMDLVLIKNTDVQAARLGNIIHAMIMYRRKLDREEIKPVMALGIVPMCSYQMERMFNTTRIPGKDTDVLQHLSDSRHVAVYHKGRFFKLWLYEGARLLKPQDLEMQFQRILDDPSPPQPGEEKLAALTAGGRVEWAQARQAFFSSGKNKAALEAIERAAFFVALDEESYSYDPEDEASLSLYGKALLHGNCYNRWFDKSFTLISFKNGQLGLNAEHAWADAPIIGHLWEFVLGTDSFHLGYTETGHCLGKPNPALAPPTRLQWDIPKQCQAVIESSYQVAKALADDVELYCFQFLPFGKGLIKKCRTSPDAFVQIALQLAHFRDRGKFCLTYEASMTRMFREGRTETVRSCTSESTAFVQAMMEGSHTKADLRDLFQKAAKKHQNMYRLAMTGAGIDRHLFCLYLVSKYLGVSSPFLAEVLSEPWRLSTSQIPQSQIRMFDPEQHPNHLGAGGGFGPVADDGYGVSYMIAGENTIFFHISSKFSSSETNAQRFGNHIRKALLDIADLFQVPKAYS

SEQ ID NO: 11808 - protein, 581 aa, Homo sapiens
MAEAHQAVAFQFTVTPDGVDFRLSREALKHVYLSGINSWKKRLIRIKNGILRGVYPGSPTSWLVVIMATVGSSFCNVDISLGLVSCIQRCLPQGCGPYQTPQTRALLSMAIFSTGVWVTGIFFFRQTLKLLLCYHGWMFEMHGKTSNLTRIWAMCIRLLSSRHPMLYSFQTSLPKLPVPRVSATIQRYLESVRPLLDDEEYYRMELLAKEFQDKTAPRLQKYLVLKSWWASNYVSDWWEEYIYLRGRSPLMVNSNYYVMDLVLIKNTDVQAARLGNIIHAMIMYRRKLDREEIKPVMALGIVPMCSYQMERMFNTTRIPGKDTDVLQHLSDSRHVAVYHKGRFFKLWLYEGARLLKPQDLEMQFQRILDDPSPPQPGEEKLAALTAGGRVEWAQARQAFFSSGKNKAALEAIERAAFFVALDEESYSYDPEDEASLSLYGKALLHGNCYNRWFDKSFTLISFKNGQLGLNAEHAWADAPIIGHLWEFVLGTDSFHLGYTETGHCLGKPNPALAPPTRLQWDIPKQCQAVIESSYQVAKALADDVELYCFQFLPFGKGLIKKCRTSPDAFVQIALQLAHFRG

SEQ ID NO: 11809 - protein, 738 aa, Homo sapiens
MAEAHQAVAFQFTVTPDGVDFRLSREALKHVYLSGINSWKKRLIRIKNGILRGVYPGSPTSWLVVIMATVGSSFCNVDISLGLVSCIQRCLPQGCGPYQTPQTRALLSMAIFSTGVWVTGIFFFRQTLKLLLCYHGWMFEMHGKTSNLTRIWAYLESVRPLLDDEEYYRMELLAKEFQDKTAPRLQKYLVLKSWWASNYVSDWWEEYIYLRGRSPLMVNSNYYVMDLVLIKNTDVQAARLGNIIHAMIMYRRKLDREEIKPVMALGIVPMCSYQMERMFNTTRIPGKDTDVLQHLSDSRHVAVYHKGRFFKLWLYEGARLLKPQDLEMQFQRILDDPSPPQPGEEKLAALTAGGRVEWAQARQAFFSSGKNKAALEAIERAAFFVALDEESYSYDPEDEASLSLYGKALLHGNCYNRWFDKSFTLISFKNGQLGLNAEHAWADAPIIGHLWEFVLGTDSFHLGYTETGHCLGKPNPALAPPTRLQWDIPKQCQAVIESSYQVAKALADDVELYCFQFLPFGKGLIKKCRTSPDAFVQIALQLAHFRDRGKFCLTYEASMTRMFREGRTETVRSCTSESTAFVQAMMEGSHTKADLRDLFQKAAKKHQNMYRLAMTGAGIDRHLFCLYLVSKYLGVSSPFLAEVLSEPWRLSTSQIPQSQIRMFDPEQHPNHLGAGGGFGPVADDGYGVSYMIAGENTIFFHISSKFSSSETNAQRFGNHIRKALLDIADLFQVPKAYS

SEQ ID NO: 11810 - protein, 691 aa, Homo sapiens
MAEAHQAVAFQFTVTPDGVDFRLSREALKHVYLSGINSWKKRLIRIKNGILRGVYPGSPTSWLVVIMATVGSSFCNVDISLGLVSCIQRCLPQGCGPYQTPQTRALLSMAIFSTGVWVTGIFFFRQTLKLLLCYHGWMFEMHGKTSNLTRIWAMCIRLLSSRHPMLYSFQTSLPKLPVPRVSATIQRYLESVRPLLDDEEYYRMELLAKEFQDKTAPRLQKYLVLKSWWASNYVSDWWEEYIYLRGRSPLMVNSNYYVMDLVLIKNTDVQAARLGNIIHAMIMYRRKLDREEIKPVMALGIVPMCSYQMERMFNTTRIPGKDTDVLQHLSDSRHVAVYHKGRFFKLWLYEGARLLSLYGKALLHGNCYNRWFDKSFTLISFKNGQLGLNAEHAWADAPIIGHLWEFVLGTDSFHLGYTETGHCLGKPNPALAPPTRLQWDIPKQCQAVIESSYQVAKALADDVELYCFQFLPFGKGLIKKCRTSPDAFVQIALQLAHFRDRGKFCLTYEASMTRMFREGRTETVRSCTSESTAFVQAMMEGSHTKADLRDLFQKAAKKHQNMYRLAMTGAGIDRHLFCLYLVSKYLGVSSPFLAEVLSEPWRLSTSQIPQSQIRMFDPEQHPNHLGAGGGFGPVADDGYGVSYMIAGENTIFFHISSKFSSSETNAQRFGNHIRKALLDIADLFQVPKAYS

SEQ ID NO: 11811 - protein, 309 aa, Homo sapiens
MSSPRAVVQLGKAQPAGEELATANQTAQQPSSPAMRRLTVDDFEIGRPLGKGKFGNVYLARLKESHFIVALKVLFKSQIEKEGLEHQLRREIEIQAHLQHPNILRLYNYFHDARRVYLILEYAPRGELYKELQKSEKLDEQRTATIIEELADALTYCHDKKVIHRDIKPENLLLGFRGEVKIADFGWSVHTPSLRRKTMCGTLDYLPPEMIEGRTYDEKVDLWCIGVLCYELLVGYPPFESASHSETYRRILKVDVRFPLSMPLGARDLISRLLRYQPLERLPLAQILKHPWVQAHSRRVLPPCAQMAS

SEQ ID NO: 11812 - protein, 275 aa, Homo sapiens
MRRLTVDDFEIGRPLGKGKFGNVYLARLKESHFIVALKVLFKSQIEKEGLEHQLRREIEIQAHLQHPNILRLYNYFHDARRVYLILEYAPRGELYKELQKSEKLDEQRTATIIEELADALTYCHDKKVIHRDIKPENLLLGFRGEVKIADFGWSVHTPSLRRKTMCGTLDYLPPEMIEGRTYDEKVDLWCIGVLCYELLVGYPPFESASHSETYRRILKVDVRFPLSMPLGARDLISRLLRYQPLERLPLAQILKHPWVQAHSRRVLPPCAQMAS

SEQ ID NO: 11813 - protein, 290 aa, Homo sapiens
MATANQTAQQPSSPAMRRLTVDDFEIGRPLGKGKFGNVYLARLKESHFIVALKVLFKSQIEKEGLEHQLRREIEIQAHLQHPNILRLYNYFHDARRVYLILEYAPRGELYKELQKSEKLDEQRTATIIEELADALTYCHDKKVIHRDIKPENLLLGFRGEVKIADFGWSVHTPSLRRKTMCGTLDYLPPEMIEGRTYDEKVDLWCIGVLCYELLVGYPPFESASHSETYRRILKVDVRFPLSMPLGARDLISRLLRYQPLERLPLAQILKHPWVQAHSRRVLPPCAQMAS

SEQ ID NO: 11814 - protein, 862 aa, Homo sapiens
MNIQEQGFPLDLGASFTEDAPRPPVPGEEGELVSTDPRPASYSFCSGKGVGIKGETSTATPRRSDLDLGYEPEGSASPTPPYLKWAESLHSLLDDQDGISLFRTFLKQEGCADLLDFWFACTGFRKLEPCDSNEEKRLKLARAIYRKYILDNNGIVSRQTKPATKSFIKGCIMKQLIDPAMFDQAQTEIQATMEENTYPSFLKSDIYLEYTRTGSESPKVCSDQSSGSGTGKGISGYLPTLNEDEEWKCDQDMDEDDGRDAAPPGRLPQKLLLETAAPRVSSSRRYSEGREFRYGSWREPVNPYYVNAGYALAPATSANDSEQQSLSSDADTLSLTDSSVDGIPPYRIRKQHRREMQESVQVNGRVPLPHIPRTYRVPKEVRVEPQKFAEELIHRLEAVQRTREAEEKLEERLKRVRMEEEGEDGDPSSGPPGPCHKLPPAPAWHHFPPRCVDMGCAGLRDAHEENPESILDEHVQRVLRTPGRQSPGPGHRSPDSGHVAKMPVALGGAASGHGKHVPKSGAKLDAAGLHHHRHVHHHVHHSTARPKEQVEAEATRRAQSSFAWGLEPHSHGARSRGYSESVGAAPNASDGLAHSGKVGVACKRNAKKAESGKSASTEVPGASEDAEKNQKIMQWIIEGEKEISRHRRTGHGSSGTRKPQPHENSRPLSLEHPWAGPQLRTSVQPSHLFIQDPTMPPHPAPNPLTQLEEARRRLEEEEKRASRAPSKQRYVQEVMRRGRACVRPACAPVLHVVPAVSDMELSETETRSQRKVGGGSAQPCDSIVVAYYFCGEPIPYRTLVRGRAVTLGQFKELLTKKGSYRYYFKKVSDEFDCGVVFEEVREDEAVLPVFEEKIIGKVEKVD

SEQ ID NO: 11815 - protein, 826 aa, Homo sapiens
MNIQEQGFPLDLGASFTEDAPRPPVPGEEGELVSTDPRPASYSFCSGKGVGIKGETSTATPRRSDLDLGYEPEGSASPTPPYLKWAESLHSLLDDQDGISLFRTFLKQEGCADLLDFWFACTGFRKLEPCDSNEEKRLKLARAIYRKYILDNNGIVSRQTKPATKSFIKGCIMKQLIDPAMFDQAQTEIQATMEENTYPSFLKSDIYLEYTRTGSESPKVCSDQSSGSGTGKGISGYLPTLNEDEEWKCDQDMDEDDGRDAAPPGRLPQKLLLETAAPRVSSSRRYSEGREFRYGSWREPVNPYYVNAGYALAPATSANDSEQQSLSSDADTLSLTDSSVDGIPPYRIRKQHRREMQESVQVNGRVPLPHIPRTYRVPKEVRVEPQKFAEELIHRLEAVQRTREAEEKLEERLKRVRMEEEGEDGDPSSGPPGPCHKLPPAPAWHHFPPRCVDMGCAGLRDAHEENPESILDEHVQRVLRTPGRQSPGPGHRSPDSGHVAKMPVALGGAASGHGKHVPKSGAKLDAAGLHHHRHVHHHVHHSTARPKEQVEAEATRRAQSSFAWGLEPHSHGARSRGYSESVGAAPNASDGLAHSGKVGVACKRNAKKAESGKSASTEVPGASEDAEKNQKIMQWIIEGEKEISRHRRTGHGSSGTRKPQPHENSRPLSLEHPWAGPQLRTSVQPSHLFIQDPTMPPHPAPNPLTQLEEARRRLEEEEKRASRAPSKQRTRSQRKVGGGSAQPCDSIVVAYYFCGEPIPYRTLVRGRAVTLGQFKELLTKKGSYRYYFKKVSDEFDCGVVFEEVREDEAVLPVFEEKIIGKVEKVD

SEQ ID NO: 11816 - protein, 843 aa, Homo sapiens
MSSAMLVTCLPDPSSSFREDAPRPPVPGEEGETPPCQPGVGKGQVTKPMSVSSNTRRNEDGLGEPEGRASPDSPLTRWTKSLHSLLGDQDGAYLFRTFLEREKCVDTLDFWFACNGFRQMNLKDTKTLRVAKAIYKRYIENNSIVSKQLKPATKTYIRDGIKKQQIDSIMFDQAQTEIQSVMEENAYQMFLTSDIYLEYVRSGGENTAYMSNGGLGSLKVVCGYLPTLNEEEEWTCADFKCKLSPTVVGLSSKTLRATASVRSTETVDSGYRSFKRSDPVNPYHIGSGYVFAPATSANDSEISSDALTDDSMSMTDSSVDGIPPYRVGSKKQLQREMHRSVKANGQVSLPHFPRTHRLPKEMTPVEPATFAAELISRLEKLKLELESRHSLEERLQQIREDEEREGSELTLNSREGAPTQHPLSLLPSGSYEEDPQTILDDHLSRVLKTPGCQSPGVGRYSPRSRSPDHHHHHHSQYHSLLPPGGKLPPAAASPGACPLLGGKGFVTKQTTKHVHHHYIHHHAVPKTKEEIEAEATQRVHCFCPGGSEYYCYSKCKSHSKAPETMPSEQFGGSRGSTLPKRNGKGTEPGLALPAREGGAPGGAGALQLPREEGDRSQDVWQWMLESERQSKPKPHSAQSTKKAYPLESARSSPGERASRHHLWGGNSGHPRTTPRAHLFTQDPAMPPLTPPNTLAQLEEACRRLAEVSKPPKQRCCVASQQRDRNHSATVQTGATPFSNPSLAPEDHKEPKKLAGVHALQASELVVTYFFCGEEIPYRRMLKAQSLTLGHFKEQLSKKGNYRYYFKKASDEFACGAVFEEIWEDETVLPMYEGRILGKVERID

SEQ ID NO: 11817 - protein, 512 aa, Homo sapiens
MLFEGLDLVSALATLAACLVSVTLLLAVSQQLWQLRWAATRDKSCKLPIPKGSMGFPLIGETGHWLLQGSGFQSSRREKYGNVFKTHLLGRPLIRVTGAENVRKILMGEHHLVSTEWPRSTRMLLGPNTVSNSIGDIHRNKRKVFSKIFSHEALESYLPKIQLVIQDTLRAWSSHPEAINVYQEAQKLTFRMAIRVLLGFSIPEEDLGHLFEVYQQFVDNVFSLPVDLPFSGYRRGIQARQILQKGLEKAIREKLQCTQGKDYLDALDLLIESSKEHGKEMTMQELKDGTLELIFAAYATTASASTSLIMQLLKHPTVLEKLRDELRAHGILHSGGCPCEGTLRLDTLSGLRYLDCVIKEVMRLFTPISGGYRTVLQTFELDGFQIPKGWSVMYSIRDTHDTAPVFKDVNVFDPDRFSQARSEDKDGRFHYLPFGGGVRTCLGKHLAKLFLKVLAVELASTSRFELATRTFPRITLVPVLHPVDGLSVKFFGLDSNQNEILPETEAMLSATV

SEQ ID NO: 11818 - protein, 437 aa, Homo sapiens
MLFEGLDLVSALATLAACLVSVTLLLAVSQQLWQLRWAATRDKSCKLPIPKGSMGFPLIGETGHWLLQVFSKIFSHEALESYLPKIQLVIQDTLRAWSSHPEAINVYQEAQKLTFRMAIRVLLGFSIPEEDLGHLFEVYQQFVDNVFSLPVDLPFSGYRRGIQARQILQKGLEKAIREKLQCTQGKDYLDALDLLIESSKEHGKEMTMQELKDGTLELIFAAYATTASASTSLIMQLLKHPTVLEKLRDELRAHGILHSGGCPCEGTLRLDTLSGLRYLDCVIKEVMRLFTPISGGYRTVLQTFELDGFQIPKGWSVMYSIRDTHDTAPVFKDVNVFDPDRFSQARSEDKDGRFHYLPFGGGVRTCLGKHLAKLFLKVLAVELASTSRFELATRTFPRITLVPVLHPVDGLSVKFFGLDSNQNEILPETEAMLSATV

SEQ ID NO: 11819 - protein, 495 aa, Homo sapiens
MKNKTCVLVCVSVFGGERGQVTVPRVGVRRPSLAGPLQKCTLRETRVWLPQGSGFQSSRREKYGNVFKTHLLGRPLIRVTGAENVRKILMGEHHLVSTEWPRSTRMLLGPNTVSNSIGDIHRNKRKVFSKIFSHEALESYLPKIQLVIQDTLRAWSSHPEAINVYQEAQKLTFRMAIRVLLGFSIPEEDLGHLFEVYQQFVDNVFSLPVDLPFSGYRRGIQARQILQKGLEKAIREKLQCTQGKDYLDALDLLIESSKEHGKEMTMQELKDGTLELIFAAYATTASASTSLIMQLLKHPTVLEKLRDELRAHGILHSGGCPCEGTLRLDTLSGLRYLDCVIKEVMRLFTPISGGYRTVLQTFELDGFQIPKGWSVMYSIRDTHDTAPVFKDVNVFDPDRFSQARSEDKDGRFHYLPFGGGVRTCLGKHLAKLFLKVLAVELASTSRFELATRTFPRITLVPVLHPVDGLSVKFFGLDSNQNEILPETEAMLSATV

SEQ ID NO: 11820 - protein, 66 aa, Homo sapiens
MTGLSMDGGGSPKGDVDPFYYDYETVRNGGLIFAGLAFIVGLLILLSRRFRCGGNKKRRQINEDEP

SEQ ID NO: 11821 - protein, 64 aa, Homo sapiens
MDRWYLGGSPKGDVDPFYYDYETVRNGGLIFAGLAFIVGLLILLSRRFRCGGNKKRRQINEDEP

SEQ ID NO: 11822 - protein, 3926 aa, Homo sapiens
MGNEVSLEGGAGDGPLPPGGAGPGPGPGPGPGAGKPPSAPAGGGQLPAAGAARSTAVPPVPGPGPGPGPGPGPGSTSRRLDPKEPLGNQRAASPTPKQASATTPGHESPRETRAQGPAGQEADGPRRTLQVDSRTQRSGRSPSVSPDRGSTPTSPYSVPQIAPLPSSTLCPICKTSDLTSTPSQPNFNTCTQCHNKVCNQCGFNPNPHLTQVKEWLCLNCQMQRALGMDMTTAPRSKSQQQLHSPALSPAHSPAKQPLGKPDQERSRGPGGPQPGSRQAETARATSVPGPAQAAAPPEVGRVSPQPPQPTKPSTAEPRPPAGEAPAKSATAVPAGLGATEQTQEGLTGKLFGLGASLLTQASTLMSVQPEADTQGQPAPSKGTPKIVFNDASKEAGPKPLGSGPGPGPAPGAKTEPGARMGPGSGPGALPKTGGTTSPKHGRAEHQAASKAAAKPKTMPKERAICPLCQAELNVGSKSPANYNTCTTCRLQVCNLCGFNPTPHLVEKTEWLCLNCQTKRLLEGSLGEPTPLPPPTSQQPPVGAPHRASGTSPLKQKGPQGLGQPSGPLPAKASPLSTKASPLPSKASPQAKPLRASEPSKTPSSVQEKKTRVPTKAEPMPKPPPETTPTPATPKVKSGVRRAEPATPVVKAVPEAPKGGEAEDLVGKPYSQDASRSPQSLSDTGYSSDGISSSQSEITGVVQQEVEQLDSAGVTGPHPPSPSEIHKVGSSMRPLLQAQGLAPSERSKPLSSGTGEEQKQRPHSLSITPEAFDSDEELEDILEEDEDSAEWRRRREQQDTAESSDDFGSQLRHDYVEDSSEGGLSPLPPQPPARAAELTDEDFMRRQILEMSAEEDNLEEDDTATSGRGLAKHGTQKGGPRPRPEPSQEPAALPKRRLPHNATTGYEELLPEGGSAEATDGSGTLQGGLRRFKTIELNSTGSYGHELDLGQGPDPSLDREPELEMESLTGSPEDRSRGEHSSTLPASTPSYTSGTSPTSLSSLEEDSDSSPSRRQRLEEAKQQRKARHRSHGPLLPTIEDSSEEEELREEEELLREQEKMREVEQQRIRSTARKTRRDKEELRAQRRRERSKTPPSNLSPIEDASPTEELRQAAEMEELHRSSCSEYSPSPSLDSEAEALDGGPSRLYKSGSEYNLPTFMSLYSPTETPSGSSTTPSSGRPLKSAEEAYEEMMRKAELLQRQQGQAAGARGPHGGPSQPTGPRGLGSFEYQDTTDREYGQAAQPAAEGTPASLGAAVYEEILQTSQSIVRMRQASSRDLAFAEDKKKEKQFLNAESAYMDPMKQNGGPLTPGTSPTQLAAPVSFSTPTSSDSSGGRVIPDVRVTQHFAKETQDPLKLHSSPASPSSASKEIGMPFSQGPGTPATTAVAPCPAGLPRGYMTPASPAGSERSPSPSSTAHSYGHSPTTANYGSQTEDLPQAPSGLAAAGRAAREKPLSASDGEGGTPQPSRAYSYFASSSPPLSPSSPSESPTFSPGKMGPRATAEFSTQTPSPAPASDMPRSPGAPTPSPMVAQGTQTPHRPSTPRLVWQESSQEAPFMVITLASDASSQTRMVHASASTSPLCSPTETQPTTHGYSQTTPPSVSQLPPEPPGPPGFPRVPSAGADGPLALYGWGALPAENISLCRISSVPGTSRVEPGPRTPGTAVVDLRTAVKPTPIILTDQGMDLTSLAVEARKYGLALDPIPGRQSTAVQPLVINLNAQEHTFLATATTVSITMASSVFMAQQKQPVVYGDPYQSRLDFGQGGGSPVCLAQVKQVEQAVQTAPYRSGPRGRPREAKFARYNLPNQVAPLARRDVLITQMGTAQSIGLKPGPVPEPGAEPHRATPAELRSHALPGARKPHTVVVQMGEGTAGTVTTLLPEEPAGALDLTGMRPESQLACCDMVYKLPFGSSCTGTFHPAPSVPEKSMADAAPPGQSSSPFYGPRDPEPPEPPTYRAQGVVGPGPHEEQRPYPQGLPGRLYSSMSDTNLAEAGLNYHAQRIGQLFQGPGRDSAMDLSSLKHSYSLGFADGRYLGQGLQYGSVTDLRHPTDLLAHPLPMRRYSSVSNIYSDHRYGPRGDAVGFQEASLAQYSATTAREISRMCAALNSMDQYGGRHGSGGGGPDLVQYQPQHGPGLSAPQSLVPLRPGLLGNPTFPEGHPSPGNLAQYGPAAGQGTAVRQLLPSTATVRAADGMIYSTINTPIAATLPITTQPASVLRPMVRGGMYRPYASGGITAVPLTSLTRVPMIAPRVPLGPTGLYRYPAPSRFPIASSVPPAEGPVYLGKPAAAKAPGAGGPSRPEMPVGAAREEPLPTTTPAAIKEAAGAPAPAPLAGQKPPADAAPGGGSGALSRPGFEKEEASQEERQRKQQEQLLQLERERVELEKLRQLRLQEELERERVELQRHREEEQLLVQRELQELQTIKHHVLQQQQEERQAQFALQREQLAQQRLQLEQIQQLQQQLQQQLEEQKQRQKAPFPAACEAPGRGPPLAAAELAQNGQYWPPLTHAAFIAMAGPEGLGQPREPVLHRGLPSSASDMSLQTEEQWEASRSGIKKRHSMPRLRDACELESGTEPCVVRRIADSSVQTDDEDGESRYLLSRRRRARRSADCSVQTDDEDSAEWEQPVRRRRSRLPRHSDSGSDSKHDATASSSSAAATVRAMSSVGIQTISDCSVQTEPDQLPRVSPAIHITAATDPKVEIVRYISAPEKTGRGESLACQTEPDGQAQGVAGPQLVGPTAISPYLPGIQIVTPGPLGRFEKKKPDPLEIGYQAHLPPESLSQLVSRQPPKSPQVLYSPVSPLSPHRLLDTSFASSERLNKAHVSPQKHFTADSALRQQTLPRPMKTLQRSLSDPKPLSPTAEESAKERFSLYQHQGGLGSQVSALPPNSLVRKVKRTLPSPPPEEAHLPLAGQASPQLYAASLLQRGLTGPTTVPATKASLLRELDRDLRLVEHESTKLRKKQAELDEEEKEIDAKLKYLELGITQRKESLAKDRGGRDYPPLRGLGEHRDYLSDSELNQLRLQGCTTPAGQFVDFPATAAAPATPSGPTAFQQPRFQPPAPQYSAGSGGPTQNGFPAHQAPTYPGPSTYPAPAFPPGASYPAEPGLPNQQAFRPTGHYAGQTPMPTTQSTLFPVPADSRAPLQKPRQTSLADLEQKVPTNYEVIASPVVPMSSAPSETSYSGPAVSSGYEQGKVPEVPRAGDRGSVSQSPAPTYPSDSHYTSLEQNVPRNYVMIDDISELTKDSTSTAPDSQRLEPLGPGSSGRPGKEPGEPGVLDGPTLPCCYARGEEESEEDSYDPRGKGGHLRSMESNGRPASTHYYGDSDYRHGARVEKYGPGPMGPKHPSKSLAPAAISSKRSKHRKQGMEQKISKFSPIEEAKDVESDLASYPPPAVSSSLVSRGRKFQDEITYGLKKNVYEQQKYYGMSSRDAVEDDRIYGGSSRSRAPSAYSGEKLSSHDFSGWGKGYEREREAVERLQKAGPKPSSLSMAHSRVRPPMRSQASEEESPVSPLGRPRPAGGPLPPGGDTCPQFCSSHSMPDVQEHVKDGPRAHAYKREEGYILDDSHCVVSDSEAYHLGQEETDWFDKPRDARSDRFRHHGGHAVSSSSQKRGPARHSYHDYDEPPEEGLWPHDEGGPGRHASAKEHRHGDHGRHSGRHTGEEPGRRAAKPHARDLGRHEARPHSQPSSAPAMPKKGQPGYPSSAEYSQPSRASSAYHHASDSKKGSRQAHSGPAALQSKAEPQAQPQLQGRQAAPGPQQSQSPSSRQIPSGAASRQPQTQQQQQGLGLQPPQQALTQARLQQQSQPTTRGSAPAASQPAGKPQPGPSTATGPQPAGPPRAEQTNGSKGTAKAPQQGRAPQAQPAPGPGPAGVKAGARPGGTPGAPAGQPGADGESVFSKILPGGAAEQAGKLTEAVSAFGKKFSSFW

SEQ ID NO: 11823 - protein, 1012 aa, Homo sapiens
MEEYEKFCEKSLARIQEASLSTESFLPAQSESISLIRFHGVAILSPLLNIEKRKEMQQEKQKALDVEARKQVNRKKALLTRVQEILDNVQVRKAPNASDFDQWEMETVYSNSEVRNLNVPATFPNSFPSHTEHSTAAKLDKIAGILPLDNEDQCKTDGIDLARDSEGFNSPKQCDSSNISHVENEAFPKTSSATPQETLISDGPFSVNEQQDLPLLAEVIPDPYVMSLQNLMKKSKEYIEREQSRRSLRGSINRIVNESHLDKEHDAVEVADCVKEKGQLTGKHCVSVIPDKPSLNKSNVLLQGASTQASSMSMPVLASFSKVDIPIRTGHPTVLESNSDFKVIPTFVTENNVIKSLTGSYAKLPSPEPSMSPKMHRRRSRTSSACHILINNPINACELSPKGKEQAMDLIIQDTDENTNVPEIMPKLPTDLAGVCSSKVYVGKNTSEVKEDVVLGKSNQVCQSSGNHLENKVTHGLVTVEGQLTSDERGAHIMNSTCAAMPKLHEPYASSQCIASPNFGTVSGLKPASMLEKNCSLQTELNKSYDVKNPSPLLMQNQNTRQQMDTPMVSCGNEQFLDNSFEKVKRRLDLDIDGLQKENCPYVITSGITEQERQHLPEKRYPKGSGFVNKNKMLGTSSKESEELLKSKMLAFEEMRKRLEEQHAQQLSLLIAEQEREQERLQKEIEEQEKMLKEKKAMTAEASELDINNAVELEWRKISDSSLLETMLSQADSLHTSNSNSSGFTNSAMQYSFVSANEAPFYLWGSSTSGLTKLSVTRPFGRAKTRWSQVFSLEIQAKFNKITAVAKGFLTRRLMQTDKLKQLRQTVKDTMEFIRSFQSEAPLKRGIVSAQDASLQERVLAQLRAALYGIHDIFFVMDAAERMSILHHDREVRKEKMLRQMDKMKSPRVALSAATQKSLDRKKYMKAAEMGMPNKKFLVKQNPSETRVLQPNQGQNAPVHRLLSRQGTPKTSVKGVVQNRQKPSQSRVPNRVPVSGVYAGKIQRKRPNVATI

SEQ ID NO: 11824 - protein, 991 aa, Homo sapiens
MEEYEKFCEKSLARIQEASLSTESFLPAQSESISLIRFHGVAILSPLLNIEKRKEMQQEKQKALDVEARKQVNRKKALLTRVQEILDNVQVRKAPNASDFDQWEMETVYSNSEVRNLNVPATFPNSFPSHTEHSTAAKLDKIAGILPLDNEDQCKTDGIDLARDSEGFNSPKQCDSSNISHVENEAFPKTSSATPQETLISDGPFSVNEQQDLPLLAEVIPDPYVMSLQNLMKKSKEYIEREQSRRSLRGSINRIVNESHLDKEHDAVEVADCVKEKGQLTGKHCVSVIPDKPSLNKSNVLLQGASTQASSMSMPVLASFSKVDIPIRTGHPTVLESNSDFKVIPTFVTENNVIKSLTGSYAKLPSPEPSMSPKMHRRRSRTSSACHILINNPINACELSPKGKEQAMDLIIQDTDENTNVPEIMPKLPTDLAGVCSSKVYVGKNTSEVKEDVVLGKSNQVCQSSGNHLENKVTHGLVTVEGQLTSDERGAHIMNSTCAAMPKLHEPYASSQCIASPNFGTVSGLKPASMLEKNCSLQTELNKSYDVKNPSPLLMQNQNTRQQMDTPMVSCGNEQFLDNSFEKVKRRLDLDIDGLQKENCPYVITSGITEQERQHLPEKRYPKGSGFVNKNKMLGTSSKESEELLKSKMLAFEEMRKRLEEQHAQQLSLLIAEQEREQERLQKEIEEQEKMLKEKKAMTAEASELDINNAVELEWRKISDSSLLETMLSQADSLHTSNSNSSGFTNSAMQYSFVSANEAPFYLWGSSTSGLTKLSVTRPFGRAKTRWSQVFSLEIQAKFNKITAVAKGFLTRRLMQTDKLKQLRQTVKDTMEFIRSFQSEAPLKRGIVSAQDASLQERVLAQLRAALYGIHDIFFVMDAAERMSILHHDREVRKEKMLRQMDKMKSPRVALSAATQKSLDRKKYMKAAEMGMPNKKFLVKQNPSETRVLQPNQGQNAPVHRLLSRQGSICRKNPKKAAKCCDNLRRQHSLG

SEQ ID NO: 11825 - protein, 174 aa, Homo sapiens
MGKITFYEDRAFQGRSYETTTDCPNLQPYFSRCNSIRVESGCWMLYERPNYQGQQYLLRRGEYPDYQQWMGLSDSIRSCCLIPQTVSHRLRLYEREDHKGLMMELSEDCPSIQDRFHLSEIRSLHVLEGCWVLYELPNYRGRQYLLRPQEYRRCQDWGAMDAKAGSLRRVVDLY

SEQ ID NO: 11826 - protein, 592 aa, Homo sapiens
MSVSLVVIRLELAEHSPVPAGFGFSAAAGEMSDEEIKKTTLASAVACLEGKSPGEKVAIIHQHLGRREMTDVIIETMKSNPDELKTTVEERKSSEASPTAQRSKDHSKECINAAPDSPSKQLPDQISFFSGNPSVEIVHGIMHLYKTNKMTSLKEDVRRSAMLCILTVPAAMTSHDLMKFVAPFNEVIEQMKIIRDSTPNQYMVLIKFRAQADADSFYMTCNGRQFNSIEDDVCQLVYVERAEVLKSEDGASLPVMDLTELPKCTVCLERMDESVNGILTTLCNHSFHSQCLQRWDDTTCPVCRYCQTPEPVEENKCFECGVQENLWICLICGHIGCGRYVSRHAYKHFEETQHTYAMQLTNHRVWDYAGDNYVHRLVASKTDGKIVQYECEGDTCQEEKIDALQLEYSYLLTSQLESQRIYWENKIVRIEKDTAEEINNMKTKFKETIEKCDNLEHKLNDLLKEKQSVERKCTQLNTKVAKLTNELKEEQEMNKCLRANQVLLQNKLKEEERVLKETCDQKDLQITEIQEQLRDVMFYLETQQKINHLPAETRQEIQEGQINIAMASASSPASSGGSGKLPSRKGRSKRGK

SEQ ID NO: 11827 - protein, 413 aa, Homo sapiens
MHLYKTNKMTSLKEDVRRSAMLCILTVPAAMTSHDLMKFVAPFNEVIEQMKIIRDSTPNQYMVLIKFRAQGASLPVMDLTELPKCTVCLERMDESVNGILTTLCNHSFHSQCLQRWDDTTCPVCRYCQTPEPVEENKCFECGVQENLWICLICGHIGCGRYVSRHAYKHFEETQHTYAMQLTNHRVWDYAGDNYVHRLVASKTDGKIVQYECEGDTCQEEKIDALQLEYSYLLTSQLESQRIYWENKIVRIEKDTAEEINNMKTKFKETIEKCDNLEHKLNDLLKEKQSVERKCTQLNTKVAKLTNELKEEQEMNKCLRANQVLLQNKLKEEERVLKETCDQKDLQITEIQEQLRDVMFYLETQQKINHLPAETRQEIQEGQINIAMASASSPASSGGSGKLPSRKGRSKRGK

SEQ ID NO: 11828 - protein, 114 aa, Homo sapiens
MYYKFSGFTQKLAGAWASEAYSPQGLKPVVSTEAPPIIFATPTKLTSDSTVYDYAGKNKVPELQKFFQKADGVPVYLKRGLPDQMLYRTTMALTVGGTIYCLIALYMASQPKNK

SEQ ID NO: 11829 - protein, 456 aa, Homo sapiens
MRKKWKMGGMKYIFSLLFFLLLEGGKTEQVKHSETYCMFQDKKYRVGERWHPYLEPYGLVYCVNCICSENGNVLCSRVRCPNVHCLSPVHIPHLCCPRCPDSLPPVNNKVTSKSCEYNGTTYQHGELFVAEGLFQNRQPNQCTQCSCSEGNVYCGLKTCPKLTCAFPVSVPDSCCRVCRGDGELSWEHSDGDIFRQPANREARHSYHRSHYDPPPSRQAGGLSRFPGARSHRGALMDSQQASGTIVQIVINNKHKHGQVCVSNGKTYSHGESWHPNLRAFGIVECVLCTCNVTKQECKKIHCPNRYPCKYPQKIDGKCCKVCPGKKAKELPGQSFDNKGYFCGEETMPVYESVFMEDGETTRKIALETERPPQVEVHVWTIRKGILQHFHIEKISKRMFEELPHFKLVTRTTLSQWKIFTEGEAQISQMCSSRVCRTELEDLVKVLYLERSEKGHC

SEQ ID NO: 11830 - protein, 378 aa, Homo sapiens
MRKKWKMGGMKYIFSLLFFLLLEGGKTEQVKHSETYCMFQDKKYRVGERWHPYLEPYGLVYCVNCICSENGNVLCSRVRCPNVHCLSPVHIPHLCCPRCPGDGELSWEHSDGDIFRQPANREARHSYHRSHYDPPPSRQAGGLSRFPGARSHRGALMDSQQASGTIVQIVINNKHKHGQVCVSNGKTYSHGESWHPNLRAFGIVECVLCTCNVTKQECKKIHCPNRYPCKYPQKIDGKCCKVCPGKKAKEELPGQSFDNKGYFCGEETMPVYESVFMEDGETTRKIALETERPPQVEVHVWTIRKGILQHFHIEKISKRMFEELPHFKLVTRTTLSQWKIFTEGEAQISQMCSSRVCRTELEDLVKVLYLERSEKGHC

SEQ ID NO: 11831 - protein, 458 aa, Homo sapiens
MRKKWKMGGMKYIFSLLFFLLLEGGKTEQVKHSETYCMFQDKKYRVGERWHPYLEPYGLVYCVNCICSENGNVLCSRVRCPNVHCLSPVHIPHLCCPRCPEDSLPPVNNKVTSKSCEYNGTTYQHGELFVAEGLFQNRQPNQCTQCSCSEGNVYCGLKTCPKLTCAFPVSVPDSCCRVCRGDGELSWEHSDGDIFRQPANREARHSYHRSHYDPPPSRQAGGLSRFPGARSHRGALMDSQQASGTIVQIVINNKHKHGQVCVSNGKTYSHGESWHPNLRAFGIVECVLCTCNVTKQECKKIHCPNRYPCKYPQKIDGKCCKVCPGKKAKEELPGQSFDNKGYFCGEETMPVYESVFMEDGETTRKIALETERPPQVEVHVWTIRKGILQHFHIEKISKRMFEELPHFKLVTRTTLSQWKIFTEGEAQISQMCSSRVCRTELEDLVKVLYLERSEKGHC

SEQ ID NO: 11832 - protein, 457 aa, Homo sapiens
MRKKWKMGGMKYIFSLLFFLLLEGGKTEQVKHSETYCMFQDKKYRVGERWHPYLEPYGLVYCVNCICSENGNVLCSRVRCPNVHCLSPVHIPHLCCPRCPDSLPPVNNKVTSKSCEYNGTTYQHGELFVAEGLFQNRQPNQCTQCSCSEGNVYCGLKTCPKLTCAFPVSVPDSCCRVCRGDGELSWEHSDGDIFRQPANREARHSYHRSHYDPPPSRQAGGLSRFPGARSHRGALMDSQQASGTIVQIVINNKHKHGQVCVSNGKTYSHGESWHPNLRAFGIVECVLCTCNVTKQECKKIHCPNRYPCKYPQKIDGKCCKVCPGKKAKEELPGQSFDNKGYFCGEETMPVYESVFMEDGETTRKIALETERPPQVEVHVWTIRKGILQHFHIEKISKRMFEELPHFKLVTRTTLSQWKIFTEGEAQISQMCSSRVCRTELEDLVKVLYLERSEKGHC

SEQ ID NO: 11833 - protein, 217 aa, Homo sapiens
MSWTCPRCQQPVFFAEKVSSLGKNWHRFCLKCERCHSILSPGGHAEHNGRPYCHKPCYGALFGPRGVNIGGVGSYLYNPPTPSPGCTTPLSPSSFSPPRPRTGLPQGKKSPPHMKTFTGETSLCPGCGEPVYFAEKVMSLGRNWHRPCLRCQRCHKTLTAGSHAEHDGVPYCHVPCYGYLFGPKGGQPHPRHWDGMYMPEVWHVHGLWVCVDNFPCG

SEQ ID NO: 11834 - protein, 205 aa, Homo sapiens
MSWTCPRCQQPVFFAEKVSSLGKNWHRFCLKCERCHSILSPGGHAEHNGRPYCHKPCYGALFGPRGVNIGGVGSYLYNPPTPSPGCTTPLSPSSFSPPRPRTGLPQGKKSPPHMKTFTGETSLCPGCGEPVYFAEKVMSLGRNWHRPCLRCQRCHKTLTAGSHAEHDGVPYCHVPCYGYLFGPKGGQPHPRHWDGMYMPEVWHVV

SEQ ID NO: 11835 - protein, 204 aa, Homo sapiens
MSWTCPRCQQPVFFAEKVSSLGKNWHRFCLKCERCHSILSPGGHAEHNGRPYCHKPCYGALFGPRGVNIGGVGSYLYNPPTPSPGCTTPLSPSSFSPPRPRTGLPQGKKSPPHMKTFTGETSLCPGCGEPVYFAEKVMSLGRNWHRPCLRCQRCHKTLTAGSHAEHDGVPYCHVPCYGYLFGPKGVNIGDVGCYIYDPVKIKFK

SEQ ID NO: 11836 - protein, 166 aa, Homo sapiens
MSWTCPRCQQPVFFAEKVSSLGKNWHRFCLKCERCHSILSPGGHAEHNGRPYCHKPCYGALFGPRGVNIGGVGSYLYNPPTPSPGCTTPLSPSSFSPPRPRTGLPQGKKSPPHMKTFTGETSLCPGCGEPVYFAEKVMSLGRNWHRPCLRCQRCHKTLTAGSHAEV

SEQ ID NO: 11837 - protein, 318 aa, Homo sapiens
MAAQGCAASRLLQLLLQLLLLLLLLAAGGARARWRGEGTSAHLRDIFLGRCAEYRALLSPEQRNKNCTAIWEAFKVALDKDPCSVLPSDYDLFINLSRHSIPRDKSLFWENSHLLVNSFADNTRRFMPLSDVLYGRVADFLSWCRQKNDSGLDYQSCPTSEDCENNPVDSFWKRASIQYSKDSSGVIHVMLNGSEPTGAYPIKGFFADYEIPNLQKEKITRIEIWVMHEIGGPNVESCGEGSMKVLEKRLKDMGFQYSCINDYRPVKLLQCVDHSTHPDCALKSAAAATQRKAPSLYTEQRAGLIIPLFLVLASRTQL

SEQ ID NO: 11838 - protein, 260 aa, Homo sapiens
MAAQGNKNCTAIWEAFKVALDKDPCSVLPSDYDLFINLSRHSIPRDKSLFWENSHLLVNSFADNTRRFMPLSDVLYGRVADFLSWCRQKNDSGLDYQSCPTSEDCENNPVDSFWKRASIQYSKDSSGVIHVMLNGSEPTGAYPIKGFFADYEIPNLQKEKITRIEIWVMHEIGGPNVESCGEGSMKVLEKRLKDMGFQYSCINDYRPVKLLQCVDHSTHPDCALKSAAAATQRKAPSLYTEQRAGLIIPLFLVLASRTQL

SEQ ID NO: 11839 - protein, 821 aa, Homo sapiens
MDPECAQLLPALCAVLVDPRQPVADDTCLEKLLDWFKTVTEGESSVVLLQEHPCLVELLSHVLKVQDLSSGVLSFSLRLAGTFAAQENCFQYLQQGELLPGLFGEPGPLGRATWAVPTVRSGWIQGLRSLAQHPSALRFLADHGAVDTIFSLQGDSSLFVASAASQLLVHVLALSMRGGAEGQPCLPGGDWPACAQKIMDHVEESLCSAATPKVTQALNVLTTTFGRCQSPWTEALWVRLSPRVACLLERDPIPAAHSFVDLLLCVARSPVFSSSDGSLWETVARALSCLGPTHMGPLALGILKLEHCPQALRTQAFQVLLQPLACVLKATVQAPGPPGLLDGTADDATTVDTLLASKSSCAGLLCRTLAHLEELQPLPQRPSPWPQASLLGATVTVLRLCDGSAAPASSVGGHLCGTLAGCVRVQRAALDFLGTLSQGTGPQELVTQALAVLLECLESPGSSPTVLKKAFQATLRWLLSSPKTPGCSDLGPLIPQFLRELFPVLQKRLCHPCWEVRDSALEFLTQLSRHWGGQADFRCALLASEVPQLALQLLQDPESYVRASAVTAMGQLSSQGLHAPTSPEHAEARQSLFLELLHILSVDSEGFPRRAVMQVFTEWLRDGHADAAQDTEQFVATVLQAASRDLDWEVRAQGLELALVFLGQTLGPPRTHCPYAVALPEVAPAQPLTEALRALCHVGLFDFAFCALFDCDRPVAQKSCDLLLFLRDKIASYSSLREARGSPNTASAEATLPRWRAGEQAQPPGDQEPEAVLAMLRSLDLEGLRSTLAESSDHVEKSPQSLLQDMLATGGFLQGDEADCY

SEQ ID NO: 11840 - protein, 286 aa, Homo sapiens
MDPECAQLLPALCAVLVDPRQPVADDTCLEKLLDWFKTVTEGESSVVLLQEHPCLVELLSHVLKVQDLSSGVLSFSLRLAGTFAAQENCFQYLQQGELLPGLFGEPGPLGRATWAVPTVRSGWIQGLRSLAQHPSALRFLADHGAVDTIFSLQGDSSLFVASAASQLLVHVLALSMRGGAEGQPCLPGGDWPACAQKIMDHVEESLCSAATPKVTQALNVLTTTFGRCQSPWTEALWVRLSPRVACLLERDPIPAAHSFVDLLLCVARSGPRDAAGGPGWATVFLG

SEQ ID NO: 11841 - protein, 291 aa, Homo sapiens
MGKLRIGGPCAHCAAWEGVRAGCGPRLHVRGQPPSCTGVLLREPRSCHPTNHPHLLPVPQSLFLELLHILSVDSEGFPRRAVMQVFTEWLRDGHADAAQDTEQFVATVLQAASRDLDWEVRAQGLELALVFLGQTLGPPRTHCPYAVALPEVAPAQPLTEALRALCHVGLFDFAFCALFDCDRPVAQKSCDLLLFLRDKIASYSSLREARGSPNTASAEATLPRWRAGEQAQPPGDQEPEAVLAMLRSLDLEGLRSTLAESSDHVEKSPQSLLQDMLATGGFLQGDEADCY

SEQ ID NO: 11842 - protein, 142 aa, Homo sapiens
MCRCSLVLLSVDHEVPFSSFFIGWRTEGRAWRAGRPDMADGSGWQPPRPCEAYRAEWKLCRSARHFLHHYYVHGERPACEQWQRDLASCRDWEERRNAEAQQSLCESERARVRAARKHILVWAPRQSPPPDWHLPLPQEKDE

SEQ ID NO: 11843 - protein, 117 aa, Homo sapiens
MCRCSLVLLSVDHEVPFSSFFIGWRTEGRAWRAGRPDMADGSGWQPPRPCEAYRAEWKLCRSARHFLHHYYVHGERPACEQWQRDLASCRDWEERRNAEAQVLSVVAHTCNLSYLGG

SEQ ID NO: 11844 - protein, 1849 aa, Homo sapiens
MAVSRLDRLFILLDTGTTPVTRKAAAQQLGEVVKLHPHELNNLLSKVLIYLRSANWDTRIAAGQAVEAIVKNVPEWNPVPRTRQEPTSESSMEDSPTTERLNFDRFDICRLLQHGASLLGSAGAEFEVQDEKSGEVDPKERIARQRKLLQKKLGLNMGEAIGMSTEELFNDEDLDYTPTSASFVNKQPTLQAAELIDSEFRAGMSNRQKNKAKRMAKLFAKQRSRDAVETNEKSNDSTDGEPEEKRRKIANVVINQSANDSKVLIDNIPDSSSLIEETNEWPLESFCEELCNDLFNPSWEVRHGAGTGLREILKAHGKSGGKMGDSTLEEMIQQHQEWLEDLVIRLLCVFALDRFGDFVSDEVVAPVRETCAQTLGVVLKHMNETGVHKTVDVLLKLLTQEQWEVRHGGLLGIKYALAVRQDVINTLLPKVLTRIIEGLQDLDDDVRAVAAASLVPVVESLVYLQTQKVPFIINTLWDALLELDDLTASTNSIMTLLSSLLTYPQVQQCSIQQSLTVLVPRVWPFLHHTISSVRRAALETLFTLLSTQDQNSSSWLIPILPDMLRHIFQFCVLESSQEILDLIHKVWMELLSKASVQYVVAAACPWMGAWLCLMMQPSHLPIDLNMLLEVKARAKEKTGGKVRQGQSQNKEVLQEYIAGADTIMEDPATRDFVVMRARMMAAKLLGALCCCICDPGVNVVTQEIKPAESLGQLLLFHLNSKSALQRISVALVICEWAALQKECKAVTLAVQPRLLDILSEHLYYDEIAVPFTRMQNECKQLISSLADVHIEVGNRVNNNVLTIDQASDLVTTVFNEATSSFDLNPQVLQQLDSKRQQVQMTVTETNQEWQVLQLRVHTFAACAVVSLQQLPEKLNPIIKPLMETIKKEENTLVQNYAAQCIAKLLQQCTTRTPCPNSKIIKNLCSSLCVDPYLTPCVTCPVPTQSGQENSKGSTSEKDGMHHTVTKHRGIITLYRHQKAAFAITSRRGPTPKAVKAQIADLPAGSSGNILVELDEAQKPYLVQRRGAEFALTTIVKHFGGEMAVKLPHLWDAMVGPLRNTIDINNFDGKSLLDKGDSPAQELVNSLQVFETAAASMDSELHPLLVQHLPHLYMCLQYPSTAVRHMAARCVGVMSKIATMETMNIFLEKVLPWLGAIDDSVKQEGAIEALACVMEQLDVGIVPYIVLLVVPVLGRMSDQTDSVRFMATQCFATLIRLMPLEAGIPDPPNMSAELIQLKAKERHFLEQLLDGKKLENYKIPVPINAELRKYQQDGVNWLAFLNKYKLHGILCDDMGLGKTLQSICILAGDHCHRAQEYARSKLAECMPLPSLVVCPPTLTGHWVDEVGKFCSREYLNPLHYTGPPTERIRLQHQVKRHNLIVASYDVVRNDIDFFRNIKFNYCILDEGHVIKNGKTKLSKAVKQLTANYRIILSGTPIQNNVLELWSLFDFLMPGFLGTERQFAARYGKPILASRDARSSSREQEAGVLAMDALHRQVLPFLLRRMKEDVLQDLPPKIIQDYYCTLSPLQVQLYEDFAKSRAKCDVDETVSSATLSEETEKPKLKATGHVFQALQYLRKLCNHPALVLTPQHPEFKTTAEKLAVQNSSLHDIQHAPKLSALKQLLLDCGLGNGSTSESGTESVVAQHRILIFCQLKSMLDIVEHDLLKPHLPSVTYLRLDGSIPPGQRHSIVSRFNNDPSIDVLLLTTHVGGLGLNLTGADTVVFVEHDWNPMRDLQAMDRAHRIGQKRVVNVYRLITRGTLEEKIMGLQKFKMNIANTVISQENSSLQSMGTDQLLDLFTLDKDGKAEKADTSTSGKASMKSILENLSDLWDQEQYDSEYSLENFMHSLK

SEQ ID NO: 11845 - protein, 677 aa, Homo sapiens
MEQLDVGIVPYIVLLVVPVLGRMSDQTDSVRFMATQCFATLIRLMPLEAGIPDPPNMSAELIQLKAKERHFLEQLLDGKKLENYKIPVPINAELRKYQQDGVNWLAFLNKYKLHGILCDDMGLGKTLQSICILAGDHCHRAQEYARSKLAECMPLPSLVVCPPTLTGHWVDEVGKFCSREYLNPLHYTGPPTERIRLQHQVKRHNLIVASYDVVRNDIDFFRNIKFNYCILDEGHVIKNGKTKLSKAVKQLTANYRIILSGTPIQNNVLELWSLFDFLMPGFLGTERQFAARYGKPILASRDARSSSREQEAGVLAMDALHRQVLPFLLRRMKEDVLQDLPPKIIQDYYCTLSPLQVQLYEDFAKSRAKCDVDETVSSATLSEETEKPKLKATGHVFQALQYLRKLCNHPALVLTPQHPEFKTTAEKLAVQNSSLHDIQHAPKLSALKQLLLDCGLGNGSTSESGTESVVAQHRILIFCQLKSMLDIVEHDLLKPHLPSVTYLRLDGSIPPGQRHSIVSRFNNDPSIDVLLLTTHVGGLGLNLTGADTVVFVEHDWNPMRDLQAMDRAHRIGQKRVVNVYRLITRGTLEEKIMGLQKFKMNIANTVISQENSSLQSMGTDQLLDLFTLDKDGKAEKADTSTSGKASMKSILENLSDLWDQEQYDSEYSLENFMHSLK

SEQ ID NO: 11846 - protein, 482 aa, Homo sapiens
MASLGPAAAGEQASGAEAEPGPAGPPPPPSPSSLGPLLPLQREPLYNWQATKASLKERFAFLFNSELLSDVRFVLGKGRGAAAAGGPQRIPAHRFVLAAGSAVFDAMFNGGMATTSAEIELPDVEPAAFLALLRFLYSDEVQIGPETVMTTLYTAKKYAVPALEAHCVEFLTKHLRADNAFMLLTQARLFDEPQLASLCLDTIDKSTMDAISAEGFTDIDIDTLCAVLERDTLSIRESRLFGAVVRWAEAECQRQQLPVTFGNKQKVLGKALSLIRFPLMTIEEFAAGPAQSGILSDREVVNLFLHFTVNPKPRVEYIDRPRCCLRGKECCINRFQQVESRWGYSGTSDRIRFTVNRRISIVGFGLYGSIHGPTDYQVNIQIIEYEKKQTLGQNDTGFSCDGTANTFRVMFKEPIEILPNVCYTACATLKGPDSHYGTKGLKKVVHETPAASKTVFFFFSSPGNNNGTSIEDGQIPEIIFYT

SEQ ID NO: 11847 - protein, 385 aa, Homo sapiens
MASLGPAAAGEQASGAEAEPGPAGPPPPPSPSSLGPLLPLQREPLYNWQATKASLKERFAFLFNSELLSDVRFVLGKGRGAAAAGGPQRIPAHRFVLAAGSAVFDAMFNGGMATTSAEIELPDVEPAAFLALLRFLYSDEVQIGPETVMTTLYTAKKYAVPALEAHCVEFLTKHLRADNAFMLLTQARLFDEPQLASLCLDTIDKSTMDAISAEGFTDIDIDTLCAVLERDTLSIRESRLFGAVVRWAEAECQRQQLPVTFGNKQKVLGKALSLIRFPLMTIEEFAAGPAQSGILSDREVVNLFLHFTVNPKPRVEYIDRPRCCLRGKECCINRFQQVESRWGYSGTSDRIRSLNMRKSKPWDRMIPALVVMGQLTHSGSCSRNP

SEQ ID NO: 11848 - protein, 331 aa, Homo sapiens
MASALWTVLPSRMSLRSLKWSLLLLSLLSFFVMWYLSLPHYNVIERVNWMYFYEYEPIYRQDFHFTLREHSNCSHQNPFLVILVTSHPSDVKARQAIRVTWGEKKSWWGYEVLTFFLLGQEAEKEDKMLALSLEDEHLLYGDIIRQDFLDTYNNLTLKTIMAFRWVTEFCPNAKYVMKTDTDVFINTGNLVKYLLNLNHSEKFFTGYPLIDNYSYRGFYQKTHISYQEYPFKVFPPYCSGLGYIMSRDLVPRIYEMMGHVKPIKFEDVYVGICLNLLKVNIHIPEDTNLFFLYRIHLDVCQLRRVIAAHGFSSKEIITFWQVMLRNTTCHY

SEQ ID NO: 11849 - protein, 500 aa, Homo sapiens
MRNWLVLLCPCVLGAALHLWLRLRSPPPACASGAGPADQLALFPQWKSTHYDVVVGVLSARNNHELRNVIRSTWMRHLLQHPTLSQRVLVKFIIGAHGCEVPVEDREDPYSCKLLNITNPVLNQEIEAFSLSEDTSSGLPEDRVVSVSFRVLYPIVITSLGVFYDANDVGFQRNITVKLYQAEQEEALFIARFSPPSCGVQVNKLWYKPVEQFILPESFEGTIVWESQDLHGLVSRNLHKVTVNDGGGVLRVITAGEGALPHEFLEGVEGVAGGFIYTIQEGDALLHNLHSRPQRLIDHIRNLHEEDALLKEESSIYDDIVFVDVVDTYRNVPAKLLNFYRWTVETTSFNLLLKTDDDCYIDLEAVFNRIVQKNLDGPNFWWGNFRLNWAVDRTGKWQELEYPSPAYPAFACGSGYVISKDIVKWLASNSGRLKTYQGEDVSMGIWMAAIGPKRYQDSLWLCEKTCETGMLSSPQYSPWELTELWKLKERCGDPCRCQAR

SEQ ID NO: 11850 - protein, 326 aa, Homo sapiens
MRNWLVLLCPCVLGAALHLWLRLRSPPPACASGAGPAGGVSLLLPRLECNGAVSAHPNLHLPGSRDSPASASQVAGITDQLALFPQWKSTHYDVVVGVLSARNNHELRNVIRSTWMRHLLQHPTLSQRVLVKFIIGAHGCEVPVEDREDPYSCKLLNITNPVLNQEIEAFSLSEDTSSGLPEDRVVSVSFRVLYPIVITSLGVFYDANDVGFQRNITVKLYQAEQEEALFIARFSPPSCGVQVNKLWYKPVEQFILPESFEGTIVWESQDLHGLVSRNLHKVTVNDGGGVLRVITAGEGALPHEFLEGVEGVAGGFIYTIQGKFAS

SEQ ID NO: 11851 - protein, 475 aa, Homo sapiens
MAGRPHPYDGNSSDPENWDRKLHSRPRKLYKHSSTSSRIAKGGVDHTKMSLHGASGGHERSRDRRRSSDRSRDSSHERTESQLTPCIRNVTSPTRQHHVEREKDHSSSRPSSPRPQKASPNGSISSAGNSSRNSSQSSSDGSCKTAGEMVFVYENAKEGARNIRTSERVTLIVDNTRFVVDPSIFTAQPNTMLGRMFGSGREHNFTRPNEKGEYEVAEGIGSTVFRAILDYYKTGIIRCPDGISIPELREACDYLCISFEYSTIKCRDLSALMHELSNDGARRQFEFYLEEMILPLMVASAQSGERECHIVVLTDDDVVDWDEEYPPQMGEEYSQIIYSTKLYRFFKYIENRDVAKSVLKERGLKKIRLGIEGYPTYKEKVKKRPGGRPEVIYNYVQRPFIRMSWEKEEGKSRHVDFQCVKSKSITNLAAAAADIPQDQLVVMHPTPQVDELDILPIHPPSGNSDLDPDAQNPML

SEQ ID NO: 11852 - protein, 483 aa, Homo sapiens
MPKDADLAFSASLFERAESLYTLISKFFSCFCVSTLAYTKGSTSSRIAKGGVDHTKMSLHGASGGHERSRDRRRSSDRSRDSSHERTESQLTPCIRNVTSPTRQHHVEREKDHSSSRPSSPRPQKASPNGSISSAGNSSRNSSQSSSDGSCKTAGEMVFVYENAKEGARNIRTSERVTLIVDNTRFVVDPSIFTAQPNTMLGRMFGSGREHNFTRPNEKGEYEVAEGIGSTVFRAILDYYKTGIIRCPDGISIPELREACDYLCISFEYSTIKCRDLSALMHELSNDGARRQFEFYLEEMILPLMVASAQSGERECHIVVLTDDDVVDWDEEYPPQMGEEYSQIIYSTKLYRFFKYIENRDVAKSVLKERGLKKIRLGIEGYPTYKEKVKKRPGGRPEVIYNYVQRPFIRMSWEKEEGKSRHVDFQCVKSKSITNLAAAAADIPQDQLVVMHPTPQVDELDILPIHPPSGNSDLDPDAQNPML

SEQ ID NO: 11853 - protein, 478 aa, Homo sapiens
MPRRGYSKPGSWGSFWAMLTLVGLVTHAAQRADVGGEAAGTSINHSQAVLQRLQELLRQGNASDVVLRVQAAGTDEVRVFHAHRLLLGLHSELFLELLSNQSEAVLQEPQDCAAVFDKFIRYLYCGELTVLLTQAIPLHRLATKYGVSSLQRGVADYMRAHLAGGAGPAVGWYHYAVGTGDEALRESCLQFLAWNLSAVAASTEWGAVSPELLWQLLQRSDLVLQDELELFHALEAWLGRARPPPAVAERALRAIRYPMIPPAQLFQLQARSAALARHGPAVADLLLQAYQFHAASPLHYAKFFDVNGSAFLPRNYLAPAWGAPWVINNPARDDRSTSFQTQLGPSGHDAGRRVTWNVLFSPRWLPVSLRPVYADAAGTALPAARPEDGRPRLVVTPASSGGDAAGVSFQKTVLVGARQQGRLLVRHAYSFHQSSEEAGDFLAHADLQRRNSEYLVENALHLHLIVKPVYHTLIRTPK

SEQ ID NO: 11854 - protein, 384 aa, Homo sapiens
MAFPCRRSLTAKTLACLLVGVSFLALQQWFLQAPRSPREERSPQEETPEGPTDAPAADEPPSELVPGPPCVANASANATADFEQLPARIQDFLRYRHCRHFPLLWDAPAKCAGGRGVFLLLAVKSAPEHYERRELIRRTWGQERSYGGRPVRRLFLLGTPGPEDEARAERLAELVALEAREHGDVLQWAFADTFLNLTLKHLHLLDWLAARCPHARFLLSGDDDVFVHTANVVRFLQAQPPGRHLFSGQLMEGSVPIRDSWSKYFVPPQLFPGSAYPVYCSGGGFLLSGPTARALRAAARHTPLFPIDDAYMGMCLERAGLAPSGHEGIRPFGVQLPGAQQSSFDPCMYRELLLVHRFAPYEMLLMWKALHSPALSCDRGHRVS

SEQ ID NO: 11855 - protein, 264 aa, Homo sapiens
MAFPCRRSLTAKTLACLLVGVSFLVLQRRRLPPVRPHGPGPARGRPPHPALPHRRRLHGRPVRRLFLLGTPGPEDEARAERLAELVALEAREHGDVLQWAFADTFLNLTLKHLHLLDWLAARCPHARFLLSGDDDVFVHTANVVRFLQAQPPGRHLFSGQLMEGSVPIRDSWSKYFVPPQLFPGSAYPVYCSGGGFLLSGLAPSGHEGIRPFGVQLPGAQQSSFDPCMYRELLLVHRFAPYEMLLMWKALHSPALSCDRGHRVS

SEQ ID NO: 11856 - protein, 385 aa, Homo sapiens
MAFPCRRSLTAKTLACLLVGVSFLALQQWFLQAPRSPREERSPQEETPEGPTDAPAADEPPSELVPGPPCVANASANATADFEQLPARIQDFLRYRHCRHFPLLWDAPAKCAGGRGVFLLLAVKSAPEHYERRELIRRTWGQERSYGGRPVRRLFLLGTPGPEDEARAERLAELVALEAREHGDVLQWAFADTFLNLTLKHLHLLDWLAARCPHARFLLSGDDDVFVHTANVVRFLQAQPPGRHLFSGQLMEGSVPIRDSWSKYFVPPQLFPGSAYPVYCSGGGFLLSGPTARALRAAARHTPLFPIDDAYMGMCLGARRPGAQRPRGHPGPSACSLPGAQQSSFDPCMYRELLLVHRFAPYEMLLMWKALHSPALSCDRGHRVS

SEQ ID NO: 11857 - protein, 801 aa, Homo sapiens
MLQNVTPHNKLPGEGNAGLLGLGPEAAAPGKRIRKPSLLYEGFESPTMASVPALQLTPANPPPPEVSNPKKPGRVTNQLQYLHKVVMKALWKHQFAWPFRQPVDAVKLGLPDYHKIIKQPMDMGTIKRRLENNYYWAASECMQDFNTMFTNCYIYNKPTDDIVLMAQTLEKIFLQKVASMPQEEQELVVTIPKNSHKKGAKLAALQGSVTSAHQVPAVSSVSHTALYTPPPEIPTTVLNIPHPSVISSPLLKSLHSAGPPLLAVTAAPPAQPLAKKKGVKRKADTTTPTPTAILAPGSPASPPGSLEPKAARLPPMRRESGRPIKPPRKDLPDSQQQHQSSKKGKLSEQLKHCNGILKELLSKKHAAYAWPFYKPVDASALGLHDYHDIIKHPMDLSTVKRKMENRDYRDAQEFAADVRLMFSNCYKYNPPDHDVVAMARKLQDVFEFRYAKMPDEPLEPGPLPVSTAMPPGLAKSSSESSSEESSSESSSEEEEEEDEEDEEEEESESSDSEEERAHRLAELQEQLRAVHEQLAALSQGPISKPKRKREKKEKKKKRKAEKHRGRAGADEDDKGPRAPRPPQPKKSKKASGSGGGSAALGPSGFGPSGGSGTKLPKKATKTAPPALPTGYDSEEEEESRPMSYDEKRQLSLDINKLPGEKLGRVVHIIQAREPSLRDSNPEEIEIDFETLKPSTLRELERYVLSCLRKKPRKPYTIKKPVGKTKEELALEKKRELEKRLQDVSGQLNSTKKPPKKANEKTESSSAQQVAVSRLSASSSSSDSSSSSSSSSSSDTSDSDSG

SEQ ID NO: 11858 - protein, 836 aa, Homo sapiens
MLQNVTPHNKLPGEGNAGLLGLGPEAAAPGKRIRKPSLLYEGFESPTMASVPALQLTPANPPPPEVSNPKKPGRVTNQLQYLHKVVMKALWKHQFAWPFRQPVDAVKLGLPDYHKIIKQPMDMGTIKRRLENNYYWAASECMQDFNTMFTNCYIYNKPTDDIVLMAQTLEKIFLQKVASMPQEEQELVVTIPKNSHKKGAKLAALQGSVTSAHQVPAVSSVSHTALYTPPPEIPTTVLNIPHPSVISSPLLKSLHSAGPPLLAVTAAPPAQPLAKKKGVKRKADTTTPTPTAILAPGSPASPPGSLEPKAARLPPMRRESGRPIKPPRKDLPDSQQQHQSSKKGKLSEQLKHCNGILKELLSKKHAAYAWPFYKPVDASALGLHDYHDIIKHPMDLSTVKRKMENRDYRDAQEFAADVRLMFSNCYKYNPPDHDVVAMARKLQDVFEFRYAKMPDEPLEPGPLPVSTAMPPGLAKSSSESSSEESSSESSSEEEEEEDEEDEEEEESESSDSEEERAHRLAELQEQLRAVHEQLAALSQGPISKPKRKREKKEKKKKRKAEKHRGRAGADEDDKGPRAPRPPQPKKSKKASGSGGGSAALGPSGFGPSGGSGTKLQAGVQWRDLGLLQPPLLGFKRFSCLSLPSSQDYRLPKKATKTAPPALPTGYDSEEEEESRPMSYDEKRQLSLDINKLPGEKLGRVVHIIQAREPSLRDSNPEEIEIDFETLKPSTLRELERYVLSCLRKKPRKPYTIKKPVGKTKEELALEKKRELEKRLQDVSGQLNSTKKPPKKANEKTESSSAQQVAVSRLSASSSSSDSSSSSSSSSSSDTSDSDSG

SEQ ID NO: 11859 - protein, 754 aa, Homo sapiens
MASVPALQLTPANPPPPEVSNPKKPGRVTNQLQYLHKVVMKALWKHQFAWPFRQPVDAVKLGLPDYHKIIKQPMDMGTIKRRLENNYYWAASECMQDFNTMFTNCYIYNKPTDDIVLMAQTLEKIFLQKVASMPQEEQELVVTIPKNSHKKGAKLAALQGSVTSAHQVPAVSSVSHTALYTPPPEIPTTVLNIPHPSVISSPLLKSLHSAGPPLLAVTAAPPAQPLAKKKGVKRKADTTTPTPTAILAPGSPASPPGSLEPKAARLPPMRRESGRPIKPPRKDLPDSQQQHQSSKKGKLSEQLKHCNGILKELLSKKHAAYAWPFYKPVDASALGLHDYHDIIKHPMDLSTVKRKMENRDYRDAQEFAADVRLMFSNCYKYNPPDHDVVAMARKLQDVFEFRYAKMPDEPLEPGPLPVSTAMPPGLAKSSSESSSEESSSESSSEEEEEEDEEDEEEEESESSDSEEERAHRLAELQEQLRAVHEQLAALSQGPISKPKRKREKKEKKKKRKAEKHRGRAGADEDDKGPRAPRPPQPKKSKKASGSGGGSAALGPSGFGPSGGSGTKLPKKATKTAPPALPTGYDSEEEEESRPMSYDEKRQLSLDINKLPGEKLGRVVHIIQAREPSLRDSNPEEIEIDFETLKPSTLRELERYVLSCLRKKPRKPYTIKKPVGKTKEELALEKKRELEKRLQDVSGQLNSTKKPPKKANEKTESSSAQQVAVSRLSASSSSSDSSSSSSSSSSSDTSDSDSG

SEQ ID NO: 11860 - protein, 681 aa, Homo sapiens
MDMGTIKRRLENNYYWAASECMQDFNTMFTNCYIYNKPTDDIVLMAQTLEKIFLQKVASMPQEEQELVVTIPKNSHKKGAKLAALQGSVTSAHQVPAVSSVSHTALYTPPPEIPTTVLNIPHPSVISSPLLKSLHSAGPPLLAVTAAPPAQPLAKKKGVKRKADTTTPTPTAILAPGSPASPPGSLEPKAARLPPMRRESGRPIKPPRKDLPDSQQQHQSSKKGKLSEQLKHCNGILKELLSKKHAAYAWPFYKPVDASALGLHDYHDIIKHPMDLSTVKRKMENRDYRDAQEFAADVRLMFSNCYKYNPPDHDVVAMARKLQDVFEFRYAKMPDEPLEPGPLPVSTAMPPGLAKSSSESSSEESSSESSSEEEEEEDEEDEEEEESESSDSEEERAHRLAELQEQLRAVHEQLAALSQGPISKPKRKREKKEKKKKRKAEKHRGRAGADEDDKGPRAPRPPQPKKSKKASGSGGGSAALGPSGFGPSGGSGTKLPKKATKTAPPALPTGYDSEEEEESRPMSYDEKRQLSLDINKLPGEKLGRVVHIIQAREPSLRDSNPEEIEIDFETLKPSTLRELERYVLSCLRKKPRKPYTIKKPVGKTKEELALEKKRELEKRLQDVSGQLNSTKKPPKKANEKTESSSAQQVAVSRLSASSSSSDSSSSSSSSSSSDTSDSDSG

SEQ ID NO: 11861 - protein, 651 aa, Homo sapiens
MGKKHKKHKSDKHLYEEYVEKPLKLVLKVGGNEVTELSTGSSGHDSSLFEDKNDHDKHKDRKRKKRKKGEKQIPGEEKGRKRRRVKEDKKKRDRDRVENEAEKDLQCHAPVRLDLPPEKPLTSSLAKQEEVEQTPLQEALNQLMRQLQRKDPSAFFSFPVTDFIAPGYSMIIKHPMDFSTMKEKIKNNDYQSIEELKDNFKLMCTNAMIYNKPETIYYKAAKKLLHSGMKILSQERIQSLKQSIDFMADLQKTRKQKDGTDTSQSGEDGGCWQREREDSGDAEAHAFKSPSKENKKKDKDMLEDKFKSNNLEREQEQLDRIVKESGGKLTRRLVNSQCEFERRKPDGTTTLGLLHPVDPIVGEPGYCPVRLGMTTGRLQSGVNTLQGFKEDKRNKVTPVLYLNYGPYSSYAPHYDSTFANISKDDSDLIYSTYGEDSDLPSDFSIHEFLATCQDYPYVMADSLLDVLTKGGHSRTLQEMEMSLPEDEGHTRTLDTAKEMEITEVEPPGRLDSSTQDRLIALKAVTNFGVPVEVFDSEEAEIFQKKLDETTRLLRELQEAQNERLSTRPPPNMICLLGPSYREMHLAEQVTNNLKELAQQVTPGDIVSTYGVRKAMGISIPSPVMENNFVDLTEDTEEPKKTDVAECGPGGS

SEQ ID NO: 11862 - protein, 652 aa, Homo sapiens
MGKKHKKHKSDKHLYEEYVEKPLKLVLKVGGNEVTELSTGSSGHDSSLFEDKNDHDKHKDRKRKKRKKGEKQIPGEEKGRKRRRVKEDKKKRDRDRVENEAEKDLQCHAPVRLDLPPEKPLTSSLAKQEEVEQTPLQEALNQLMRQLQRKDPSAFFSFPVTDFIAPGYSMIIKHPMDFSTMKEKIKNNDYQSIEELKDNFKLMCTNAMIYNKPETIYYKAAKKLLHSGMKILSQERIQSLKQSIDFMADLQKTRKQKDGTDTSQSGEDGGCWQREREDSGDAEAHAFKSPSKENKKKDKDMLEDKFKSNNLEREQEQLDRIVKESGGKLTRRLVNSQCEFERRKPDGTTTLGLLHPVDPIVGEPGYCPVRLGMTTGRLQSGVNTLQGFKEDKRNKVTPVLYLNYGPYSSYAPHYDSTFANISKDDSDLIYSTYGEDSDLPSDFSIHEFLATCQDYPYVMADSLLDVLTKGGHSRTLQEMEMSLPEDEGHTRTLDTAKEMEQITEVEPPGRLDSSTQDRLIALKAVTNFGVPVEVFDSEEAEIFQKKLDETTRLLRELQEAQNERLSTRPPPNMICLLGPSYREMHLAEQVTNNLKELAQQVTPGDIVSTYGVRKAMGISIPSPVMENNFVDLTEDTEEPKKTDVAECGPGGS

SEQ ID NO: 11863 - protein, 192 aa, Homo sapiens
MDGSGEQPRGGGPTSSEQIMKTGALLLQGFIQDRAGRMGGEAPELALDPVPQDASTKKLSECLKRIGDELDSNMELQRMIAAVDTDSPREVFFRVAADMFSDGNFNWGRVVALFYFASKLVLKALCTKVPELIRTIMGWTLDFLRERLLGWIQDQGGWDGLLSYFGTPTWQTVTIFVAGVLTASLTIWKKMG

SEQ ID NO: 11864 - protein, 218 aa, Homo sapiens
MDGSGEQPRGGGPTSSEQIMKTGALLLQGFIQDRAGRMGGEAPELALDPVPQDASTKKLSECLKRIGDELDSNMELQRMIAAVDTDSPREVFFRVAADMFSDGNFNWGRVVALFYFASKLVLKALCTKVPELIRTIMGWTLDFLRERLLGWIQDQGGWVRLLKPPHPHHRALTTAPAPPSLPPATPLGPWAFWSRSQWCPLPIFRSSDVVYNAFSLRV

SEQ ID NO: 11865 - protein, 41 aa, Homo sapiens
MDGSGEQPRGGVSSRIEQGEWGGRHPSWPWTRCLRMRPPRS

SEQ ID NO: 11866 - protein, 143 aa, Homo sapiens
MDGSGEQPRGGGPTSSEQIMKTGALLLQGMIAAVDTDSPREVFFRVAADMFSDGNFNWGRVVALFYFASKLVLKALCTKVPELIRTIMGWTLDFLRERLLGWIQDQGGWDGLLSYFGTPTWQTVTIFVAGVLTASLTIWKKMG

SEQ ID NO: 11867 - protein, 164 aa, Homo sapiens
MDGSGEQPRGGGPTSSEQIMKTGALLLQGFIQDRAGRMGGEAPELALDPVPQDASTKKLSECLKRIGDELDSNMELQRMIAAVDTDSPREVFFRVAADMFSDGNFNWGRVVALFYFASKLVLKAGVKWRDLGSLQPLPPGFKRFTCLSIPRSWDYRPCAPRCRN

SEQ ID NO: 11868 - protein, 114 aa, Homo sapiens
MIAAVDTDSPREVFFRVAADMFSDGNFNWGRVVALFYFASKLVLKALCTKVPELIRTIMGWTLDFLRERLLGWIQDQGGWDGLLSYFGTPTWQTVTIFVAGVLTASLTIWKKMG

SEQ ID NO: 11869 - protein, 173 aa, Homo sapiens
MKTGALLLQGFIQDRAGRMGGEAPELALDPVPQDASTKKLSECLKRIGDELDSNMELQRMIAAVDTDSPREVFFRVAADMFSDGNFNWGRVVALFYFASKLVLKALCTKVPELIRTIMGWTLDFLRERLLGWIQDQGGWDGLLSYFGTPTWQTVTIFVAGVLTASLTIWKKMG

SEQ ID NO: 11870 - protein, 179 aa, Homo sapiens
MDGSGEQPRGGGPTSSEQIMKTGALLLQGFIQDRAGRMGGEAPELALDPVPQDASTKKLSECLKRIGDELDSNMELQRMIAAVDTDSPREVFFRVAADMFSDGNFNWGRVVALFYFASKLVLKALCTKVPELIRTIMGWTLDFLRERLLGWIQDQGGWTVTIFVAGVLTASLTIWKKMG

SEQ ID NO: 11871 - protein, 1039 aa, Homo sapiens
MPRLPVKKIRKQMKLLLLLLLLSCAAWLTYVHLGLVRQGRALRQRLGYGRDGEKLTSETDGRGVHAAPSTQRAEDSSESREEEQAPEGRDLDMLFPGGAGRLPLNFTHQTPPWREEYKGQVNLHVFEDWCGGAVGHLRRNLHFPLFPHTRTTVKKLAVSPKWKNYGLRIFGFIHPARDGDVQFSVASDDNSEFWLSLDESPAAAQLVAFVGKTGSEWTAPGEFTKFSSQVSKPRRLMASRRYYFELLHKQDDRGSDHVEVGWRAFLPGLKFEVISSAHISLYTDESALKMDHVAHVPQSPASHVGGRPPQEETSADMLRPDPRDTFFLTPRMESSSLENVLEPCAYAPTYVVKDFPIARYQGLQFVYLSFVYPNDYTRLTHMETDNKCFYRESPLYLERFGFYKYMKMDKEEGDEDEEDEVQRRAFLFLNPDDFLDDEDEGELLDSLEPTEAAPPRSGPQSPAPAAPAQPGATLAPPTPPRPRDGGTPRHSRALSWAARAARPLPLFLGRAPPPRPAVEQPPPKVYVTRVRPGQRASPRAPAPRAPWPPFPGVFLHPRPLPRVQLRAPPRPPRPHGRRTGGPQATQPRPPARAQATQGGREGQARTLGPAAPTVDSNLSSEARPVTSFLSLSQVSGPQLPGEGEEEEEGEDDGAPGDEAASEDSEEAAGPALGRWREDAIDWQRTFSVGAVDFELLRSDWNDLRCNVSGNLQLPEAEAVDVTAQYMERLNARHGGRFALLRIVNVEKRRDSARGSRFLLELELQERGGGRLRLSEYVFLRLPGARVGDADGESPEPAPAASVRPDGRPELCRPLRLAWRQDVMVHFIVPVKNQARWVAQFLADMAALHARTGDSRFSVVLVDFESEDMDVERALRAARLPRYQYLRRTGNFERSAGLQAGVDAVEDASSIVFLCDLHIHFPPNILDGIRKHCVEGRLAFAPVVMRLSCGSSPRDPHGYWEVNGFGLFGIYKSDFDRVGGMNTEEFRDQWGGEDWELLDRVLQAGLEVERLRLRNFYHHYHSKRGMWSVRSRKGSRTGAS

SEQ ID NO: 11872 - protein, 657 aa, Homo sapiens
MGCCSSASSAAQSSKREWKPLEDRSCTDIPWLLLFILFCIGMGFICGFSIATGAAARLVSGYDSYGNICGQKNTKLEAIPNSGMDHTQRKYVFFLDPCNLDLINRKIKSVALCVAACPRQELKTLSDVQKFAEINGSALCSYNLKPSEYTTSPKSSVLCPKLPVPASAPIPFFHRCAPVNISCYAKFAEALITFVSDNSVLHRLISGVMTSKEIILGLCLLSLVLSMILMVIIRYISRVLVWILTILVILGSLGGTGVLWWLYAKQRRSPKETVTPEQLQIAEDNLRALLIYAISATVFTVILFLIMLVMRKRVALTIALFHVAGKVFIHLPLLVFQPFWTFFALVLFWVYWIMTLLFLGTTGSPVQNEQGFVEFKISGPLQYMWWYHVVGLIWISEFILACQQMTVAGAVVTYYFTRDKRNLPFTPILASVNRLIRYHLGTVAKGSFIITLVKIPRMILMYIHSQLKGKENACARCVLKSCICCLWCLEKCLNYLNQNAYTATAINSTNFCTSAKDAFVILVENALRVATINTVGDFMLFLGKVLIVCSTGLAGIMLLNYQQDYTVWVLPLIIVCLFAFLVAHCFLSIYEMVVDVLFLCFAIDTKYNDGSPGREFYMDKVLMEFVENSRKAMKEAGKGGVADSRELKPMASGASSA

SEQ ID NO: 11873 - protein, 654 aa, Homo sapiens
MGCCSSASSAAQSSKREWKPLEDRSCTDIPWLLLFILFCIGMGFICGFSIATGAAARLVSGYDSYGNICGQKNTKLEAIPNSGMDHTQRKYVFFLDPCNLDLINRKIKSVALCVAACPRQELKTLSDVQKFAEINGSALCSYNLKPSEYTTSPKSSVLCPKLPVPASAPIPFFHRCAPVNISCYAKFAEALITFVSDNSVLHRLISGVMTSKEIILGLCLLSLVLSMILMVIIRYISRVLVWILTILVILGSLGGTGVLWWLYAKQRRSPKETVTPEQLQIAEDNLRALLIYAISATVFTVILFLIMLVMRKRVALTIALFHVAGKVFIHLPLLVFQPFWTFFALVLFWVYWIMTLLFLGTTGSPVQNEQGFVEFKISGPLQYMWWYHVVGLIWISEFILACQQMTVAGAVVTYYFTRDKRNLPFTPILASVNRLIRYHLGTVAKGSFIITLVKIPRMILMYIHSQLKGKENACARCVLKSCICCLWCLEKCLNYLNQNAYTATAINSTNFCTSAKDAFVILVENALRVATINTVGDFMLFLGKVLIVCSTGLAGIMLLNYQQDYTVWVLPLIIVCLFAFLVAHCFLSIYEMVVDVLFLCFAIDTKYNDGSPGREFYMDKVLMEFVENSRKAMKEAGKGGVADSRELKPMLKKR

SEQ ID NO: 11874 - protein, 652 aa, Homo sapiens
MGCCSSASSAAQSSKREWKPLEDRSCTDIPWLLLFILFCIGMGFICGFSIATGAAARLVSGYDSYGNICGQKNTKLEAIPNSGMDHTQRKYVFFLDPCNLDLINRKIKSVALCVAACPRQELKTLSDVQKFAEINGSALCSYNLKPSEYTTSPKSSVLCPKLPVPASAPIPFFHRCAPVNISCYAKFAEALITFVSDNSVLHRLISGVMTSKEIILGLCLLSLVLSMILMVIIRYISRVLVWILTILVILGSLGGTGVLWWLYAKQRRSPKETVTPEQLQIAEDNLRALLIYAISATVFTVILFLIMLVMRKRVALTIALFHVAGKVFIHLPLLVFQPFWTFFALVLFWVYWIMTLLFLGTTGSPVQNEQGFVEFKISGPLQYMWWYHVVGLIWISEFILACQQMTVAGAVVTYYFTRDKRNLPFTPILASVNRLIRYHLGTVAKGSFIITLVKIPRMILMYIHSQLKGKENACARCVLKSCICCLWCLEKCLNYLNQNAYTATAINSTNFCTSAKDAFVILVENALRVATINTVGDFMLFLGKVLIVCSTGLAGIMLLNYQQDYTVWVLPLIIVCLFAFLVAHCFLSIYEMVVDVLFLCFAIDTKYNDGSPGREFYMDKVLMEFVENSRKAMKEAGKGGVADSRELKPMIK

SEQ ID NO: 11875 - protein, 505 aa, Homo sapiens
MGLVSSKKPDKEKPIKEKDKGQWSPLKVSAQDKDAPPLPPLVVFNHLTPPPPDEHLDEDKHFVVALYDYTAMNDRDLQMLKGEKLQVLKGTGDWWLARSLVTGREGYVPSNFVARVESLEMERWFFRSQGRKEAERQLLAPINKAGSFLIRESETNKGAFSLSVKDVTTQGELIKHYKIRCLDEGGYYISPRITFPSLQALVQHYSKKGDGLCQRLTLPCVRPAPQNPWAQDEWEIPRQSLRLVRKLGSGQFGEVWMGYYKNNMKVAIKTLKEGTMSPEAFLGEANVMKALQHERLVRLYAVVTKEPIYIVTEYMARGCLLDFLKTDEGSRLSLPRLIDMSAQIAEGMAYIERMNSIHRDLRAANILVSEALCCKIADFGLARIIDSEYTAQEGAKFPIKWTAPEAIHFGVFTIKADVWSFGVLLMEVVTYGRVPYPGMSNPEVIRNLERGYRMPRPDTCPPELYRGVIAECWRSRPEERPTFEFLQSVLEDFYTATERQYELQP

SEQ ID NO: 11876 - protein, 604 aa, Homo sapiens
MNIVENSIFLSNLMKSANTFELKYDLSCELYRMSTYSTFPAGVPVSERSLARAGFYYTGVNDKVKCFCCGLMLDNWKRGDSPTEKHKKLYPSCRFVQSLNSVNNLEATSQPTFPSSVTNSTHSLLPGTENSGYFRGSYSNSPSNPVNSRANQDFSALMRSSYHCAMNNENARLLTFQTWPLTFLSPTDLAKAGFYYIGPGDRVACFACGGKLSNWEPKDNAMSEHLRHFPKCPFIENQLQDTSRYTVSNLSMQTHAARFKTFFNWPSSVLVNPEQLASAGFYYVGNSDDVKCFCCDGGLRCWESGDDPWVQHAKWFPRCEYLIRIKGQEFIRQVQASYPHLLEQLLSTSDSPGDENAESSIIHFEPGEDHSEDAIMMNTPVINAAVEMGFSRSLVKQTVQRKILATGENYRLVNDLVLDLLNAEDEIREEERERATEEKESNDLLLIRKNRMALFQHLTCVIPILDSLLTAGIINEQEHDVIKQKTQTSLQARELIDTILVKGNIAATVFRNSLQEAEAVLYEHLFVQQDIKYIPTEDVSDLPVEEQLRRLQEERTCKVCMDKEVSIVFIPCGHLVVCKDCAPSLRKCPICRSTIKGTVRTFLS

SEQ ID NO: 11877 - protein, 209 aa, Homo sapiens
MGGGRGLLGRETLGPGGGCSGEGPLCYWPPPGSPPAPSLRASLPLEPPRCPLRSCSLPRSACLCSRNSAPGSCCRPWASLWSEPPPSPSSQPAPPMYIWTLSCAPAASWAPVTHWTDHPLPPLPSPLLPTRLPDDYIILPTDLRCHSHRHPSHPTDRLLLLVIWTHLGGIWAGHSPWTVIQTAGRPPRDLSPSARPISSPPPETSCVLA

SEQ ID NO: 11878 - protein, 618 aa, Homo sapiens
MHKTASQRLFPGPSYQNIKSIMEDSTILSDWTNSNKQKMKYDFSCELYRMSTYSTFPAGVPVSERSLARAGFYYTGVNDKVKCFCCGLMLDNWKLGDSPIQKHKQLYPSCSFIQNLVSASLGSTSKNTSPMRNSFAHSLSPTLEHSSLFSGSYSSLSPNPLNSRAVEDISSSRTNPYSYAMSTEEARFLTYHMWPLTFLSPSELARAGFYYIGPGDRVACFACGGKLSNWEPKDDAMSEHRRHFPNCPFLENSLETLRFSISNLSMQTHAARMRTFMYWPSSVPVQPEQLASAGFYYVGRNDDVKCFCCDGGLRCWESGDDPWVEHAKWFPRCEFLIRMKGQEFVDEIQGRYPHLLEQLLSTSDTTGEENADPPIIHFGPGESSSEDAVMMNTPVVKSALEMGFNRDLVKQTVQSKILTTGENYKTVNDIVSALLNAEDEKREEEKEKQAEEMASDDLSLIRKNRMALFQQLTCVLPILDNLLKANVINKQEHDIIKQKTQIPLQARELIDTILVKGNAAANIFKNCLKEIDSTLYKNLFVDKNMKYIPTEDVSGLSLEEQLRRLQEERTCKVCMDKEVSVVFIPCGHLVVCQECAPSLRKCPICRGIIKGTVRTFLS

SEQ ID NO: 11879 - protein, 569 aa, Homo sapiens
MSTYSTFPAGVPVSERSLARAGFYYTGVNDKVKCFCCGLMLDNWKLGDSPIQKHKQLYPSCSFIQNLVSASLGSTSKNTSPMRNSFAHSLSPTLEHSSLFSGSYSSLSPNPLNSRAVEDISSSRTNPYSYAMSTEEARFLTYHMWPLTFLSPSELARAGFYYIGPGDRVACFACGGKLSNWEPKDDAMSEHRRHFPNCPFLENSLETLRFSISNLSMQTHAARMRTFMYWPSSVPVQPEQLASAGFYYVGRNDDVKCFCCDGGLRCWESGDDPWVEHAKWFPRCEFLIRMKGQEFVDEIQGRYPHLLEQLLSTSDTTGEENADPPIIHFGPGESSSEDAVMMNTPVVKSALEMGFNRDLVKQTVQSKILTTGENYKTVNDIVSALLNAEDEKREEEKEKQAEEMASDDLSLIRKNRMALFQQLTCVLPILDNLLKANVINKQEHDIIKQKTQIPLQARELIDTILVKGNAAANIFKNCLKEIDSTLYKNLFVDKNMKYIPTEDVSGLSLEEQLRRLQEERTCKVCMDKEVSVVFIPCGHLVVCQECAPSLRKCPICRGIIKGTVRTFLS

SEQ ID NO: 11880 - protein, 419 aa, Homo sapiens
MPGRGRCPDCGSTELVEDSHYSQSQLVCSDCGCVVTEGVLTTTFSDEGNLREVTYSRSTGENEQVSRSQQRGLRRVRDLCRVLQLPPTFEDTAVAYYQQAYRHSGIRAARLQKKEVLVGCCVLITCRQHNWPLTMGAICTLLYADLDVFSSTYMQIVKLLGLDVPSLCLAELVKTYCSSFKLFQASPSVPAKYVEDKEKMLSRTMQLVELANETWLVTGRHPLPVITAATFLAWQSLQPADRLSCSLARFCKLANVDLPYPASSRLQELLAVLLRMAEQLAWLRVLRLDKRSVVKHIGDLLQHRQSLVRSAFRDGTAEVETREKEPPGWGQGQGEGEVGNNSLGLPQGKRPASPALLLPPCMLKSPKRICPVPPVSTVTGDENISDSEIEQYLRTPQEVRDFQRAQAARQAATSVPNPP

SEQ ID NO: 11881 - protein, 396 aa, Homo sapiens
MPGRGRCPDCVVTEGVLTTTFSDEGNLREVTYSRSTGENEQVSRSQQRGLRRVRDLCRVLQLPPTFEDTAVAYYQQAYRHSGIRAARLQKKEVLVGCCVLITCRQHNWPLTMGAICTLLYADLDVFSSTYMQIVKLLGLDVPSLCLAELVKTYCSSFKLFQASPSVPAKYVEDKEKMLSRTMQLVELANETWLVTGRHPLPVITAATFLAWQSLQPADRLSCSLARFCKLANVDLPYPASSRLQELLAVLLRMAEQLAWLRVLRLDKRSVVKHIGDLLQHRQSLVRSAFRDGTAEVETREKEPPGWGQGQGEGEVGNNSLGLPQGKRPASPALLLPPCMLKSPKRICPVPPVSTVTGDENISDSEIEQYLRTPQEVRDFQRAQAARQAATSVPNPP

SEQ ID NO: 11882 - protein, 500 aa, Homo sapiens
MCPRHPEPVPLAHPLPVLKEALEKVDQILRQAMSAPGVAAMSAVVIHNDTVLWTGNFGKKNGSDPASGAPNEYTMYRISSISKIFPVLMLYRLWEEGIVASLDDPLERYASTFTINNPLGLASAEQQGLILRRMASQLSGLPRRLRSTSLLWKGSTQEALNLLKDDVLVVDPGTRCHYSTLAFSLLAHVLAAHTAQGDYQRWVSENVLEPLGMADTGFDLTPDVRARLAAGFYGSGRPAPLYDLGWYRPSGQMYSTAADLAKLAVALLGGGPRRLLRPDAAKTLLAPLLACPGAYFANETGTPWEFHAQRGYRVVRKDGDLDGYAATFSLVPPLRLGLVLLLAGPRPPGPDLVARAYDELLPALERALREAEPGPAPPPTAHPFAGYFTFANLTFYEVRAGPAGELRLRQFGPRVEALVPPAFRTLALRHLHGRVFQLHVAHEFPCALPLGDAWLSLEAQHGQLVNFYPLDHHGLSPGFDVPGLNTYRVLRLRGKPVFKT

SEQ ID NO: 11883 - protein, 193 aa, Homo sapiens
MATPASAPDTRALVADFVGYKLRQKGYVCGAGPGEGPAADPLHQAMRAAGDEFETRFRRTFSDLAAQLHVTPGSAQQRFTQVSDELFQGGPNWGRLVAFFVFGAALCAESVNKEMEPLVGQVQEWMVAYLETQLADWIHSSGGWAEFTALYGDGALEEARRLREGNWASVRTVLTGAVALGALVTVGAFFASK

SEQ ID NO: 11884 - protein, 333 aa, Homo sapiens
MATPASAPDTRALVADFVGYKLRQKGYVCGAGPGEGPAADPLHQAMRAAGDEFETRFRRTFSDLAAQLHVTPGSAQQRFTQVSDELFQGGPNWGRLVAFFVFGAALCAESVNKEMEPLVGQVQEWMVAYLETQLADWIHSSGGWELEAIKARVREMEEEAEKLKELQNEVEKQMNMSPPPGNAGPVIMSIEEKMEADARSIYVGNVDYGATAEELEAHFHGCGSVNRVTILCDKFSGHPKGFAYIEFSDKESVRTSLALDESLFRGRQIKVIPKRTNRPGISTTDRGFPRARYRARTTNYNSSRSRFYSGFNSRPRGRVYRGRARATSWYSPY

SEQ ID NO: 11885 - protein, 341 aa, Homo sapiens
MSVLDALWEDRDVRFDLSAQQMKTRPGEVLIDCLDSIEDTKGNNGDRGRLLVTNLRILWHSLALSRVNVSVGYNCILNITTRTANSKLRGQTEALYILTKCNSTRFEFIFTNLVPGSPRLFTSVMAVHRAYETSKMYRDFKLRSALIQNKQLRLLPQEHVYDKINGVWNLSSDQGNLGTFFITNVRIVWHANMNDSFNVSIPYLQIRSIKIRDSKFGLALVIESSQQSGGYVLGFKIDPVEKLQESVKEINSLHKVYSASPIFGVDYEMEEKPQPLEALTVEQIQDDVEIDSDGHTDAFVAYFADGNKQQDREPVFSEELGLAIEKLKDGFTLQGLWEVMS

SEQ ID NO: 11886 - protein, 320 aa, Homo sapiens
MSVLDALWEDRDVRFDLSAQQMKTRPGEVLIDCLDSIEDTKGNNGDRGRLLVTNLRILWHSLALSRVNVSVGYNCILNITTRTANSKLRGQTEALYILTKCNSTRFEFIFTNLVPGSPRLFTSVMAVHRAYETSKMYRDFKLRSALIQNKQLRLLPQEHVYDKINGVWNLSSDQGNLGTFFITNVRIVWHANMNDSFNVSIPYLQISGGYVLGFKIDPVEKLQESVKEINSLHKVYSASPIFGVDYEMEEKPQPLEALTVEQIQDDVEIDSDGHTDAFVAYFADGNKQQDREPVFSEELGLAIEKLKDGFTLQGLWEVMS

SEQ ID NO: 11887 - protein, 255 aa, Homo sapiens
MQPLLLLLAFLLPTGAEAGEIIGGRESRPHSRPYMAYLQIQSPAGQSRCGGFLVREDFVLTAAHCWGSNINVTLGAHNIQRRENTQQHITARRAIRHPQYNQRTIQNDIMLLQLSRRVRRNRNVNPVALPRAQEGLRPGTLCTVAGWGRVSMRRGTDTLREVQLRVQRDRQCLRIFGSYDPRRQICVGDRRERKAAFKGDSGGPLLCNNVAHGIVSYGKSSGVPPEVFTRVSSFLPWIRTTMRSFKLLDQMETPL

SEQ ID NO: 11888 - protein, 169 aa, Homo sapiens
MTAGRRMEMLCAGRVPALLLCLGFHLLQAVLSTTVIPSCIPGESSDNCTALVQTEDNPRVAQVSITKCSSDMNGYCLHGQCIYLVDMSQNYCRCEVGYTGVRCEHFFLTVHQPLSKEYVALTVILIILFLITVVGSTYYFCRWYRNRKSKEPKKEYERVTSGDPELPQV

SEQ ID NO: 11889 - protein, 575 aa, Homo sapiens
MSGNWVHPGQILIWAIWVLAAPTKGPSAEGPQRNTRLGWIQGKQVTVLGSPVPVNVFLGVPFAAPPLGSLRFTNPQPASPWDNLREATSYPNLCLQNSEWLLLDQHMLKVHYPKFGVSEDCLYLNIYAPAHADTGSKLPVLVWFPGGAFKTGSASIFDGSALAAYEDVLVVVVQYRLGIFGFFTTWDQHAPGNWAFKDQVAALSWVQKNIEFFGGDPSSVTIFGESAGAISVSSLILSPMAKGLFHKAIMESGVAIIPYLEAHDYEKSEDLQVVAHFCGNNASDSEALLRCLRTKPSKELLTLSQKTKSFTRVVDGAFFPNEPLDLLSQKAFKAIPSIIGVNNHECGFLLPMKEAPEILSGSNKSLALHLIQNILHIPPQYLHLVANEYFHDKHSLTEIRDSLLDLLGDVFFVVPALITARYHRDAGAPVYFYEFRHRPQCFEDTKPAFVKADHADEVRFVFGGAFLKGDIVMFEGATEEEKLLSRKMMKYWATFARTGNPNGNDLSLWPAYNLTEQYLQLDLNMSLGQRLKEPRVDFWTSTIPLILSASDMLHSPLSSLTFLSLLQPFFFFCAP

SEQ ID NO: 11890 - protein, 525 aa, Homo sapiens
MSGNWVHPGQILIWAIWVLAAPTKGPSAEGPQRNTRLGWIQGKQVTVLGSPVPVNVFLGVPFAAPPLGSLRFTNPQPASPWDNLREATSYPNLCLQNSEWLLLDQHMLKVHYPKFGVSEDCLYLNIYAPAHADTGSKLPVLVWFPGGAFKTGSASIFDGSALAAYEDVLVVVVQYRLGIFGFFTTWDQHAPGNWAFKDQVAALSWVQKNIEFFGGDPSSVTIFGESAGAISVSSLILSPMAKGLFHKAIMESGVAIIPYLEAHDYEKSEDLQVVAHFCGNNASDSEALLRCLRTKPSKELLTLSQKTKSFTRVVDGAFFPNEPLDLLSQKAFKAIPSIIGVNNHECGFLLPMKEAPEILSGSNKSLALHLIQNILHIPPQYLHLVANEYFHDKHSLTEIRDSLLDLLGDVFFVVPALITARYHREGATEEEKLLSRKMMKYWATFARTGNPNGNDLSLWPAYNLTEQYLQLDLNMSLGQRLKEPRVDFWTSTIPLILSASDMLHSPLSSLTFLSLLQPFFFFCAP

SEQ ID NO: 11891 - protein, 469 aa, Homo sapiens
MLKVHYPKFGVSEDCLYLNIYAPAHADTGSKLPVLVWFPGGAFKTGSASIFDGSALAAYEDVLVVVVQYRLGIFGFFTTWDQHAPGNWAFKDQVAALSWVQKNIEFFGGDPSSVTIFGESAGAISVSSLILSPMAKGLFHKAIMESGVAIIPYLEAHDYEKSEDLQVVAHFCGNNASDSEALLRCLRTKPSKELLTLSQKTKSFTRVVDGAFFPNEPLDLLSQKAFKAIPSIIGVNNHECGFLLPMKEAPEILSGSNKSLALHLIQNILHIPPQYLHLVANEYFHDKHSLTEIRDSLLDLLGDVFFVVPALITARYHRDAGAPVYFYEFRHRPQCFEDTKPAFVKADHADEVRFVFGGAFLKGDIVMFEGATEEEKLLSRKMMKYWATFARTGNPNGNDLSLWPAYNLTEQYLQLDLNMSLGQRLKEPRVDFWTSTIPLILSASDMLHSPLSSLTFLSLLQPFFFFCAP

SEQ ID NO: 11892 - protein, 604 aa, Homo sapiens
MAVLVCPASCHGLKEFRIRRGMWRLCLVYYFYPASSTLYVLRIDVLNYTSKDEGPSAEGPQRNTRLGWIQGKQVTVLGSPVPVNVFLGVPFAAPPLGSLRFTNPQPASPWDNLREATSYPNLCLQNSEWLLLDQHMLKVHYPKFGVSEDCLYLNIYAPAHADTGSKLPVLVWFPGGAFKTGSASIFDGSALAAYEDVLVVVVQYRLGIFGFFTTWDQHAPGNWAFKDQVAALSWVQKNIEFFGGDPSSVTIFGESAGAISVSSLILSPMAKGLFHKAIMESGVAIIPYLEAHDYEKSEDLQVVAHFCGNNASDSEALLRCLRTKPSKELLTLSQKTKSFTRVVDGAFFPNEPLDLLSQKAFKAIPSIIGVNNHECGFLLPMKEAPEILSGSNKSLALHLIQNILHIPPQYLHLVANEYFHDKHSLTEIRDSLLDLLGDVFFVVPALITARYHRDAGAPVYFYEFRHRPQCFEDTKPAFVKADHADEVRFVFGGAFLKGDIVMFEGATEEEKLLSRKMMKYWATFARTGNPNGNDLSLWPAYNLTEQYLQLDLNMSLGQRLKEPRVDFWTSTIPLILSASDMLHSPLSSLTFLSLLQPFFFFCAP

SEQ ID NO: 11893 - protein, 826 aa, Homo sapiens
MPPASGPSVLARLLPLLGLLLGSASRAPGKSPPEPPSPQEILIKVQVYVSGELVPLARASVDVFGNRTLLAAGTTDSEGVATLPLSYRLGTWVLVTAARPGFLTNSVPWRVDKLPLYASVSLYLLPERPATLILYEDLVHILLGSPGARSQPLVQFQRRAARLPVSSTYSQLWASLTPASTQQEMRAFPAFLGTEASSSGNGSWLELMPLTAVSVHLLTGNGTEVPLSGPIHLSLPVPSETRALTVGTSIPAWRFDPKSGLWVRNGTGVIRKEGRQLYWTFVSPQLGYWVAAMASPTAGLVTITSGIQDIGTYHTIFLLTILAALALLVLILLCLLIYYCRRRCLKPRQQHRKLQLSGPSDGNKRDQATSMSQLHLICGGPLEPAPSGDPEAPPPGPLHSAFSSSRDLASSRDDFFRTKPRSASRPAAEPSGARGGESAGLKGARSAEGPGGLEPGLEEHRRGPSGAAAFLHEPPSPPPPFDHYLGHKGAAEGKTPDFLLSQSVDQLARPPSLGQAGQLIFCGSIDHLKDNVYRNVMPTLVIPAHYVRLGGEAGAAGVGDEPAPPEGTAPGPARAFPQPDPQRPQMPGHSGPGGEGGGGGGEGWGAGRAAPVSGSVTIPVLFNESTMAQLNGELQALTEKKLLELGVKPHPRAWFVSLDGRSNSQVRHSYIDLQAGGGARSTDASLDSGVDVHEARPARRRPAREERERAPPAAPPPPPAPPRLALSEDTEPSSSESRTGLCSPEDNSLTPLLDEVAAPEGRAATVPRGRGRSRGDSSRSSASELRRDSLTSPEDELGAEVGDEAGDKKSPWQRREERPLMVFNVK

SEQ ID NO: 11894 - protein, 422 aa, Homo sapiens
MKKNTSKTTMRINKQDALCTPHSHDPRDLQNMLDGGEYAPFVSPPMLESNFIQVNRRGESIYLHNRANWVTVGICFSSSTHKIPNVMLLAHLTPGAQKDTETLFKSLLTSPPAEKLVLTRFLPLQFVTLSVHDAENMSLKVKLVSGRAYYLQLCTSAYKQDTLFSQWVALISLLNQEKAKVSKVSEVSSLSGITNSTDITGSMDVTDVTTFTAILTPYMYAGTGPEHVRDSIDFPEFTDITDITDVTDLPENEVPEVPDVRIVTEVIEVREATEVTDSSDITNCSGVTVVFENNDLIRAKQEEKEKLKNILKPGCLQDTKSKSELKESSKHVTISNITLTFEGKRYFQTTLTPVESEANTSKEMKDKTSEEKMPDFQSTALKAEESRSLRTESNTSVLSPHIKSPSNFLKLVPHLSAPFSRE

SEQ ID NO: 11895 - protein, 400 aa, Homo sapiens
MKKNTSKTTMRINKQDALCTPHSHDPRDLQNMLDGGEYAPFVSPPMLESNFIQVNRRGESIYLHNRANWVTVGICFSSSTHKIPNVMLLAHLTPGAQKDTETLFKSLLTSPPAEKLVLTRFLPLQFVTLSVHDAENMSLKVKLVSGRAYYLQLCTSAYKQDTLFSQWVALISLLNQEKAKVSKVSEVSSLSGITNSTDITGSMDVTDVTTFTAILTPYMYAGTGPEHVRDSIDFPEFTDITDITDVTDLPENEVPEVPDVRIVTEVIEVREATEVTDSSDITNCSGVTVVFENNDLIRAKQEEKEKLKNILKPGCLQDTKSKRYFQTTLTPVESEANTSKEMKDKTSEEKMPDFQSTALKAEESRSLRTESNTSVLSPHIKSPSNFLKLVPHLSAPFSRE

SEQ ID NO: 11896 - protein, 1055 aa, Homo sapiens
MALRRLGAALLLLPLLAAVEETLMDSTTATAELGWMVHPPSGWEEVSGYDENMNTIRTYQVCNVFESSQNNWLRTKFIRRRGAHRIHVEMKFSVRDCSSIPSVPGSCKETFNLYYYEADFDSATKTFPNWMENPWVKVDTIAADESFSQVDLGGRVMKINTEVRSFGPVSRSGFYLAFQDYGGCMSLIAVRVFYRKCPRIIQNGAIFQETLSGAESTSLVAARGSCIANAEEVDVPIKLYCNGDGEWLVPIGRCMCKAGFEAVENGTVCRGCPSGTFKANQGDEACTHCPINSRTTSEGATNCVCRNGYYRADLDPLDMPCTTIPSAPQAVISSVNETSLMLEWTPPRDSGGREDLVYNIICKSCGSGRGACTRCGDNVQYAPRQLGLTEPRIYISDLLAHTQYTFEIQAVNGVTDQSPFSPQFASVNITTNQAAPSAVSIMHQVSRTVDSITLSWSQPDQPNGVILDYELQYYEKELSEYNATAIKSPTNTVTVQGLKAGAIYVFQVRARTVAGYGRYSGKMYFQTMTEAEYQTSIQEKLPLIIGSSAAGLVFLIAVVVIAIVCNRRGFERADSEYTDKLQHYTSGHMTPGMKIYIDPFTYEDPNEAVREFAKEIDISCVKIEQVIGAGEFGEVCSGHLKLPGKREIFVAIKTLKSGYTEKQRRDFLSEASIMGQFDHPNVIHLEGVVTKSTPVMIITEFMENGSLDSFLRQNDGQFTVIQLVGMLRGIAAGMKYLADMNYVHRDLAARNILVNSNLVCKVSDFGLSRFLEDDTSDPTYTSALGGKIPIRWTAPEAIQYRKFTSASDVWSYGIVMWEVMSYGERPYWDMTNQDVINAIEQDYRLPPPMDCPSALHQLMLDCWQKDRNHRPKFGQIVNTLDKMIRNPNSLKAMAPLSSGINLPLLDRTIPDYTSFNTVDEWLEAIKMGQYKESFANAGFTSFDVVSQMMMEDILRVGVTLAGHQKKILNSIQVMRAQMNQIQSVEGQPLARRPRATGRTKRCQPRDVTKKTCNSNDGKKKGMGKKKTDPGRGREIQGIFFKEDSHKESNDCSCGG

SEQ ID NO: 11897 - protein, 986 aa, Homo sapiens
MALRRLGAALLLLPLLAAVEETLMDSTTATAELGWMVHPPSGWEEVSGYDENMNTIRTYQVCNVFESSQNNWLRTKFIRRRGAHRIHVEMKFSVRDCSSIPSVPGSCKETFNLYYYEADFDSATKTFPNWMENPWVKVDTIAADESFSQVDLGGRVMKINTEVRSFGPVSRSGFYLAFQDYGGCMSLIAVRVFYRKCPRIIQNGAIFQETLSGAESTSLVAARGSCIANAEEVDVPIKLYCNGDGEWLVPIGRCMCKAGFEAVENGTVCRGCPSGTFKANQGDEACTHCPINSRTTSEGATNCVCRNGYYRADLDPLDMPCTTIPSAPQAVISSVNETSLMLEWTPPRDSGGREDLVYNIICKSCGSGRGACTRCGDNVQYAPRQLGLTEPRIYISDLLAHTQYTFEIQAVNGVTDQSPFSPQFASVNITTNQAAPSAVSIMHQVSRTVDSITLSWSQPDQPNGVILDYELQYYEKELSEYNATAIKSPTNTVTVQGLKAGAIYVFQVRARTVAGYGRYSGKMYFQTMTEAEYQTSIQEKLPLIIGSSAAGLVFLIAVVVIAIVCNRRGFERADSEYTDKLQHYTSGHMTPGMKIYIDPFTYEDPNEAVREFAKEIDISCVKIEQVIGAGEFGEVCSGHLKLPGKREIFVAIKTLKSGYTEKQRRDFLSEASIMGQFDHPNVIHLEGVVTKSTPVMIITEFMENGSLDSFLRQNDGQFTVIQLVGMLRGIAAGMKYLADMNYVHRDLAARNILVNSNLVCKVSDFGLSRFLEDDTSDPTYTSALGGKIPIRWTAPEAIQYRKFTSASDVWSYGIVMWEVMSYGERPYWDMTNQDVINAIEQDYRLPPPMDCPSALHQLMLDCWQKDRNHRPKFGQIVNTLDKMIRNPNSLKAMAPLSSGINLPLLDRTIPDYTSFNTVDEWLEAIKMGQYKESFANAGFTSFDVVSQMMMEDILRVGVTLAGHQKKILNSIQVMRAQMNQIQSVEV

SEQ ID NO: 11898 - protein, 987 aa, Homo sapiens
MALRRLGAALLLLPLLAAVEETLMDSTTATAELGWMVHPPSGWEEVSGYDENMNTIRTYQVCNVFESSQNNWLRTKFIRRRGAHRIHVEMKFSVRDCSSIPSVPGSCKETFNLYYYEADFDSATKTFPNWMENPWVKVDTIAADESFSQVDLGGRVMKINTEVRSFGPVSRSGFYLAFQDYGGCMSLIAVRVFYRKCPRIIQNGAIFQETLSGAESTSLVAARGSCIANAEEVDVPIKLYCNGDGEWLVPIGRCMCKAGFEAVENGTVCRGCPSGTFKANQGDEACTHCPINSRTTSEGATNCVCRNGYYRADLDPLDMPCTTIPSAPQAVISSVNETSLMLEWTPPRDSGGREDLVYNIICKSCGSGRGACTRCGDNVQYAPRQLGLTEPRIYISDLLAHTQYTFEIQAVNGVTDQSPFSPQFASVNITTNQAAPSAVSIMHQVSRTVDSITLSWSQPDQPNGVILDYELQYYEKELSEYNATAIKSPTNTVTVQGLKAGAIYVFQVRARTVAGYGRYSGKMYFQTMTEAEYQTSIQEKLPLIIGSSAAGLVFLIAVVVIAIVCNRRRGFERADSEYTDKLQHYTSGHMTPGMKIYIDPFTYEDPNEAVREFAKEIDISCVKIEQVIGAGEFGEVCSGHLKLPGKREIFVAIKTLKSGYTEKQRRDFLSEASIMGQFDHPNVIHLEGVVTKSTPVMIITEFMENGSLDSFLRQNDGQFTVIQLVGMLRGIAAGMKYLADMNYVHRDLAARNILVNSNLVCKVSDFGLSRFLEDDTSDPTYTSALGGKIPIRWTAPEAIQYRKFTSASDVWSYGIVMWEVMSYGERPYWDMTNQDVINAIEQDYRLPPPMDCPSALHQLMLDCWQKDRNHRPKFGQIVNTLDKMIRNPNSLKAMAPLSSGINLPLLDRTIPDYTSFNTVDEWLEAIKMGQYKESFANAGFTSFDVVSQMMMEDILRVGVTLAGHQKKILNSIQVMRAQMNQIQSVEV

SEQ ID NO: 11899 - protein, 478 aa, Homo sapiens
MAASQLAALEGVDSGPRVPGASPGFLYSEGQRLALEALLSKGAEAFQTCVQREELWPFLSADEVQGLAAAAEDWTVAKQEPSGMAEGATTTDVDAGSLSYWPGQSEQPAPVLRLGWPVDSAWKGITRAQLYTQPPGEGQPPLKELVRLEIQAAHKLVAVVMDVFTDPDLLLDLVDAATRRWVPVYLLLDRQQLPAFLELAQQLGVNPWNTENVDVRVVRGCSFQSRWRRQVSGTVREKFVLLDGERVISGSYSFTWSDARLHRGLVTLLTGEIVDAFSLEFRTLYAASCPLPPAPPQKPSVIGGLQRGRSPHRVSRRRSVAPASPPPPDGPLAHRLAACRVSPATPGPALSDILRSVQRARTPSGPPARPSRSMWDLSRLSQLSGSSDGDNELKKSWGSKDTPAKALMRQRGTGGGPWGEVDSRPPWGGALPLPPAHRLRYLSPARRRFGGDATFKLQEPRGVRPSDWAPRAGLGGQP

SEQ ID NO: 11900 - protein, 184 aa, Homo sapiens
MSGARAAPGAAGNGAVRGLRVDGLPPLPKSLSGLLHSASGGGASGGWRHLERLYAQKSRIQDELSRGGPGGGGARAAALPAKPPNLDAALALLRKEMVGLRQLDMSLLCQLYSLYESIQEYKGACQAASSPDCTYALENGFFDEEEEYFQEQNSLHDRRDRGPPRDLSLPVSSLSSSDWILESI

SEQ ID NO: 11901 - protein, 986 aa, Homo sapiens
MAGIFYFALFSCLFGICDAVTGSRVYPANEVTLLDSRSVQGELGWIASPLEGGWEEVSIMDEKNTPIRTYQVCNVMEPSQNNWLRTDWITREGAQRVYIEIKFTLRDCNSLPGVMGTCKETFNLYYYESDNDKERFIRENQFVKIDTIAADESFTQVDIGDRIMKLNTEIRDVGPLSKKGFYLAFQDVGACIALVSVRVFYKKCPLTVRNLAQFPDTITGADTSSLVEVRGSCVNNSEEKDVPKMYCGADGEWLVPIGNCLCNAGHEERSGECQACKIGYYKALSTDATCAKCPPHSYSVWEGATSCTCDRGFFRADNDAASMPCTRPPSAPLNLISNVNETSVNLEWSSPQNTGGRQDISYNVVCKKCGAGDPSKCRPCGSGVHYTPQQNGLKTTKVSITDLLAHTNYTFEIWAVNGVSKYNPNPDQSVSVTVTTNQAAPSSIALVQAKEVTRYSVALAWLEPDRPNGVILEYEVKYYEKDQNERSYRIVRTAARNTDIKGLNPLTSYVFHVRARTAAGYGDFSEPLEVTTNTVPSRIIGDGANSTVLLVSVSGSVVLVVILIAAFVISRRRSKYSKAKQEADEEKHLNQGVRTYVDPFTYEDPNQAVREFAKEIDASCIKIEKVIGVGEFGEVCSGRLKVPGKREICVAIKTLKAGYTDKQRRDFLSEASIMGQFDHPNIIHLEGVVTKCKPVMIITEYMENGSLDAFLRKNDGRFTVIQLVGMLRGIGSGMKYLSDMSYVHRDLAARNILVNSNLVCKVSDFGMSRVLEDDPEAAYTTRGGKIPIRWTAPEAIAYRKFTSASDVWSYGIVMWEVMSYGERPYWDMSNQDVIKAIEEGYRLPPPMDCPIALHQLMLDCWQKERSDRPKFGQIVNMLDKLIRNPNSLKRTGTESSRPNTALLDPSSPEFSAVVSVGDWLQAIKMDRYKDNFTAAGYTTLEAVVHVNQEDLARIGITAITHQNKILSSVQAMRTQMQQMHGRMVPV

SEQ ID NO: 11902 - protein, 935 aa, Homo sapiens
MKWEEVSIMDEKNTPIRTYQVCNVMEPSQNNWLRTDWITREGAQRVYIEIKFTLRDCNSLPGVMGTCKETFNLYYYESDNDKERFIRENQFVKIDTIAADESFTQVDIGDRIMKLNTEIRDVGPLSKKGFYLAFQDVGACIALVSVRVFYKKCPLTVRNLAQFPDTITGADTSSLVEVRGSCVNNSEEKDVPKMYCGADGEWLVPIGNCLCNAGHEERSGECQACKIGYYKALSTDATCAKCPPHSYSVWEGATSCTCDRGFFRADNDAASMPCTRPPSAPLNLISNVNETSVNLEWSSPQNTGGRQDISYNVVCKKCGAGDPSKCRPCGSGVHYTPQQNGLKTTKVSITDLLAHTNYTFEIWAVNGVSKYNPNPDQSVSVTVTTNQAAPSSIALVQAKEVTRYSVALAWLEPDRPNGVILEYEVKYYEKDQNERSYRIVRTAARNTDIKGLNPLTSYVFHVRARTAAGYGDFSEPLEVTTNTVPSRIIGDGANSTVLLVSVSGSVVLVVILIAAFVISRRRSKYSKAKQEADEEKHLNQGVRTYVDPFTYEDPNQAVREFAKEIDASCIKIEKVIGVGEFGEVCSGRLKVPGKREICVAIKTLKAGYTDKQRRDFLSEASIMGQFDHPNIIHLEGVVTKCKPVMIITEYMENGSLDAFLRKNDGRFTVIQLVGMLRGIGSGMKYLSDMSYVHRDLAARNILVNSNLVCKVSDFGMSRVLEDDPEAAYTTRGGKIPIRWTAPEAIAYRKFTSASDVWSYGIVMWEVMSYGERPYWDMSNQDVIKAIEEGYRLPPPMDCPIALHQLMLDCWQKERSDRPKFGQIVNMLDKLIRNPNSLKRTGTESSRPNTALLDPSSPEFSAVVSVGDWLQAIKMDRYKDNFTAAGYTTLEAVVHVNQEDLARIGITAITHQNKILSSVQAMRTQMQQMHGRMVPV

SEQ ID NO: 11903 - protein, 369 aa, Homo sapiens
MPPMLWLLLHFAAPALGFYFSISCPSGKQCQQALLSGNDILLYCNSSGAHWYYLFTQGKKGRLTSLTNISNMEIMPEGSLLIKDPLPSQTGLYHCWNKNGRQVVQYEIDFQDVTTLHITHKDLGQRPLQNETLHLGSKQLIFTWWEPWQDCNRCEEPGECKRLGYRYIEEPLEEAMPCWLYLGEVLVWSSRLRPELQVEACHVQCTNNTQLRVDYVIFDNFRLDEKTEFVWLDCPLGSMYRPVNWRANDTPLTWESQLSGQDFTTFLDPSTGGRQLQVFQPAVYKCFVQQELVAQFKPAASLETLEAQWRENDAQWREARKALRGRADSVLKGLKLVLLVVTVLALLGALLKCIHPSPGRRSTQVLVVK

SEQ ID NO: 11904 - protein, 379 aa, Homo sapiens
METLCPAPRLAVPASPRGSPCSPTPRKPCRGTQEFSPLCLRALAFCALAKPRASSLGPGPGELAARSPVLRGPQAPLRPGGWAPDGLKHLWAPTGRPGVPNTAAGEDADVAACPRRGEEEEGGGGFPHFGVRSCAPPGRCPAPPHPRESTTSFASAPPRPAPGLEPQRGPAASPPQEPSSRPPSPPAGLSTEPAGPGTAPRPFLPGQPAEVDGNPPPAAPEAPAASPSTASPAPAAPGDLRQEHFDRLIRRSKLWCYAKGFALDTPSLRRGPERPPAKGPARGAAKKRRLPAPPPRTAQPRRPAPTLPTTSTFSLLNCFPCPPALVVGEDGDLKPASSLRLQGDSKPPPAHPLWRWQMGGPAVPEPPGLKFWGINMDES

SEQ ID NO: 11905 - protein, 628 aa, Homo sapiens
MDSGSSSSDSAPDCWDQVDMESPGSAPSGDGVSSAVAEAQREPLSSAFSRKLNVNAKPFVPNVHAAEFVPSFLRGPTQPPTLPAGSGSNDETCTGAGYPQGKRMGRGAPVEPSREEPLVSLEGSNSAVTMELSEPVVENGEVEMALEESWEHSKEVSEAEPGGGSSGDSGPPEESGQEMMEEKEEIRKSKSVIVPSGAPKKEHVNVVFIGHVDAGKSTIGGQIMFLTGMVDKRTLEKYEREAKEKNRETWYLSWALDTNQEERDKGKTVEVGRAYFETERKHFTILDAPGHKSFVPNMIGGASQADLAVLVISARKGEFETGFEKGGQTREHAMLAKTAGVKHLIVLINKMDDPTVNWSIERYEECKEKLVPFLKKVGFSPKKDIHFMPCSGLTGANIKEQSDFCPWYTGLPFIPYLDNLPNFNRSIDGPIRLPIVDKYKDMGTVVLGKLESGSIFKGQQLVMMPNKHNVEVLGILSDDTETDFVAPGENLKIRLKGIEEEEILPGFILCDPSNLCHSGRTFDVQIVIIEHKSIICPGYNAVLHIHTCIEEVEITALISLVDKKSGEKSKTRPRFVKQDQVCIARLRTAGTICLETFKDFPQMGRFTLRDEGKTIAIGKVLKLVPEKD

SEQ ID NO: 11906 - protein, 294 aa, Homo sapiens
MNFILFIFIPGVFSLKSSTLKPTIEALPNVLPLNEDVNKQEEKNEDHTPNYAPANEKNGNYYKDIKQYVFTTQNPNGTESEISVRATTDLNFALKNDKTVNATTYEKSTIEEETTTSEPSHKNIQRSTPNVPAFWTMLAKAINGTAVVMDDKDQLFHPIPESDVNATQGENQPDLEDLKIKIMLGISLMTLLLFVVLLAFCSATLYKLRHLSYKSCESQYSVNPELATMSYFHPSEGVSDTSFSKSAESSTFLGTTSSDMRRSGTRTSESKIMTDIISIGSDNEMHENDESVTR

SEQ ID NO: 11907 - protein, 127 aa, Homo sapiens
MNFILFIFIPGVFSLKSSTLKPTIEALPNVLPLNEDVNKQEEKNEDHTPNYAPANEKNGNYYKDIKQYVFTTQNPNGTESEISVRATTDLNFALKNDKTVNATTYEKSTIEEETTTSEPSHKNIQSI

SEQ ID NO: 11908 - protein, 265 aa, Homo sapiens
MNFILFIFIPGVFSLKSSTLKPTIEALPNVLPLNEDVNKQEEKNEDHTPNYAPANEKNGNYYKDIKQYVFTTQNPNGTESEISVRATTDLNFALKNGSTPNVPAFWTMLAKAINGTAVVMDDKDQLFHPIPESDVNATQGENQPDLEDLKIKIMLGISLMTLLLFVVLLAFCSATLYKLRHLSYKSCESQYSVNPELATMSYFHPSEGVSDTSFSKSAESSTFLGTTSSDMRRSGTRTSESKIMTDIISIGSDNEMHENDESVTR

SEQ ID NO: 11909 - protein, 732 aa, Homo sapiens [sequence omitted]

SEQ ID NO: 11910 - protein, 351 aa, Homo sapiens
MASTGSQASDIDEIFGFFNDGEPPTKKPRKLLPSLKTKKPRELVLVIGTGISAAVAPQVPALKSWKGLIQALLDAAIDFDLLEDEESKKFQKCLHEDKNLVHVAHDLIQKLSPRTSNVRSTFFKDCLYEVFDDLESKMEDSGKQLLQSVLHLMENGALVLTTNFDNLLELYAADQGKQLESLDLTDEKKVLEWAQEKRKLSVLHIHGVYTNPSGIVLHPAGYQNVLRNTEVMREIQKLYENKSFLFLGCGWTVDDTTFQALFLEAVKHKSDLEHFMLVRRGDVDEFKKLRENMLDKGIKVISYGDDYADLPEYFKRLTCEISTRGTSAGMVREGQLNGSSAAHSEIRGCST

SEQ ID NO: 11911 - protein, 139 aa, Homo sapiens
MGQNWKRQQKLWNVPQLPFIRVPPSIYDTSLLKALNQGQQRYFYSIMRIYNSRPQWEALQTRYIHSLQHQQLLGYITQREALSYALVLRDSTKRASAKVAPQRTIPRKTSAMTRRCPSVLPVSVVLPRAQSKRRQVLRN

SEQ ID NO: 11912 - protein, 357 aa, Homo sapiens
MDSVEKTTNRSEQKSRKFLKSLIRKQPQELLLVIGTGVSAAVAPGIPALCSWRSCIEAVIEAAEQLEVLHPGDVAEFRRKVTKDRDLLVVAHDLIRKMSPRTGDAKPSFFQDCLMEVFDDLEQHIRSPVVLQSILSLMDRGAMVLTTNYDNLLEAFGRRQNKPMESLDLKDKTKVLEWARGHMKYGVLHIHGLYTDPCGVVLDPSGYKDVTQDAEVMEVLQNLYRTKSFLFVGCGETLRDQIFQALFLYSVPNKVDLEHYMLVLKENEDHFFKHQADMLLHGIKVVSYGDCFDHFPGYVQDLATQICKQQSPDADRVDSTTLLGNACQDCAKRKLEENGIEVSKKRTQSDTDDAGGS

SEQ ID NO: 11913 - protein, 175 aa, Homo sapiens
MKYGVLHIHGLYTDPCGVVLDPSGYKDVTQDAEVMEVLQNLYRTKSFLFVGCGETLRDQIFQALFLYSVPNKVDLEHYMLVLKENEDHFFKHQADMLLHGIKVVSYGDCFDHFPGYVQDLATQICKQQSPDADRVDSTTLLGNACQDCAKRKLEENGIEVSKKRTQSDTDDAGGS

SEQ ID NO: 11914 - protein, 582 aa, Homo sapiens
MISRYTRKAVPQSLELKGITKHALNHHPPPEKLEEISPTSDSHEKDTSSQSKSDITRESSFTSADTGNSLSAFPSYTGAGISTEGSSDFSWGYGELDQNATEKVQTMFTAIDELLYEQKLSVHTKSLQEECQQWTASFPHLRILGRQIITPSEGYRLYPRSPSAVSASYETTLSQERDSTIFGIRGKKLHFSSSYAHKASSIAKSSSFCSMERDEEDSIIVSEGIIEEYLAFDHIDIEEGFHGKKSEAATEKQKLGYPPIAPFYCMKEDVLAYVFDSVWCKVVSCMEQLTRSHWEGFASDDESNVAVTRPDSESSCVLSELHPLVLPRVPQSKVLYITSNPMSLCQASRHQPNVNDLLVHGMPLQPRNLSLMDKLLDLDDKLLMRPGSSTILSTRNWPNRAVEFSTSSLSYTVQSTRRRNPPPRTLHPISTSHSCAETPRSVEEILRGARVPVAPDSLSSPSPTPLSRNNLLPPIGTAEVEHVSTVGPQRQMKPHGDSSRAQSAVVDEPNYQQPQERLLLPDFFPRPNTTQSFLLDTQYRRSCAVEYPHQARPGRGSAGPQLHGSTKSQSGGRPVSRTRQGP

SEQ ID NO: 11915 - protein, 528 aa, Homo sapiens
MISRYTRKAVPQSLELKGITKHALNHHPPPEKLEEISPTSDSHEKDTSSQSKSDITRESSFTSADTGNSLSAFPSYTGAGISTEGSSDFSWGYGELDQNATEKVQTMFTAIDELLYEQKLSVHTKSLQEECQQWTASFPHLRILGRQIITPSEGYRLYPRSPSAVSASYETTLSQERDSTIFGIRGKKLHFSSSYAHKASSIAKSSSFCSMERDEEDSIIVSEGIIEEYLAFDHIDIEEGFHGKKSEAATEKQKLGYPPIAPFYCMKEDVLAYVFDSVWCKVVSCMEQLTRSHWEGFASDDESNVAVTRPDSESSCVLSELHPLVLPRVPQSKMSLCQASRHQPNVNDLLVHGMPLQPRNLSLMDKLLDLDDKLLMRPGSSTILSTRNWPNRAVEFSTSSLSYTVQSTRRRNPPPRTLHPISTSHSCAETPRSVEEILRGARVPVAPDSLSSPSPTPLSRNNLLPPIGTAEVEHVSTVGPQRQMKPHGDSSRAQSAVVDEPNYQQPQERLLLPDFFPRPNTTQSFLVE

SEQ ID NO: 11916 - protein, 271 aa, Homo sapiens
MRDRRGPLGTCLAQVQWAGGGDSDKLSYSLKKRMPTEGPWPADAPSWMNKPAVDGNSQSEALSLEMAGLSLPSGGPVLPYVKESARRNPASAATPSAAVGLFPAPTEYFARVSCSGVEALGRDWLGGGPRATHGHRGQCPKGEPRVSRLTRHQKLPEMGSFWDDPPSAFPSGLGSELEPSCLHSILSATLHACPEVLLKDETKRIFLDLLNPMFSKQTIEFKKMFKSTSDGLQITLGLLALQHFELANSLCHSLKYKQNNASRLILRVVLE

SEQ ID NO: 11917 - protein, 208 aa, Homo sapiens
MDPFLVLLHSVSSSLSSSELTELKFLCLGRVGKRKLERVQSGLDLFSMLLEQNDLEPGHTELLRELLASLRRHDLLRRVDDFEAGAAAGAAPGEEDLCAAFNVICDNVGKDWRRLARQLKVSDTKIDSIEDRYPRNLTERVRESLRIWKNTEKENATVAHLVGALRSCQMNLVADLVQEVQQARDLQNRSGAMSPMSWNSDASTSEAS

SEQ ID NO: 11918 - protein, 298 aa, Homo sapiens
MERLTLPLGGAAAVDEYLEYRRIVGEDDGGKLFTPEEYEEYKRKVLPLRLQNRLFVSWRSPTGMDCKLVGPETLCFCTHRYKQHKTDLEAIPQQCPIDLPCQVTGCQCRAYLYVPLNGSQPIRCRCKHFADQHSAAPGFTCNTCSKCSGFHSCFTCACGQPAYAHDTVVETKQERLAQEKPVGQDIPYAAMGGLTGFSSLAEGYMRLDDSGIGVPSVEFLESPITAVDSPFLKAFQASSSSSPETLTDVGTSSQVSSLRRPEEDDMAFFERRYQERMKMEKAAKWKGKAPLPSATKPS

SEQ ID NO: 11919 - protein, 262 aa, Homo sapiens
MERLTLPLGGAAAVDEYLEYRRIVGEDDGGKLFTPEEYEEYKRKVLPLRLQNRLFVSWRSPTGMDCKLVGPETLCFCTHRYKQHKTDLEAIPQQCPIDLPCQVTGCQCRAYLYVPLNGSQPIRCRCKHFADQHSAAPGFTCNTCSKCSGFHSCFTCACGQPAYAHDTVVETKQERLAQEKPVGQDIPYAAMGGLTGFSSLAEGYMRLDDSGIVGTSSQVSSLRRPEEDDMAFFERRYQERMKMEKAAKWKGKAPLPSATKPS

SEQ ID NO: 11920 - protein, 204 aa, Homo sapiens
MERLTLPLGGAAAVDEYLEYRRYKQHKTDLEAIPQQCPIDLPCQVTGCQCRAYLYVPLNGSQPIRCRCKHFADQHSAAPGFTCNTCSKCSGFHSCFTCACGQPAYAHDTVVETKQERLAQEKPVGQDIPYAAMGGLTGFSSLAEGYMRLDDSGIVGTSSQVSSLRRPEEDDMAFFERRYQERMKMEKAAKWKGKAPLPSATKPS

SEQ ID NO: 11921 - protein, 185 aa, Homo sapiens
MMEEIDRFQVPTAHSEMQPLDPAAASISDGDCDAREGESVAMNYKPSPLQVKLEKQRELARKGSLKNGSMGSPVNQQPKKNNVMARTRLVVPNKGYSSLDQSPDEKPLVALDTDSDDDFDMSRYSSSGYSSAEQINQDLNIQLLKDGYRLDEIPDDEDLDLIPPKSVNPTCMCCQATSSTACHIQ

SEQ ID NO: 11922 - protein, 157 aa, Homo sapiens
MMEEIDRFQDPAAASISDGDCDAREEKQRELARKGSLKNGSMGSPVNQQPKKNNVMARTRLVVPNKGYSSLDQSPDEKPLVALDTDSDDDFDMSRYSSSGYSSAEQINQDLNIQLLKDGYRLDEIPDDEDLDLIPPKSVNPTCMCCQATSSTACHIQ

SEQ ID NO: 11923 - protein, 156 aa, Homo sapiens
MMEEIDRFQDPAAASISDGDCDAREEKQRELARKGSLKNGSMGSPVNQQPKKNNVMARTRLVVPNKGYSSLDQSPDEKPLVALDTDSDDDFDMSRYSSSGYSSAEINQDLNIQLLKDGYRLDEIPDDEDLDLIPPKSVNPTCMCCQATSSTACHIQ

SEQ ID NO: 11924 - protein, 173 aa, Homo sapiens
MMEEIDRFQDPAAASISDGDCDAREGESVAMNYKPSPLQVKLEKQRELARKGSLKNGSMGSPVNQQPKKNNVMARTRLVVPNKGYSSLDQSPDEKPLVALDTDSDDDFDMSRYSSSGYSSAEINQDLNIQLLKDGYRLDEIPDDEDLDLIPPKSVNPTCMCCQATSSTACHIQ

SEQ ID NO: 11925 - protein, 167 aa, Homo sapiens
MMEEIDRFQVPTAHSEMQPLDPAAASISDGDCDAREEKQRELARKGSLKNGSMGSPVNQQPKKNNVMARTRLVVPNKGYSSLDQSPDEKPLVALDTDSDDDFDMSRYSSSGYSSAEINQDLNIQLLKDGYRLDEIPDDEDLDLIPPKSVNPTCMCCQATSSTACHIQ

SEQ ID NO: 11926 - protein, 168 aa, Homo sapiens
MMEEIDRFQVPTAHSEMQPLDPAAASISDGDCDAREEKQRELARKGSLKNGSMGSPVNQQPKKNNVMARTRLVVPNKGYSSLDQSPDEKPLVALDTDSDDDFDMSRYSSSGYSSAEQINQDLNIQLLKDGYRLDEIPDDEDLDLIPPKSVNPTCMCCQATSSTACHIQ

SEQ ID NO: 11927 - protein, 157 aa, Homo sapiens
MMEEIDRFQVPTAHSEMQPLDPAAASISDGDCDAREGESVAMNYKPSPLQVKLEKQRELARKGSLKNGSMGSPVNQQPKKNNVMARTRLVVPNKGYSSLDQSPDEKPLVALDTDRCVWGLGGSWAAQRNLYSTSGLYRPHLLYCQNWDILQPESLQG

SEQ ID NO: 11928 - protein, 167 aa, Homo sapiens
MTAGTVVITGGILATVILLCIIAVLCYCRLQYYCCKKSGTEVADEEEEREHDLPTHPRGPTCNACSSQALDGRGSLAPLTSEPCSQPCGVAASHCTTCSPYSSPFYIRTADMVPNGGGGERLSFAPTYYKEGGPPSLKLAAPQSYPVTWPGSGREAFTNPRAISTDV

SEQ ID NO: 11929 - protein, 181 aa, Homo sapiens
MADPGNRGGIHRPLSFTCSLLIVGMCCVSPFFCHSQTDLLALSQADPQCWESSSVLLLEMWKPRVSNTVSGFWDFMIYLKSSENLKHGALFWDLAQLFWDIYVDCVLSRNHGLGRRQLVGEEEKISAAQPQHTRSKQGTYSQLLRTSFLKKKELIEDLISMHVRRSGSSVIGKVNLEIKRK

SEQ ID NO: 11930 - protein, 122 aa, Homo sapiens
MYVQEHRLWGLMDKPHSAPCLMSLSLSFLICNKGRNAIRVQQSTDERMDAMLLRQCPTQGTRKNHESNSSLHHVPNWIFHSTIIPPNKGSKRCLRKVDWLLPRAGGVGGKRGVTADGDRVSF

SEQ ID NO: 11931 - protein, 232 aa, Homo sapiens
MATPGRPWAQARSAYRASEVLRRVTGRRRDPGPQSNGPGQEDARAPGRLARLLGQLRAEAASRSEVPRLLKLVERAGAGAAGAGERTGAHSRGSVCSVCGEPRGRATYPAGVLEVSERRLQEGLAAVREELGAEIEALRAELRAELDALRALLPPPPPSPPARREPRAVPRATPRGPTLLRTLGTVSALVAASRPADDAPDGPAECGAHRAPVRKNHKKMPVPPGAPQGGGD

SEQ ID NO: 11932 - protein, 3159 aa, Homo sapiens
MHHGTGPQNVQHQLQRSRACPGSEGEEQPAHPNPPPSPAAPFAPSASPSAPQSPSYQIQQLMNRSPATGQNVNITLQSVGPVVGGNQQITLAPLPLPSPTSPGFQFSAQPRRFEHGSPSYIQVTSPLSQQVQTQSPTQPSPGPGQALQNVRAGAPGPGLGLCSSSPTGGFVDASVLVRQISLSPSSGGHFVFQDGSGLTQIAQGAQVQLQHPGTPITVRERRPSQPHTQSGGTIHHLGPQSPAAAGGAGLQPLASPSHITTANLPPQISSIIQGQLVQQQQVLQGPPLPRPLGFERTPGVLLPGAGGAAGFGMTSPPPPTSPSRTAVPPGLSSLPLTSVGNTGMKKVPKKLEEIPPASPEMAQMRKQCLDYHYQEMQALKEVFKEYLIELFFLQHFQGNMMDFLAFKKKHYAPLQAYLRQNDLDIEEEEEEEEEEEEKSEVINDEVKVVTGKDGQTGTPVAIATQLPPKVSAAFSSQQQPFQQALAGSLVAGAGSTVETDLFKRQQAMPSTGMAEQSKRPRLEVGHQGVVFQHPGADAGVPLQQLMPTAQGGMPPTPQAAQLAGQRQSQQQYDPSTGPPVQNAASLHTPLPQLPGRLPPAGVPTAALSSALQFAQQPQVVEAQTQLQIPVKTQQPNVPIPAPPSSQLPIPPSQPAQLALHVPTPGKVQVQASQLSSLPQMVASTRLPVDPAPPCPRPLPTSSTSSLAPVSGSGPGPSPARSSPVNRPSSATNKALSPVTSRTPGVVASAPTKPQSPAQNATSSQDSSQDTLTEQITLENQVHQRIAELRKAGLWSQRRLPKLQEAPRPKSHWDYLLEEMQWMATDFAQERRWKVAAAKKLVRTVVRHHEEKQLREERGKKEEQSRLRRIAASTAREIECFWSNIEQVVEIKLRVELEEKRKKALNLQKVSRRGKELRPKGFDALQESSLDSGMSGRKRKASISLTDDEVDDEEETIEEEEANEGVVDHQTELSNLAKEAELPLLDLMKLYEGAFLPSSQWPRPKPDGEDTSGEEDADDCPGDRESRKDLVLIDSLFIMDQFKAAERMNIGKPNAKDIADVTAVAEAILPKGSARVTTSVKFNAPSLLYGALRDYQKIGLDWLAKLYRKNLNGILADEAGLGKTVQIIAFFAHLACNEGNWGPHLVVVRSCNILKWELELKRWCPGLKILSYIGSHRELKAKRQEWAEPNSFHVCITSYTQFFRGLTAFTRVRWKCLVIDEMQRVKGMTERHWEAVFTLQSQQRLLLIDSPLHNTFLELWTMVHFLVPGISRPYLSSPLRAPSEESQDYYHKVVIRLHRVTQPFILRRTKRDVEKQLTKKYEHVLKCRLSNRQKALYEDVILQPGTQEALKSGHFVNVLSILVRLQRICNHPGLVEPRHPGSSYVAGPLEYPSASLILKALERDFWKEADLSMFDLIGLENKITRHEAELLSKKKIPRKLMEEISTSAAPAARPAAAKLKASRLFQPVQYGQKPEGRTVAFPSTHPPRTAAPTTASAAPQGPLRGRPPIATFSANPEAKAAAAPFQTSQASASAPRHQPASASSTAASPAHPAKLRAQTTAQASTPGQPPPQPQAPSHAAGQSALPQRLVLPSQAQARLPSGEVVKIAQLASITGPQSRVAQPETPVTLQFQGSKFTLSHSQLRQLTAGQPLQLQGSVLQIVSAPGQPYLRAPGPVVMQTVSQAGAVHGALGSKPPAGGPSPAPLTPQVGVPGRVAVNALAVGEPGTASKPASPIGGPTQEEKTRLLKERLDQIYLVNERRCSQAPVYGRDLLRICALPSHGRVQWRGSLDGRRGKEAGPAHSYTSSSESPSELMLTLCRCGESLQDVIDRVAFVIPPVVAAPPSLRVPRPPPLYSHRMRILRQGLREHAAPYFQQLRQTTAPRLLQFPELRLVQFDSGKLEALAILLQKLKSEGRRVLILSQMILMLDILEMFLNFHYLTYVRIDENASSEQRQELMRSFNRDRRIFCAILSTHSRTTGINLVEADTVVFYDNDLNPVMDAKAQEWCDRIGRCKDIHIYRLVSGNSIEEKLLKNGTKDLIREVAAQGNDYSMAFLTQRTIQELFEVYSPMDDAGFPVKAEEFVVLSQEPSVTETIAPKIARPFIEALKSIEYLEEDAQKSAQEGVLGPHTDALSSDSENMPCDEEPSQLEELADFMEQLTPIEKYALNYLELFHTSIEQEKERNSEDAVMTAVRAWEFWNLKTLQEREARLRLEQEEAELLTYTREDAYSMEYVYEDVDGQTEVMPLWTPPTPPQDDSDIYLDSVMCLMYEATPIPEAKLPPVYVRKERKRHKTDPSAAGRKKKQRHGEAVVPPRSLFDRATPGLLKIRREGKEQKKNILLKQQVPFAKPLPTFAKPTAEPGQDNPEWLISEDWALLQAVKQLLELPLNLTIVSPAHTPNWDLVSDVVNSCSRIYRSSKQCRNRYENVIIPREEGKSKNNRPLRTSQIYAQDENATHTQLYTSHFDLMKMTAGKRSPPIKPLLGMNPFQKNPKHASVLAESGINYDKPLPPIQVASLRAERIAKEKKALADQQKAQQPAVAQPPPPQPQPPPPPQQPPPPLPQPQAAGSQPPAGPPAVQPQPQPQPQTQPQPVQAPAKAQPAITTGGSAAVLAGTIKTSVTGTSMPTGAVSGNVIVNTIAGVPAATFQSINKRLASPVAPGALTTPGGSAPAQVVHTQPPPRAVGSPATATPDLVSMATTQGVRAVTSVTASAVVTTNLTPVQTPARSLVPQVSQATGVQLPGKTITPAHFQLLRQQQQQQQQQQQQQQQQQQQQQQQQQQQQQTTTTSQVQVPQIQGQAQSPAQIKAVGKLTPEHLIKMQKQKLQMPPQPPPPQAQSAPPQPTAQVQVQTSQPPQQQSPQLTTVTAPRPGALLTGTTVANLQVARLTRVPTSQLQAQGQMQTQAPQPAQVALAKPPVVSVPAAVVSSPGVTTLPMNVAGISVAIGQPQKAAGQTVVAQPVHMQQLLKLKQQAVQQQKAIQPQAAQGPAAVQQKITAQQITTPGAQQKVAYAAQPALKTQFLTTPISQAQKLAGAQQVQTQIQVAKLPQVVQQQTPVASIQQVASASQQASPQTVALTQATAAGQQVQMIPAVTATAQVVQQKLIQQQVVTTASAPLQTPGAPNPAQVPASSDSPSQQPKLQMRVPAVRLKTPTKPPCQ

SEQ ID NO: 11933 - protein, 3123 aa, Homo sapiens
MHHGTGPQNVQHQLQRSRACPGSEGEEQPAHPNPPPSPAAPFAPSASPSAPQSPSYQIQQLMNRSPATGQNVNITLQSVGPVVGGNQQITLAPLPLPSPTSPGFQFSAQPRRFEHGSPSYIQVTSPLSQQVQTQSPTQPSPGPGQALQNVRAGAPGPGLGLCSSSPTGGFVDASVLVRQISLSPSSGGHFVFQDGSGLTQIAQGAQVQLQHPGTPITVRERRPSQPHTQSGGTIHHLGPQSPAAAGGAGLQPLASPSHITTANLPPQISSIIQGQLVQQQQVLQGPPLPRPLGFERTPGVLLPGAGGAAGFGMTSPPPPTSPSRTAVPPGLSSLPLTSVGNTGMKKVPKKLEEIPPASPEMAQMRKQCLDYHYQEMQALKEVFKEYLIELFFLQHFQGNMMDFLAFKKKHYAPLQAYLRQNDLDIEEEEEEEEEEEEKSEVINDEQQALAGSLVAGAGSTVETDLFKRQQAMPSTGMAEQSKRPRLEVGHQGVVFQHPGADAGVPLQQLMPTAQGGMPPTPQAAQLAGQRQSQQQYDPSTGPPVQNAASLHTPLPQLPGRLPPAGVPTAALSSALQFAQQPQVVEAQTQLQIPVKTQQPNVPIPAPPSSQLPIPPSQPAQLALHVPTPGKVQVQASQLSSLPQMVASTRLPVDPAPPCPRPLPTSSTSSLAPVSGSGPGPSPARSSPVNRPSSATNKALSPVTSRTPGVVASAPTKPQSPAQNATSSQDSSQDTLTEQITLENQVHQRIAELRKAGLWSQRRLPKLQEAPRPKSHWDYLLEEMQWMATDFAQERRWKVAAAKKLVRTVVRHHEEKQLREERGKKEEQSRLRRIAASTAREIECFWSNIEQVVEIKLRVELEEKRKKALNLQKVSRRGKELRPKGFDALQESSLDSGMSGRKRKASISLTDDEVDDEEETIEEEEANEGVVDHQTELSNLAKEAELPLLDLMKLYEGAFLPSSQWPRPKPDGEDTSGEEDADDCPGDRESRKDLVLIDSLFIMDQFKAAERMNIGKPNAKDIADVTAVAEAILPKGSARVTTSVKFNAPSLLYGALRDYQKIGLDWLAKLYRKNLNGILADEAGLGKTVQIIAFFAHLACNEGNWGPHLVVVRSCNILKWELELKRWCPGLKILSYIGSHRELKAKRQEWAEPNSFHVCITSYTQFFRGLTAFTRVRWKCLVIDEMQRVKGMTERHWEAVFTLQSQQRLLLIDSPLHNTFLELWTMVHFLVPGISRPYLSSPLRAPSEESQDYYHKVVIRLHRVTQPFILRRTKRDVEKQLTKKYEHVLKCRLSNRQKALYEDVILQPGTQEALKSGHFVNVLSILVRLQRICNHPGLVEPRHPGSSYVAGPLEYPSASLILKALERDFWKEADLSMFDLIGLENKITRHEAELLSKKKIPRKLMEEISTSAAPAARPAAAKLKASRLFQPVQYGQKPEGRTVAFPSTHPPRTAAPTTASAAPQGPLRGRPPIATFSANPEAKAAAAPFQTSQASASAPRHQPASASSTAASPAHPAKLRAQTTAQASTPGQPPPQPQAPSHAAGQSALPQRLVLPSQAQARLPSGEVVKIAQLASITGPQSRVAQPETPVTLQFQGSKFTLSHSQLRQLTAGQPLQLQGSVLQIVSAPGQPYLRAPGPVVMQTVSQAGAVHGALGSKPPAGGPSPAPLTPQVGVPGRVAVNALAVGEPGTASKPASPIGGPTQEEKTRLLKERLDQIYLVNERRCSQAPVYGRDLLRICALPSHGRVQWRGSLDGRRGKEAGPAHSYTSSSESPSELMLTLCRCGESLQDVIDRVAFVIPPVVAAPPSLRVPRPPPLYSHRMRILRQGLREHAAPYFQQLRQTTAPRLLQFPELRLVQFDSGKLEALAILLQKLKSEGRRVLILSQMILMLDILEMFLNFHYLTYVRIDENASSEQRQELMRSFNRDRRIFCAILSTHSRTTGINLVEADTVVFYDNDLNPVMDAKAQEWCDRIGRCKDIHIYRLVSGNSIEEKLLKNGTKDLIREVAAQGNDYSMAFLTQRTIQELFEVYSPMDDAGFPVKAEEFVVLSQEPSVTETIAPKIARPFIEALKSIEYLEEDAQKSAQEGVLGPHTDALSSDSENMPCDEEPSQLEELADFMEQLTPIEKYALNYLELFHTSIEQEKERNSEDAVMTAVRAWEFWNLKTLQEREARLRLEQEEAELLTYTREDAYSMEYVYEDVDGQTEVMPLWTPPTPPQDDSDIYLDSVMCLMYEATPIPEAKLPPVYVRKERKRHKTDPSAAGRKKKQRHGEAVVPPRSLFDRATPGLLKIRREGKEQKKNILLKQQVPFAKPLPTFAKPTAEPGQDNPEWLISEDWALLQAVKQLLELPLNLTIVSPAHTPNWDLVSDVVNSCSRIYRSSKQCRNRYENVIIPREEGKSKNNRPLRTSQIYAQDENATHTQLYTSHFDLMKMTAGKRSPPIKPLLGMNPFQKNPKHASVLAESGINYDKPLPPIQVASLRAERIAKEKKALADQQKAQQPAVAQPPPPQPQPPPPPQQPPPPLPQPQAAGSQPPAGPPAVQPQPQPQPQTQPQPVQAPAKAQPAITTGGSAAVLAGTIKTSVTGTSMPTGAVSGNVIVNTIAGVPAATFQSINKRLASPVAPGALTTPGGSAPAQVVHTQPPPRAVGSPATATPDLVSMATTQGVRAVTSVTASAVVTTNLTPVQTPARSLVPQVSQATGVQLPGKTITPAHFQLLRQQQQQQQQQQQQQQQQQQQQQQQQQQQQQTTTTSQVQVPQIQGQAQSPAQIKAVGKLTPEHLIKMQKQKLQMPPQPPPPQAQSAPPQPTAQVQVQTSQPPQQQSPQLTTVTAPRPGALLTGTTVANLQVARLTRVPTSQLQAQGQMQTQAPQPAQVALAKPPVVSVPAAVVSSPGVTTLPMNVAGISVAIGQPQKAAGQTVVAQPVHMQQLLKLKQQAVQQQKAIQPQAAQGPAAVQQKITAQQITTPGAQQKVAYAAQPALKTQFLTTPISQAQKLAGAQQVQTQIQVAKLPQVVQQQTPVASIQQVASASQQASPQTVALTQATAAGQQVQMIPAVTATAQVVQQKLIQQQVVTTASAPLQTPGAPNPAQVPASSDSPSQQPKLQMRVPAVRLKTPTKPPCQ

SEQ ID NO: 11934 - protein, 3086 aa, Homo sapiens
MHHGTGPQNVQHQLQRSRACPGSEGEEQPAHPNPPPSPAAPFAPSASPSAPQSPSYQIQQLMNRSPATGQNVNITLQSVGPVVGGNQQITLAPLPLPSPTSPGFQFSAQPRRFEHGSPSYIQVTSPLSQQVQTQSPTQPSPGPGQALQNVRAGAPGPGLGLCSSSPTGGFVDASVLVRQISLSPSSGGHFVFQDGSGLTQIAQGAQVQLQHPGTPITVRERRPSQPHTQSGGTIHHLGPQSPAAAGGAGLQPLASPSHITTANLPPQISSIIQGQLVQQQQVLQGPPLPRPLGFERTPGVLLPGAGGAAGFGMTSPPPPTSPSRTAVPPGLSSLPLTSVGNTGMKKVPKKLEEIPPASPEMAQMRKQCLDYHYQEMQALKEVFKEYLIELFFLQHFQGNMMDFLAFKKKHYAPLQAYLRQNDLDIEEEEEEEEEEEEKSEVINDEQALAGSLVAGAGSTVETDLFKRQQAMPSTGMAGGMPPTPQAAQLAGQRQSQQQYDPSTGPPVQNAASLHTPLPQLPGRLPPAGVPTAALSSALQFAQQPQVVEAQTQLQIPVKTQQPNVPIPAPPSSQLPIPPSQPAQLALHVPTPGKVQVQASQLSSLPQMVASTRLPVDPAPPCPRPLPTSSTSSLAPVSGSGPGPSPARSSPVNRPSSATNKALSPVTSRTPGVVASAPTKPQSPAQNATSSQDSSQDTLTEQITLENQVHQRIAELRKAGLWSQRRLPKLQEAPRPKSHWDYLLEEMQWMATDFAQERRWKVAAAKKLVRTVVRHHEEKQLREERGKKEEQSRLRRIAASTAREIECFWSNIEQVVEIKLRVELEEKRKKALNLQKVSRRGKELRPKGFDALQESSLDSGMSGRKRKASISLTDDEVDDEEETIEEEEANEGVVDHQTELSNLAKEAELPLLDLMKLYEGAFLPSSQWPRPKPDGEDTSGEEDADDCPGDRESRKDLVLIDSLFIMDQFKAAERMNIGKPNAKDIADVTAVAEAILPKGSARVTTSVKFNAPSLLYGALRDYQKIGLDWLAKLYRKNLNGILADEAGLGKTVQIIAFFAHLACNEGNWGPHLVVVRSCNILKWELELKRWCPGLKILSYIGSHRELKAKRQEWAEPNSFHVCITSYTQFFRGLTAFTRVRWKCLVIDEMQRVKGMTERHWEAVFTLQSQQRLLLIDSPLHNTFLELWTMVHFLVPGISRPYLSSPLRAPSEESQDYYHKVVIRLHRVTQPFILRRTKRDVEKQLTKKYEHVLKCRLSNRQKALYEDVILQPGTQEALKSGHFVNVLSILVRLQRICNHPGLVEPRHPGSSYVAGPLEYPSASLILKALERDFWKEADLSMFDLIGLENKITRHEAELLSKKKIPRKLMEEISTSAAPAARPAAAKLKASRLFQPVQYGQKPEGRTVAFPSTHPPRTAAPTTASAAPQGPLRGRPPIATFSANPEAKAAAAPFQTSQASASAPRHQPASASSTAASPAHPAKLRAQTTAQASTPGQPPPQPQAPSHAAGQSALPQRLVLPSQAQARLPSGEVVKIAQLASITGPQSRVAQPETPVTLQFQGSKFTLSHSQLRQLTAGQPLQLQGSVLQIVSAPGQPYLRAPGPVVMQTVSQAGAVHGALGSKPPAGGPSPAPLTPQVGVPGRVAVNALAVGEPGTASKPASPIGGPTQEEKTRLLKERLDQIYLVNERRCSQAPVYGRDLLRICALPSHGRVQWRGSLDGRRGKEAGPAHSYTSSSESPSELMLTLCRCGESLQDVIDRVAFVIPPVVAAPPSLRVPRPPPLYSHRMRILRQGLREHAAPYFQQLRQTTAPRLLQFPELRLVQFDSGKLEALAILLQKLKSEGRRVLILSQMILMLDILEMFLNFHYLTYVRIDENASSEQRQELMRSFNRDRRIFCAILSTHSRTTGINLVEADTVVFYDNDLNPVMDAKAQEWCDRIGRCKDIHIYRLVSGNSIEEKLLKNGTKDLIREVAAQGNDYSMAFLTQRTIQELFEVYSPMDDAGFPVKAEEFVVLSQEPSVTETIAPKIARPFIEALKSIEYLEEDAQKSAQEGVLGPHTDALSSDSENMPCDEEPSQLEELADFMEQLTPIEKYALNYLELFHTSIEQEKERNSEDAVMTAVRAWEFWNLKTLQEREARLRLEQEEAELLTYTREDAYSMEYVYEDVDGQTEVMPLWTPPTPPQDDSDIYLDSVMCLMYEATPIPEAKLPPVYVRKERKRHKTDPSAAGRKKKQRHGEAVVPPRSLFDRATPGLLKIRREGKEQKKNILLKQQVPFAKPLPTFAKPTAEPGQDNPEWLISEDWALLQAVKQLLELPLNLTIVSPAHTPNWDLVSDVVNSCSRIYRSSKQCRNRYENVIIPREEGKSKNNRPLRTSQIYAQDENATHTQLYTSHFDLMKMTAGKRSPPIKPLLGMNPFQKNPKHASVLAESGINYDKPLPPIQVASLRAERIAKEKKALADQQKAQQPAVAQPPPPQPQPPPPPQQPPPPLPQPQAAGSQPPAGPPAVQPQPQPQPQTQPQPVQAPAKAQPAITTGGSAAVLAGTIKTSVTGTSMPTGAVSGNVIVNTIAGVPAATFQSINKRLASPVAPGALTTPGGSAPAQVVHTQPPPRAVGSPATATPDLVSMATTQGVRAVTSVTASAVVTTNLTPVQTPARSLVPQVSQATGVQLPGKTITPAHFQLLRQQQQQQQQQQQQQQQQQQQQQQQQQQQQQTTTTSQVQVPQIQGQAQSPAQIKAVGKLTPEHLIKMQKQKLQMPPQPPPPQAQSAPPQPTAQVQVQTSQPPQQQSPQLTTVTAPRPGALLTGTTVANLQVARLTRVPTSQLQAQGQMQTQAPQPAQVALAKPPVVSVPAAVVSSPGVTTLPMNVAGISVAIGQPQKAAGQTVVAQPVHMQQLLKLKQQAVQQQKAIQPQAAQGPAAVQQKITAQQITTPGAQQKVAYAAQPALKTQFLTTPISQAQKLAGAQQVQTQIQVAKLPQVVQQQTPVASIQQVASASQQASPQTVALTQATAAGQQVQMIPAVTATAQVVQQKLIQQQVVTTASAPLQTPGAPNPAQVPASSDSPSQQPKLQMRVPAVRLKTPTKPPCQ

SEQ ID NO: 11935 - protein, 3042 aa, Homo sapiens
MHHGTGPQNVQHQLQRSRACPGSEGEEQPAHPNPPPSPAAPFAPSASPSAPQSPSYQIQQLMNRSPATGQNVNITLQSVGPVVGGNQQITLAPLPLPSPTSPGFQFSAQPRRFEHGSPSYIQVTSPLSQQVQTQSPTQPSPGPGQALQNVRAGAPGPGLGLCSSSPTGGFVDASVLVRQISLSPSSGGHFVFQDGSGLTQIAQGAQVQLQHPGTPITVRERRPSQPHTQSGGTIHHLGPQSPAAAGGAGLQPLASPSHITTANLPPQISSIIQGQLVQQQQVLQGPPLPRPLGFERTPGVLLPGAGGAAGFGMTSPPPPTSPSRTAVPPGLSSLPLTSVGNTGMKKVPKKLEEIPPASPEMAQMRKQCLDYHYQEMQALKEVFKEYLIELFFLQHFQGNMMDFLAFKKKHYAPLQAYLRQNDLDIEEEEEEEEEEEEKSEVINDEQQALAGSLVAGAGSTVETDLFKRQQAMPSTGMAEQSKRPRLEVGHQGVVFQHPGADAGVPLQQLMPTAQGGMPPTPQAAQLAGQRQSQQQYDPSTGPPVQNAASLHTPLPQLPGRLPPAGVPTAALSSALQFAQQPQVVEAQTQLQIPVKTQQPNVPIPAPPSSQLPIPPSQPAQLALHVPTPGKVQVQASQLSSLPQMVASTRLPVDPAPPCPRPLPTSSTSSLAPVSGSGPGPSPARSSPVNRPSSATNKALSPVTSRTPGVVASAPTKPQSPAQNATSSQDSSQDTLTEQITLENQVHQRIAELRKAGLWSQRRLPKLQEAPRPKSHWDYLLEEMQWMATDFAQERRWKVAAAKKLVRTVVRHHEEKQLREERGKKEEQSRLRRIAASTAREIECFWSNIEQVVEIKLRVELEEKRKKALNLQKVSRRGKELRPKGFDALQESSLDSGMSGRKRKASISLTDDEVDDEEETIEEEEANEGVVDHQTELSNLAKEAELPLLDLMKLYEGAFLPSSQWPRPKPDGEDTSGEEDADDCPGDRESRKDLVLIDSLFIMDQFKAAERMNIGKPNAKDIADVTAVAEAILPKGSARVTTSVKFNAPSLLYGALRDYQKIGLDWLAKLYRKNLNGILADEAGLGKTVQIIAFFAHLACNEGNWGPHLVVVRSCNILKWELELKRWCPGLKILSYIGSHRELKAKRQEWAEPNSFHVCITSYTQFFRGLTAFTRVRWKCLVIDEMQRVKGMTERHWEAVFTLQSQQRLLLIDSPLHNTFLELWTMVHFLVPGISRPYLSSPLRAPSEESQDYYHKVVIRLHRVTQPFILRRTKRDVEKQLTKKYEHVLKCRLSNRQKALYEDVILQPGTQEALKSGHFVNVLSILVRLQRICNHPGLVEPRHPGSSYVAGPLEYPSASLILKALERDFWKEADLSMFDLIGLENKITRHEAELLSKKKIPRKLMEEISTSAAPAARPAAAKLKASRLFQPVQYGQKPEGRTVAFPSTHPPRTAAPTTASAAPQGPLRGRPPIATFSANPEAKGGEVVKIAQLASITGPQSRVAQPETPVTLQFQGSKFTLSHSQLRQLTAGQPLQLQGSVLQIVSAPGQPYLRAPGPVVMQTVSQAGAVHGALGSKPPAGGPSPAPLTPQVGVPGRVAVNALAVGEPGTASKPASPIGGPTQEEKTRLLKERLDQIYLVNERRCSQAPVYGRDLLRICALPSHGRVQWRGSLDGRRGKEAGPAHSYTSSSESPSELMLTLCRCGESLQDVIDRVAFVIPPVVAAPPSLRVPRPPPLYSHRMRILRQGLREHAAPYFQQLRQTTAPRLLQFPELRLVQFDSGKLEALAILLQKLKSEGRRVLILSQMILMLDILEMFLNFHYLTYVRIDENASSEQRQELMRSFNRDRRIFCAILSTHSRTTGINLVEADTVVFYDNDLNPVMDAKAQEWCDRIGRCKDIHIYRLVSGNSIEEKLLKNGTKDLIREVAAQGNDYSMAFLTQRTIQELFEVYSPMDDAGFPVKAEEFVVLSQEPSVTETIAPKIARPFIEALKSIEYLEEDAQKSAQEGVLGPHTDALSSDSENMPCDEEPSQLEELADFMEQLTPIEKYALNYLELFHTSIEQEKERNSEDAVMTAVRAWEFWNLKTLQEREARLRLEQEEAELLTYTREDAYSMEYVYEDVDGQTEVMPLWTPPTPPQDDSDIYLDSVMCLMYEATPIPEAKLPPVYVRKERKRHKTDPSAAGRKKKQRHGEAVVPPRSLFDRATPGLLKIRREGKEQKKNILLKQQVPFAKPLPTFAKPTAEPGQDNPEWLISEDWALLQAVKQLLELPLNLTIVSPAHTPNWDLVSDVVNSCSRIYRSSKQCRNRYENVIIPREEGKSKNNRPLRTSQIYAQDENATHTQLYTSHFDLMKMTAGKRSPPIKPLLGMNPFQKNPKHASVLAESGINYDKPLPPIQVASLRAERIAKEKKALADQQKAQQPAVAQPPPPQPQPPPPPQQPPPPLPQPQAAGSQPPAGPPAVQPQPQPQPQTQPQPVQAPAKAQPAITTGGSAAVLAGTIKTSVTGTSMPTGAVSGNVIVNTIAGVPAATFQSINKRLASPVAPGALTTPGGSAPAQVVHTQPPPRAVGSPATATPDLVSMATTQGVRAVTSVTASAVVTTNLTPVQTPARSLVPQVSQATGVQLPGKTITPAHFQLLRQQQQQQQQQQQQQQQQQQQQQQQQQQQQQTTTTSQVQVPQIQGQAQSPAQIKAVGKLTPEHLIKMQKQKLQMPPQPPPPQAQSAPPQPTAQVQVQTSQPPQQQSPQLTTVTAPRPGALLTGTTVANLQVARLTRVPTSQLQAQGQMQTQAPQPAQVALAKPPVVSVPAAVVSSPGVTTLPMNVAGISVAIGQPQKAAGQTVVAQPVHMQQLLKLKQQAVQQQKAIQPQAAQGPAAVQQKITAQQITTPGAQQKVAYAAQPALKTQFLTTPISQAQKLAGAQQVQTQIQVAKLPQVVQQQTPVASIQQVASASQQASPQTVALTQATAAGQQVQMIPAVTATAQVVQQKLIQQQVVTTASAPLQTPGAPNPAQVPASSDSPSQQPKLQMRVPAVRLKTPTKPPCQ

SEQ ID NO: 11936 - protein, 3122 aa, Homo sapiens
MHHGTGPQNVQHQLQRSRACPGSEGEEQPAHPNPPPSPAAPFAPSASPSAPQSPSYQIQQLMNRSPATGQNVNITLQSVGPVVGGNQQITLAPLPLPSPTSPGFQFSAQPRRFEHGSPSYIQVTSPLSQQVQTQSPTQPSPGPGQALQNVRAGAPGPGLGLCSSSPTGGFVDASVLVRQISLSPSSGGHFVFQDGSGLTQIAQGAQVQLQHPGTPITVRERRPSQPHTQSGGTIHHLGPQSPAAAGGAGLQPLASPSHITTANLPPQISSIIQGQLVQQQQVLQGPPLPRPLGFERTPGVLLPGAGGAAGFGMTSPPPPTSPSRTAVPPGLSSLPLTSVGNTGMKKVPKKLEEIPPASPEMAQMRKQCLDYHYQEMQALKEVFKEYLIELFFLQHFQGNMMDFLAFKKKHYAPLQAYLRQNDLDIEEEEEEEEEEEEKSEVINDEQALAGSLVAGAGSTVETDLFKRQQAMPSTGMAEQSKRPRLEVGHQGVVFQHPGADAGVPLQQLMPTAQGGMPPTPQAAQLAGQRQSQQQYDPSTGPPVQNAASLHTPLPQLPGRLPPAGVPTAALSSALQFAQQPQVVEAQTQLQIPVKTQQPNVPIPAPPSSQLPIPPSQPAQLALHVPTPGKVQVQASQLSSLPQMVASTRLPVDPAPPCPRPLPTSSTSSLAPVSGSGPGPSPARSSPVNRPSSATNKALSPVTSRTPGVVASAPTKPQSPAQNATSSQDSSQDTLTEQITLENQVHQRIAELRKAGLWSQRRLPKLQEAPRPKSHWDYLLEEMQWMATDFAQERRWKVAAAKKLVRTVVRHHEEKQLREERGKKEEQSRLRRIAASTAREIECFWSNIEQVVEIKLRVELEEKRKKALNLQKVSRRGKELRPKGFDALQESSLDSGMSGRKRKASISLTDDEVDDEEETIEEEEANEGVVDHQTELSNLAKEAELPLLDLMKLYEGAFLPSSQWPRPKPDGEDTSGEEDADDCPGDRESRKDLVLIDSLFIMDQFKAAERMNIGKPNAKDIADVTAVAEAILPKGSARVTTSVKFNAPSLLYGALRDYQKIGLDWLAKLYRKNLNGILADEAGLGKTVQIIAFFAHLACNEGNWGPHLVVVRSCNILKWELELKRWCPGLKILSYIGSHRELKAKRQEWAEPNSFHVCITSYTQFFRGLTAFTRVRWKCLVIDEMQRVKGMTERHWEAVFTLQSQQRLLLIDSPLHNTFLELWTMVHFLVPGISRPYLSSPLRAPSEESQDYYHKVVIRLHRVTQPFILRRTKRDVEKQLTKKYEHVLKCRLSNRQKALYEDVILQPGTQEALKSGHFVNVLSILVRLQRICNHPGLVEPRHPGSSYVAGPLEYPSASLILKALERDFWKEADLSMFDLIGLENKITRHEAELLSKKKIPRKLMEEISTSAAPAARPAAAKLKASRLFQPVQYGQKPEGRTVAFPSTHPPRTAAPTTASAAPQGPLRGRPPIATFSANPEAKAAAAPFQTSQASASAPRHQPASASSTAASPAHPAKLRAQTTAQASTPGQPPPQPQAPSHAAGQSALPQRLVLPSQAQARLPSGEVVKIAQLASITGPQSRVAQPETPVTLQFQGSKFTLSHSQLRQLTAGQPLQLQGSVLQIVSAPGQPYLRAPGPVVMQTVSQAGAVHGALGSKPPAGGPSPAPLTPQVGVPGRVAVNALAVGEPGTASKPASPIGGPTQEEKTRLLKERLDQIYLVNERRCSQAPVYGRDLLRICALPSHGRVQWRGSLDGRRGKEAGPAHSYTSSSESPSELMLTLCRCGESLQDVIDRVAFVIPPVVAAPPSLRVPRPPPLYSHRMRILRQGLREHAAPYFQQLRQTTAPRLLQFPELRLVQFDSGKLEALAILLQKLKSEGRRVLILSQMILMLDILEMFLNFHYLTYVRIDENASSEQRQELMRSFNRDRRIFCAILSTHSRTTGINLVEADTVVFYDNDLNPVMDAKAQEWCDRIGRCKDIHIYRLVSGNSIEEKLLKNGTKDLIREVAAQGNDYSMAFLTQRTIQELFEVYSPMDDAGFPVKAEEFVVLSQEPSVTETIAPKIARPFIEALKSIEYLEEDAQKSAQEGVLGPHTDALSSDSENMPCDEEPSQLEELADFMEQLTPIEKYALNYLELFHTSIEQEKERNSEDAVMTAVRAWEFWNLKTLQEREARLRLEQEEAELLTYTREDAYSMEYVYEDVDGQTEVMPLWTPPTPPQDDSDIYLDSVMCLMYEATPIPEAKLPPVYVRKERKRHKTDPSAAGRKKKQRHGEAVVPPRSLFDRATPGLLKIRREGKEQKKNILLKQQVPFAKPLPTFAKPTAEPGQDNPEWLISEDWALLQAVKQLLELPLNLTIVSPAHTPNWDLVSDVVNSCSRIYRSSKQCRNRYENVIIPREEGKSKNNRPLRTSQIYAQDENATHTQLYTSHFDLMKMTAGKRSPPIKPLLGMNPFQKNPKHASVLAESGINYDKPLPPIQVASLRAERIAKEKKALADQQKAQQPAVAQPPPPQPQPPPPPQQPPPPLPQPQAAGSQPPAGPPAVQPQPQPQPQTQPQPVQAPAKAQPAITTGGSAAVLAGTIKTSVTGTSMPTGAVSGNVIVNTIAGVPAATFQSINKRLASPVAPGALTTPGGSAPAQVVHTQPPPRAVGSPATATPDLVSMATTQGVRAVTSVTASAVVTTNLTPVQTPARSLVPQVSQATGVQLPGKTITPAHFQLLRQQQQQQQQQQQQQQQQQQQQQQQQQQQQQTTTTSQVQVPQIQGQAQSPAQIKAVGKLTPEHLIKMQKQKLQMPPQPPPPQAQSAPPQPTAQVQVQTSQPPQQQSPQLTTVTAPRPGALLTGTTVANLQVARLTRVPTSQLQAQGQMQTQAPQPAQVALAKPPVVSVPAAVVSSPGVTTLPMNVAGISVAIGQPQKAAGQTVVAQPVHMQQLLKLKQQAVQQQKAIQPQAAQGPAAVQQKITAQQITTPGAQQKVAYAAQPALKTQFLTTPISQAQKLAGAQQVQTQIQVAKLPQVVQQQTPVASIQQVASASQQASPQTVALTQATAAGQQVQMIPAVTATAQVVQQKLIQQQVVTTASAPLQTPGAPNPAQVPASSDSPSQQPKLQMRVPAVRLKTPTKPPCQ

SEQ ID NO: 11937 - protein, 864 aa, Homo sapiens
MTTEKSLVTEAENSQHQQKEEGEEAINSGQQEPQQEESCQTAAEGDNWCEQKLKASNGDTPTHEDLTKNKERTSESRGLSRLFSSFLKRPKSQVSEEEGKEVESDKEKGEGGQKEIEFGTSLDEEIILKAPIAAPEPELKTDPSLDLHSLSSAETQPAQEELREDPDFEIKEGEGLEECSKIEVKEESPQSKAETELKASQKPIRKHRNMHCKVSLLDDTVYECVVEKHAKGQDLLKRVCEHLNLLEEDYFGLAIWDNATSKTWLDSAKEIKKQVRGVPWNFTFNVKFYPPDPAQLTEDITRYYLCLQLRQDIVAGRLPCSFATLALLGSYTIQSELGDYDPELHGVDYVSDFKLAPNQTKELEEKVMELHKSYRSMTPAQADLEFLENAKKLSMYGVDLHKAKDLEGVDIILGVCSSGLLVYKDKLRINRFPWPKVLKISYKRSSFFIKIRPGEQEQYESTIGFKLPSYRAAKKLWKVCVEHHTFFRLTSTDTIPKSKFLALGSKFRYSGRTQAQTRQASALIDRPAPHFERTASKRASRSLDGAAAVDSADRSPRPTSAPAITQGQVAEGGVLDASAKKTVVPKAQKETVKAEVKKEDEPPEQAEPEPTEAWKVEKTHIEVTVPTSNGDQTQKLAEKTEDLIRMRKKKRERLDGENIYIRHSNLMLEDLDKSQEEIKKHHASISELKKNFMESVPEPRPSEWDKRLSTHSPFRTLNINGQIPTGEGPPLVKTQTVTISDNANAVKSEIPTKDVPIVHTETKTITYEAAQTDDNSGDLDPGVLLTAQTITSETPSSTTTTQITKTVKGGISETRIEKRIVITGDADIDHDQVLVQAIKEAKEQHPDMSVTKVVVHQETEIADE

SEQ ID NO: 11938 - protein, 831 aa, Homo sapiens
MTTEKSLVTEAENSQHQQKEEGEEAINSGQQEPQQEESCQTAAEGDNWCEQKLKASNGDTPTHEDLTKNKERTSESRGLSRLFSSFLKRPKSQVSEEEGKEVESDKEKGEGGQKEIEFGTSLDEEIILKAPIAAPEPELKTDPSLDLHSLSSAETQPAQEELREDPDFEIKEGEGLEECSKIEVKEESPQSKAETELKASQKPIRKHRNMHCKVSLLDDTVYECVVEKHAKGQDLLKRVCEHLNLLEEDYFGLAIWDNATSKTWLDSAKEIKKQVRGVPWNFTFNVKFYPPDPAQLTEDITRYYLCLQLRQDIVAGRLPCSFATLALLGSYTIQSELGDYDPELHGVDYVSDFKLAPNQTKELEEKVMELHKSYRSMTPAQADLEFLENAKKLSMYGVDLHKAKDLEGVDIILGVCSSGLLVYKDKLRINRFPWPKVLKISYKRSSFFIKIRPGEQEQYESTIGFKLPSYRAAKKLWKVCVEHHTFFRLTSTDTIPKSKFLALGSKFRYSGRTQAQTRQASALIDRPAPHFERTASKRASRSLDGAAAVDSADRSPRPTSAPAITQGQVAEGGVLDASAKKTVVPKAQKETVKAEVKKEDEPPEQAEPEPTEAWKKKRERLDGENIYIRHSNLMLEDLDKSQEEIKKHHASISELKKNFMESVPEPRPSEWDKRLSTHSPFRTLNINGQIPTGEGPPLVKTQTVTISDNANAVKSEIPTKDVPIVHTETKTITYEAAQTDDNSGDLDPGVLLTAQTITSETPSSTTTTQITKTVKGGISETRIEKRIVITGDADIDHDQVLVQAIKEAKEQHPDMSVTKVVVHQETEIADE

SEQ ID NO: 11939 - protein, 641 aa, Homo sapiens
MHCKVSLLDDTVYECVVEKHAKGQDLLKRVCEHLNLLEEDYFGLAIWDNATSKTWLDSAKEIKKQVRGVPWNFTFNVKFYPPDPAQLTEDITRYYLCLQLRQDIVAGRLPCSFATLALLGSYTIQSELGDYDPELHGVDYVSDFKLAPNQTKELEEKVMELHKSYRSMTPAQADLEFLENAKKLSMYGVDLHKAKDLEGVDIILGVCSSGLLVYKDKLRINRFPWPKVLKISYKRSSFFIKIRPGEQEQYESTIGFKLPSYRAAKKLWKVCVEHHTFFRLTSTDTIPKSKFLALGSKFRYSGRTQAQTRQASALIDRPAPHFERTASKRASRSLDGAAAVDSADRSPRPTSAPAITQGQVAEGGVLDASAKKTVVPKAQKETVKAEVKKEDEPPEQAEPEPTEAWKVEKTHIEVTVPTSNGDQTQKKRERLDGENIYIRHSNLMLEDLDKSQEEIKKHHASISELKKNFMESVPEPRPSEWDKRLSTHSPFRTLNINGQIPTGEGPPLVKTQTVTISDNANAVKSEIPTKDVPIVHTETKTITYEAAQTDDNSGDLDPGVLLTAQTITSETPSSTTTTQITKTVKGGISETRIEKRIVITGDADIDHDQVLVQAIKEAKEQHPDMSVTKVVVHQETEIADE

SEQ ID NO: 11940 - protein, 588 aa, Homo sapiens
MHCKVSLLDDTVYECVVEKHAKGQDLLKRVCEHLNLLEEDYFGLAIWDNATSKTWLDSAKEIKKQVRGVPWNFTFNVKFYPPDPAQLTEDITRYYLCLQLRQDIVAGRLPCSFATLALLGSYTIQSELGDYDPELHGVDYVSDFKLAPNQTKELEEKVMELHKSYRSMTPAQADLEFLENAKKLSMYGVDLHKAKDLEGVDIILGVCSSGLLVYKDKLRINRFPWPKVLKISYKRSSFFIKIRPGEQEQYESTIGFKLPSYRAAKKLWKVCVEHHTFFRLTSTDTIPKSKFLALGSKFRYSGRTQAQTRQASALIDRPAPHFERTASKRASRSLDGAAAVDSADRSPRPTSAPAITQGQVAEGGVLDASAKKTVVPKAQKETVKAEVKKEDEPPEQAEPEPTEAWKKKRERLDGENIYIRHSNLMLEDLDKSQEEIKKHHASISELKKNFMESVPEPRPSEWDKRLSTHSPFRTLNINGQIPTGEGPPLVKTQTVTISDNANAVKSEIPTKDVPIVHTETKTITYEAAQTVKGGISETRIEKRIVITGDADIDHDQVLVQAIKEAKEQHPDMSVTKVVVHQETEIADE

SEQ ID NO: 11941 - protein, 775 aa, Homo sapiens
MTTEKSLVTEAENSQHQQKEEGEEAINSGQQEPQQEESCQTAAEGDNWCEQKLKASNGDTPTHEDLTKNKERTSESRGLSRLFSSFLKRPKSQVSEEEGKEVESDKEKGEGGQKEIEFGTSLDEEIILKAPIAAPEPELKTDPSLDLHSLSSAETQPAQEELREDPDFEIKEGEGLEECSKIEVKEESPQSKAETELKASQKPIRKHRNMHCKVSLLDDTVYECVVETWLDSAKEIKKQVRGVPWNFTFNVKFYPPDPAQLTEDITRYYLCLQLRQDIVAGRLPCSFATLALLGSYTIQSELGDYDPELHGVDYVSDFKLAPNQTKELEEKVMELHKSYRSMTPAQADLEFLENAKKLSMYGVDLHKAKDLEGVDIILGVCSSGLLVYKDKLRINRFPWPKVLKISYKRSSFFIKIRPGEQEQYESTIGFKLPSYRAAKKLWKVCVEHHTFFRLTSTDTIPKSKFLALGSKFRYSGRTQAQTRQASALIDRPAPHFERTASKRASRSLDGAAAVDSADRSPRPTSAPAITQGQVAEGGVLDASAKKTVVPKAQKETVKAEVKKEDEPPEQAEPEPTEAWKDLDKSQEEIKKHHASISELKKNFMESVPEPRPSEWDKRLSTHSPFRTLNINGQIPTGEGPPLVKTQTVTISDNANAVKSEIPTKDVPIVHTETKTITYEAAQTDDNSGDLDPGVLLTAQTITSETPSSTTTTQITKTVKGGISETRIEKRIVITGDADIDHDQVLVQAIKEAKEQHPDMSVTKVVVHQETEIADE

SEQ ID NO: 11942 - protein, 566 aa, Homo sapiens
MHCKVSLLDDTVYECVVETWLDSAKEIKKQVRGVPWNFTFNVKFYPPDPAQLTEDITRYYLCLQLRQDIVAGRLPCSFATLALLGSYTIQSELGDYDPELHGVDYVSDFKLAPNQTKELEEKVMELHKSYRSMTPAQADLEFLENAKKLSMYGVDLHKAKDLEGVDIILGVCSSGLLVYKDKLRINRFPWPKVLKISYKRSSFFIKIRPGEQEQYESTIGFKLPSYRAAKKLWKVCVEHHTFFRLTSTDTIPKSKFLALGSKFRYSGRTQAQTRQASALIDRPAPHFERTASKRASRSLDGAAAVDSADRSPRPTSAPAITQGQVAEGGVLDASAKKTVVPKAQKETVKAEVKKEDEPPEQAEPEPTEAWKDLDKSQEEIKKHHASISELKKNFMESVPEPRPSEWDKRLSTHSPFRTLNINGQIPTGEGPPLVKTQTVTISDNANAVKSEIPTKDVPIVHTETKTITYEAAQTDDNSGDLDPGVLLTAQTITSETPSSTTTTQITKTVKGGISETRIEKRIVITGDADIDHDQVLVQAIKEAKEQHPDMSVTKVVVHQETEIADE

SEQ ID NO: 11943 - protein, 720 aa, Homo sapiens
MTTEKSLVTEAENSQHQQKEEGEEAINSGQQEPQQEESCQTAAEGDNWCEQKLKASNGDTPTHEDLTKNKERTSESRGLSRLFSSFLKRPKSQVSEEEGKEVESDKEKGEGGQKEIEFGTSLDEEIILKAPIAAPEPELKTDPSLDLHSLSSAETQPAQEELREDPDFEIKEGEGLEECSKIEVKEESPQSKAETELKASQKPIRKHRNMHCKVSLLDDTVYECVVEKHAKGQDLLKRVCEHLNLLEEDYFGLAIWDNATSKTWLDSAKEIKKQVRGVPWNFTFNVKFYPPDPAQLTEDITRYYLCLQLRQDIVAGRLPCSFATLALLGSYTIQSELGDYDPELHGVDYVSDFKLAPNQTKELEEKVMELHKSYRSMTPAQADLEFLENAKKLSMYGVDLHKAKDLEGVDIILGVCSSGLLVYKDKLRINRFPWPKVLKISYKRSSFFIKIRPGEQEQYESTIGFKLPSYRAAKKLWKVCVEHHTFFRLTSTDTIPKSKFLALGSKFRYSGRTQAQTRQASALIDRPAPHFERTASKRASRSLDGAAAVDSADRSPRPTSAPAITQGQVAEGGVLDASAKKTVVPKAQKETVKAEVKKEDEPPEQAEPEPTEAWKVEKTHIEVTVPTSNGDQTQKKRERLDGENIYIRHSNLMLEDLDKSQEEIKKHHASISELKKNFMESVPEPRPSEWDKRLSTHSPFRTLNINGQIPTGEGVSTLST

SEQ ID NO: 11944 - protein, 541 aa, Homo sapiens
MGHSPPVLPLCASVSLLGGLTFGYELAVISGALLPLQLDFGLSCLEQEFLVGSLLLGALLASLVGGFLIDCYGRKQAILGSNLVLLAGSLTLGLAGSLAWLVLGRAVVGFAISLSSMACCIYVSELVGPRQRGVLVSLYEAGITVGILLSYALNYALAGTPWGWRHMFGWATAPAVLQSLSLLFLPAGTDETATHKDLIPLQGGEAPKLGPGRPRYSFLDLFRARDNMRGRTTVGLGLVLFQQLTGQPNVLCYASTIFSSVGFHGGSSAVLASVGLGAVKVAATLTAMGLVDRAGRRALLLAGCALMALSVSGIGLVSFAVPMDSGPSCLAVPNATGQTGLPGDSGLLQDSSLPPIPRTNEDQREPILSTAKKTKPHPRSGDPSAPPRLALSSALPGPPLPARGHALLRWTALLCLMVFVSAFSFGFGPVTWLVLSEIYPVEIRGRAFAFCNSFNWAANLFISLSFLDLIGTIGLSWTFLLYGLTAVLGLGFIYLFVPETKGQSLAEIDQQFQKRRFTLSFGHRQNSTGIPYSRIEISAAS

SEQ ID NO: 11945 - protein, 626 aa, Homo sapiens
MGPEAWVRPLKTAPKPGEAIRLILFIYLSCFFLPVMSSEPSYSFLLTSFTTGRVFANTTWRAGTSKEVSFAVDLCVLFPEPARTHEEQHNLPVIGAGSVDLAAGFGHSGSQTGCGSSKGAEKGLQNVDFYLCPGNHPDASCRDTYQFFCPDWTCVTLATYSGGSTRSSTLSISRVPHPKLCTRKNCNPLTITVHDPNAAQWYYGMSWGLRLYIPGFDVGTMFTIQKKILVSWSSPKPIGPLTDLGDPIFQKHPDKVDLTVPLPFLVPRPQLQQQHLQPSLMSILGGVHHLLNLTQPKLAQDCWLCLKAKPPYYVGLGVEATLKRGPLSCHTRPRALTIGDVSGNASCLISTGYNLSASPFQATCNQSLLTSISTSVSYQAPNNTWLACTSGLTRCINGTEPGPLLCVLVHVLPQVYVYSGPEGRQLIAPPELHPRLHQAVPLLVPLLAGLSIAGSAAIGTAALVQGETGLISLSQQVDADFSNLQSAIDILHSQVESLAEVVLQNCRCLDLLFLSQGGLCAALGESCCFYANQSGVIKGTVKKVRENLDRHQQERENNIPWYQSMFNWNPWLTTLITGLAGPLLILLLSLIFGPCILNSFLNFIKQRIASVKLTYLKTQYDTLVNN

SEQ ID NO: 11946 - protein, 1052 aa, Homo sapiens
MAAAYLDPNLNHTPNSSTKTHLGTGMERSPGAMERVLKVFHYFESNSEPTTWASIIRHGDATDVRGIIQKIVDSHKVKHVACYGFRLSHLRSEEVHWLHVDMGVSSVREKYELAHPPEEWKYELRIRYLPKGFLNQFTEDKPTLNFFYQQVKSDYMLEIADQVDQEIALKLGCLEIRRSYWEMRGNALEKKSNYEVLEKDVGLKRFFPKSLLDSVKAKTLRKLIQQTFRQFANLNREESILKFFEILSPVYRFDKECFKCALGSSWIISVELAIGPEEGISYLTDKGCNPTHLADFTQVQTIQYSNSEDKDRKGMLQLKIAGAPEPLTVTAPSLTIAENMADLIDGYCRLVNGTSQSFIIRPQKEGERALPSIPKLANSEKQGMRTHAVSVSETDDYAEIIDEEDTYTMPSTRDYEIQRERIELGRCIGEGQFGDVHQGIYMSPENPALAVAIKTCKNCTSDSVREKFLQEALTMRQFDHPHIVKLIGVITENPVWIIMELCTLGELRSFLQVRKYSLDLASLILYAYQLSTALAYLESKRFVHRDIAARNVLVSSNDCVKLGDFGLSRYMEDSTYYKASKGKLPIKWMAPESINFRRFTSASDVWMFGVCMWEILMHGVKPFQGVKNNDVIGRIENGERLPMPPNCPPTLYSLMTKCWAYDPSRRPRFTELKAQLSTILEEEKAQQEERMRMESRRQATVSWDSGGSDEAPPKPSRPGYPSPRSSEGFYPSPQHMVQTNHYQVSGYPGSHGITAMAGSIYPGQASLLDQTDSWNHRPQEIAMWQPNVEDSTVLDLRGIGQVLPTHLMEERLIRQQQEMEEDQRWLEKEERFLKPDVRLSRGSIDREDGSLQGPIGNQHIYQPVGKPDPAAPPKKPPRPGAPGHLGSLASLSSPADSYNEGVKLQPQEISPPPTANLDRSNDKVYENVTGLVKAVIEMSSKIQPAPPEEYVPMVKEVGLALRTLLATVDETIPLLPASTHREIEMAQKLLNSDLGELINKMKLAQQYVMTSLQQEYKKQMLTAAHALAVDAKNLLDVIDQARLKMLGQTRPH

SEQ ID NO: 11947 - protein, 879 aa, Homo sapiens
MSDYWVVGKKSNYEVLEKDVGLKRFFPKSLLDSVKAKTLRKLIQQTFRQFANLNREESILKFFEILSPVYRFDKECFKCALGSSWIISVELAIGPEEGISYLTDKGCNPTHLADFTQVQTIQYSNSEDKDRKGMLQLKIAGAPEPLTVTAPSLTIAENMADLIDGYCRLVNGTSQSFIIRPQKEGERALPSIPKLANSEKQGMRTHAVSVSETDDYAEIIDEEDTYTMPSTRDYEIQRERIELGRCIGEGQFGDVHQGIYMSPENPALAVAIKTCKNCTSDSVREKFLQEACHYTSLHWNWCRYISDPNVDACPDPRNAELTMRQFDHPHIVKLIGVITENPVWIIMELCTLGELRSFLQVRKYSLDLASLILYAYQLSTALAYLESKRFVHRDIAARNVLVSSNDCVKLGDFGLSRYMEDSTYYKASKGKLPIKWMAPESINFRRFTSASDVWMFGVCMWEILMHGVKPFQGVKNNDVIGRIENGERLPMPPNCPPTLYSLMTKCWAYDPSRRPRFTELKAQLSTILEEEKAQQEERMRMESRRQATVSWDSGGSDEAPPKPSRPGYPSPRSSEGFYPSPQHMVQTNHYQVSGYPGSHGITAMAGSIYPGQASLLDQTDSWNHRPQEIAMWQPNVEDSTVLDLRGIGQVLPTHLMEERLIRQQQEMEEDQRWLEKEERFLIGNQHIYQPVGKPDPAAPPKKPPRPGAPGHLGSLASLSSPADSYNEGVKLQPQEISPPPTANLDRSNDKVYENVTGLVKAVIEMSSKIQPAPPEEYVPMVKEVGLALRTLLATVDETIPLLPASTHREIEMAQKLLNSDLGELINKMKLAQQYVMTSLQQEYKKQMLTAAHALAVDAKNLLDVIDQARLKMLGQTRPH

SEQ ID NO: 11948 - protein, 554 aa, Homo sapiens
MSDYWVVGKKSNYEVLEKDVGLKRFFPKSLLDSVKAKTLRKLIQQTFRQFANLNREESILKFFEILSPVYRFDKECFKCALGSSWIISVELAIGPEEGISYLTDKGCNPTHLADFTQVQTIQYSNSEDKDRKGMLQLKIAGAPEPLTVTAPSLTIAENMADLIDGYCRLVNGTSQSFIIRPQKEGERALPSIPKLANSEKQGMRTHAVSVSETDDYAEIIDEEDTYTMPSTRDYEIQRERIELGRCIGEGQFGDVHQGIYMSPENPALAVAIKTCKNCTSDSVREKFLQEACHYTSLHWNWCRYISDPNVDACPDPRNAELTMRQFDHPHIVKLIGVITENPVWIIMELCTLGELRSFLQVRKYSLDLASLILYAYQLSTALAYLESKRFVHRDIAARNVLVSSNDCVKLGDFGLSRYMEDSTYYKASKGKLPIKWMAPESINFRRFTSASDVWMFGVCMWEILMHGVKPFQGVKNNDVIGRIENGERLPMPPNCPPTLYSLMTKCWAYDPSRRPRFTELKAQLFQNPAQMLPASGRLPNQPCPERENYSFATF

SEQ ID NO: 11949 - protein, 431 aa, Homo sapiens
MSDYWVVGKKSNYEVLEKDVGLKRFFPKSLLDSVKAKTLRKLIQQTFRQFANLNREESILKFFEILSPVYRFDKECFKCALGSSWIISVELAIGPEEGISYLTDKGCNPTHLADFTQVQTIQYSNSEDKDRKGMLQLKIAGAPEPLTVTAPSLTIAENMADLIDGYCRLVNGTSQSFIIRPQKEGERALPSIPKLANSEKQGMRTHAVSVSETDDYAEIIDEEDTYTMPSTRDYEIQRERIELGRCIGEGQFGDVHQGIYMSPENPALAVAIKTCKNCTSDSVREKFLQEACHYTSLHWNWCRYISDPNVDACPDPRNAELTMRQFDHPHIVKLIGVITENPVWIIMELCTLGELRSFLQVRKYSLDLASLILYAYQLSTALAYLESKRFVHRDIAARNVLVSSNDCVKLGDFGLSRYMEDSTYYKGKKSG

SEQ ID NO: 11950 - protein, 1065 aa, Homo sapiens
MAAAYLDPNLNHTPNSSTKTHLGTGMERSPGAMERVLKVFHYFESNSEPTTWASIIRHGDATDVRGIIQKIVDSHKVKHVACYGFRLSHLRSEEVHWLHVDMGVSSVREKYELAHPPEEWKYELRIRYLPKGFLNQFTEDKPTLNFFYQQVKSDYMLEIADQVDQEIALKLGCLEIRRSYWEMRGNALEKKSNYEVLEKDVGLKRFFPKSLLDSVKAKTLRKLIQQTFRQFANLNREESILKFFEILSPVYRFDKECFKCALGSSWIISVELAIGPEEGISYLTDKGCNPTHLADFTQVQTIQYSNSEDKDRKGMLQLKIAGAPEPLTVTAPSLTIAENMADLIDGYCRLVNGTSQSFIIRPQKEGERALPSIPKLANSEKQGMRTHAVSVSETDDYAEIIDEEDTYTMPSTRDYEIQRERIELGRCIGEGQFGDVHQGIYMSPENPALAVAIKTCKNCTSDSVREKFLQEALTMRQFDHPHIVKLIGVITENPVWIIMELCTLGELRSFLQVRKYSLDLASLILYAYQLSTALAYLESKRFVHRDIAARNVLVSSNDCVKLGDFGLSRYMEDSTYYKASKGKLPIKWMAPESINFRRFTSASDVWMFGVCMWEILMHGVKPFQGVKNNDVIGRIENGERLPMPPNCPPTLYSLMTKCWAYDPSRRPRFTELKAQLSTILEEEKAQQEERMRMESRRQATVSWDSGGSDEAPPKPSRPGYPSPRSSEGFYPSPQHMVQTNHYQVSGYPGSHGITAMAGSIYPGQASLLDQTDSWNHRPQEIAMWQPNVEDSTVLDLRGIGQVLPTHLMEERLIRQQQEMEEDQRWLEKEERFLKPDVRLSRGSIDREDGSLQGPIGNQHIYQPVGKPGKEEKNWAERNPAAPPKKPPRPGAPGHLGSLASLSSPADSYNEGVKPWRLQPQEISPPPTANLDRSNDKVYENVTGLVKAVIEMSSKIQPAPPEEYVPMVKEVGLALRTLLATVDETIPLLPASTHREIEMAQKLLNSDLGELINKMKLAQQYVMTSLQQEYKKQMLTAAHALAVDAKNLLDVIDQARLKMLGQTRPH

SEQ ID NO: 11951 - protein, 360 aa, Homo sapiens
MESRRQATVSWDSGGSDEAPPKPSRPGYPSPRSSEGFYPSPQHMVQTNHYQVSGYPGSHGITAMAGSIYPGQASLLDQTDSWNHRPQEIAMWQPNVEDSTVLDLRGIGQVLPTHLMEERLIRQQQEMEEDQRWLEKEERFLKPDVRLSRGSIDREDGSLQGPIGNQHIYQPVGKPDPAAPPKKPPRPGAPGHLGSLASLSSPADSYNEGVKLQPQEISPPPTANLDRSNDKVYENVTGLVKAVIEMSSKIQPAPPEEYVPMVKEVGLALRTLLATVDETIPLLPASTHREIEMAQKLLNSDLGELINKMKLAQQYVMTSLQQEYKKQMLTAAHALAVDAKNLLDVIDQARLKMLGQTRPH

SEQ ID NO: 11952 - protein, 1006 aa, Homo sapiens
MAAAYLDPNLNHTPNSSTKTHLGTGMERSPGAMERVLKVFHYFESNSEPTTWASIIRHGDATDVRGIIQKIVDSHKVKHVACYGFRLSHLRSEEVHWLHVDMGVSSVREKYELAHPPEEWKYELRIRYLPKGFLNQFTEDKPTLNFFYQQVKSDYMLEIADQVDQEIALKLGCLEIRRSYWEMRGNALEKKSNYEVLEKDVGLKRFFPKSLLDSVKAKTLRKLIQQTFRQFANLNREESILKFFEILSPVYRFDKECFKCALGSSWIISVELAIGPEEGISYLTDKGCNPTHLADFTQVQTIQYSNSEDKDRKGMLQLKIAGAPEPLTVTAPSLTIAENMADLIDGYCRLVNGTSQSFIIRPQKEGERALPSIPKLANSEKQGMRTHAVSVSETDDYAEIIDEEDTYTMPSTRDYEIQRERIELGRCIGEGQFGDVHQGIYMSPENPALAVAIKTCKNCTSDSVREKFLQEALTMRQFDHPHIVKLIGVITENPVWIIMELCTLGELRSFLQVRKYSLDLASLILYAYQLSTALAYLESKRFVHRDIAARNVLVSSNDCVKLGDFGLSRYMEDSTYYKASKGKLPIKWMAPESINFRRFTSASDVWMFGVCMWEILMHGVKPFQGVKNNDVIGRIENGERLPMPPNCPPTLYSLMTKCWAYDPSRRPRFTELKAQLSTILEEEKAQQEERMRMESRRQATVSWDSGGSDEAPPKPSRPGYPSPRSSEGFYPSPQHMVQTNHYQDSTVLDLRGIGQVLPTHLMEERLIRQQQEMEEDQRWLEKEERFLKPDVRLSRGSIDREDGSLQGPIGNQHIYQPVGKPDPAAPPKKPPRPGAPGHLGSLASLSSPADSYNEGVKLQPQEISPPPTANLDRSNDKVYENVTGLVKAVIEMSSKIQPAPPEEYVPMVKEVGLALRTLLATVDETIPLLPASTHREIEMAQKLLNSDLGELINKMKLAQQYVMTSLQQEYKKQMLTAAHALAVDAKNLLDVIDQARLKMLGQTRPH

SEQ ID NO: 11953 - protein, 439 aa, Homo sapiens
MVPSSPRALFLLLLILACPEPRASQNCLSKQQLLSAIRQLQQLLKGQETRFAEGIRHMKSRLAALQNSVGRVGPDALPVSCPALNTPADGRKFGSKYLVDHEVHFTCNPGFRLVGPSSVVCLPNGTWTGEQPHCRGISECSSQPCQNGGTCVEGVNQYRCICPPGRTGNRCQHQAQTAAPEGSVAGDSAFSRAPRCAQVERAQHCSCEAGFHLSGAAGDSVCQDVNECELYGQEGRPRLCMHACVNTPGSYRCTCPGGYRTLADGKSCEDVDECVGLQPVCPQGTTCINTGGSFQCVSPECPEGSGNVSYVKTSPFQCERNPCPMDSRPCRHLPKTISFHYLSLPSNLKTPITLFRMATASAPGRAGPNSLRFGIVGGNSRGHFVMQRSDRQTGDLILVQNLEGPQTLEVDVDMSEYLDRSFQANHVSKVTIFVSPYDF

SEQ ID NO: 11954 - protein, 393 aa, Homo sapiens
MVPSSPRALFLLLLILACPEPRASQNCLSKQQLLSAIRQLQQLLKGQETRFAEGIRHMKSRLAALQNSVGRVGPDALPVSCPALNTPADGRKFGSKYLVDHEVHFTCNPGFRLVGPSSVVCLPNGTWTGEQPHCRGISECSSQPCQNGGTCVEGVNQYRCICPPGRTGNRCQHQAQTDVNECELYGQEGRPRLCMHACVNTPGSYRCTCPGGYRTLADGKSCEDVDECVGLQPVCPQGTTCINTGGSFQCVSPECPEGSGNVSYVKTSPFQCERNPCPMDSRPCRHLPKTISFHYLSLPSNLKTPITLFRMATASAPGRAGPNSLRFGIVGGNSRGHFVMQRSDRQTGDLILVQNLEGPQTLEVDVDMSEYLDRSFQANHVSKVTIFVSPYDF

SEQ ID NO: 11955 - protein, 382 aa, Homo sapiens
MKSRLAALQNSVGRVGPDALPVSCPALNTPADGRKFGSKYLVDHEVHFTCNPGFRLVGPSSVVCLPNGTWTGEQPHCRGISECSSQPCQNGGTCVEGVNQYRCICPPGRTGNRCQHQAQTAAPEGSVAGDSAFSRAPRCAQVERAQHCSCEAGFHLSGAAGDSVCQDVNECELYGQEGRPRLCMHACVNTPGSYRCTCPGGYRTLADGKSCEDVDECVGLQPVCPQGTTCINTGGSFQCVSPECPEGSGNVSYVKTSPFQCERNPCPMDSRPCRHLPKTISFHYLSLPSNLKTPITLFRMATASAPGRAGPNSLRFGIVGGNSRGHFVMQRSDRQTGDLILVQNLEGPQTLEVDVDMSEYLDRSFQANHVSKVTIFVSPYDF

SEQ ID NO: 11956 - protein, 305 aa, Homo sapiens
MVPSSPRALFLLLLILACPEPRASQNCLSKQQLLSAIRQLQQLLKGQETRFAEGIRHMKSRLAALQNSVGRVGPDALPVSCPALNTPADGRKFGSKYLVDHEVHFTCNPGFRLVGPSSVVCLPNGTWTGEQPHCRDVDECVGLQPVCPQGTTCINTGGSFQCVSPECPEGSGNVSYVKTSPFQCERNPCPMDSRPCRHLPKTISFHYLSLPSNLKTPITLFRMATASAPGRAGPNSLRFGIVGGNSRGHFVMQRSDRQTGDLILVQNLEGPQTLEVDVDMSEYLDRSFQANHVSKVTIFVSPYDF

SEQ ID NO: 11957 - protein, 235 aa, Homo sapiens
MRPLAGGLLKVVFVVFASLCAWYSGYLLAELIPDAPLSSAAYSIRSIGERPVLKAPVPKRQKCDHWTPCPSDTYAYRLLSGGGRSKYAKICFEDNLLMGEQLGNVARGINIAIVNYVTGNVTATRCFDMYEGDNSGPMTKFIQSAAPKSLLFMVTYDDGSTRLNNDAKNAIEALGSKEIRNMKFRSSWVFIAAKGLELPSEIQREKINHSDAKNNRYSGWPAEIQIEGCIPKERS

SEQ ID NO: 11958 - protein, 274 aa, Homo sapiens
MRPLAGGSRWACWLTRCLISCFDINVQGRLLVKLRPKPTANTTCPGLLKVVFVVFASLCAWYSGYLLAELIPDAPLSSAAYSIRSIGERPVLKAPVPKRQKCDHWTPCPSDTYAYRLLSGGGRSKYAKICFEDNLLMGEQLGNVARGINIAIVNYVTGNVTATRCFDMYEGDNSGPMTKFIQSAAPKSLLFMVTYDDGSTRLNNDAKNAIEALGSKEIRNMKFRSSWVFIAAKGLELPSEIQREKINHSDAKNNRYSGWPAEIQIEGCIPKERS

SEQ ID NO: 11959 - protein, 187 aa, Homo sapiens
MRPLAGAPVPKRQKCDHWTPCPSDTYAYRLLSGGGRSKYAKICFEDNLLMGEQLGNVARGINIAIVNYVTGNVTATRCFDMYEGDNSGPMTKFIQSAAPKSLLFMVTYDDGSTRLNNDAKNAIEALGSKEIRNMKFRSSWVFIAAKGLELPSEIQREKINHSDAKNNRYSGWPAEIQIEGCIPKERS

SEQ ID NO: 11960 - protein, 444 aa, Homo sapiens
MAPDPVAAETAAQGPTPRYFTWDEVAQRSGCEERWLVIDRKVYNISEFTRRHPGGSRVISHYAGQDATDPFVAFHINKGLVKKYMNSLLIGELSPEQPSFEPTKNKELTDEFRELRATVERMGLMKANHVFFLLYLLHILLLDGAAWLTLWVFGTSFLPFLLCAVLLSAVQAQAGWLQHDFGHLSVFSTSKWNHLLHHFVIGHLKGAPASWWNHMHFQHHAKPNCFRKDPDINMHPFFFALGKILSVELGKQKKKYMPYNHQHKYFFLIGPPALLPLYFQWYIFYFVIQRKKWVDLAWMITFYVRFFLTYVPLLGLKAFLGLFFIVRFLESNWFVWVTQMNHIPMHIDHDRNMDWVSTQLQATCNVHKSAFNDWFSGHLNFQIEHHLFPTMPRHNYHKVAPLVQSLCAKHGIEYQSKPLLSAFADIIHSLKESGQLWLDAYLHQ

SEQ ID NO: 11961 - protein, 360 aa, Homo sapiens
MNSLLIGELSPEQPSFEPTKNKELTDEFRELRATVERMGLMKANHVFFLLYLLHILLLDGAAWLTLWVFGTSFLPFLLCAVLLSAVQAQAGWLQHDFGHLSVFSTSKWNHLLHHFVIGHLKGAPASWWNHMHFQHHAKPNCFRKDPDINMHPFFFALGKILSVELGKQKKKYMPYNHQHKYFFLIGPPALLPLYFQWYIFYFVIQRKKWVDLAWMITFYVRFFLTYVPLLGLKAFLGLFFIVRFLESNWFVWVTQMNHIPMHIDHDRNMDWVSTQLQATCNVHKSAFNDWFSGHLNFQIEHHLFPTMPRHNYHKVAPLVQSLCAKHGIEYQSKPLLSAFADIIHSLKESGQLWLDAYLHQ

SEQ ID NO: 11962 - protein, 1455 aa, Homo sapiens
MSDSWVPNSASGQDPGGRRRAWAELLAGRVKREKYNPERAQKLKESAVRLLRSHQDLNALLLEVEGPLCKKLSLSKVIDCDSSEAYANHSSSFIGSALQDQASRLGVPVGILSAGMVASSVGQICTAPAETSHPVLLTVEQRKKLSSLLEFAQYLLAHSMFSRLSFCQELWKIQSSLLLEAVWHLHVQGIVSLQELLESHPDMHAVGSWLFRNLCCLCEQMEASCQHADVARAMLSDFVQMFVLRGFQKNSDLRRTVEPEKMPQVTVDVLQRMLIFALDALAAGVQEESSTHKIVRCWFGVFSGHTLGSVISTDPLKRFFSHTLTQILTHSPVLKASDAVQMQREWSFARTHPLLTSLYRRLFVMLSAEELVGHLQEVLETQEVHWQRVLSFVSALVVCFPEAQQLLEDWVARLMAQAFESCQLDSMVTAFLVVRQAALEGPSAFLSYADWFKASFGSTRGYHGCSKKALVFLFTFLSELVPFESPRYLQVHILHPPLVPGKYRSLLTDYISLAKTRLADLKVSIENMGLYEDLSSAGDITEPHSQALQDVEKAIMVFEHTGNIPVTVMEASIFRRPYYVSHFLPALLTPRVLPKVPDSRVAFIESLKRADKIPPSLYSTYCQACSAAEEKPEDAALGVRAEPNSAEEPLGQLTAALGELRASMTDPSQRDVISAQVAVISERLRAVLGHNEDDSSVEISKIQLSINTPRLEPREHMAVDLLLTSFCQNLMAASSVAPPERQGPWAALFVRTMCGRVLPAVLTRLCQLLRHQGPSLSAPHVLGLAALAVHLGESRSALPEVDVGPPAPGAGLPVPALFDSLLTCRTRDSLFFCLKFCTAAISYSLCKFSSQSRDTLCSCLSPGLIKKFQFLMFRLFSEARQPLSEEDVASLSWRPLHLPSADWQRAALSLWTHRTFREVLKEEDVHLTYQDWLHLELEIQPEADALSDTERQDFHQWAIHEHFLPESSASGGCDGDLQAACTILVNALMDFHQSSRSYDHSENSDLVFGGRTGNEDIISRLQEMVADLELQQDLIVPLGHTPSQEHFLFEIFRRRLQALTSGWSVAASLQRQRELLMYKRILLRLPSSVLCGSSFQAEQPITARCEQFFHLVNSEMRNFCSHGGALTQDITAHFFRGLLNACLRSRDPSLMVDFILAKCQTKCPLILTSALVWWPSLEPVLLCRWRRHCQSPLPRELQKLQEGRQFASDFLSPEAASPAPNPDWLSAAALHFAIQQVREENIRKQLKKLDCEREELLVFLFFFSLMGLLSSHLTSNSTTDLPKAFHVCAAILECLEKRKISWLALFQLTESDLRLGRLLLRVAPDQHTRLLPFAFYSLLSYFHEDAAIREEAFLHVAVDMYLKLVQLFVAGDTSTVSPPAGRSLELKGQGNPVELITKARLFLLQLIPRCPKKSFSHVAELLADRGDCDPEVSAALQSRQQAAPDADLSQEPHLF

SEQ ID NO: 11963 - protein, 297 aa, Homo sapiens
MSDSWVPNSASGQDPGGRRRAWAELLAGRVKREKYNPERAQKLKESAVRLLRSHQDLNALLLEVEGPLCKKLSLSKVIDCDSSEAYANHSSSFIGSALQDQASRLGVPVGILSAGMVASSVGQICTAPAETSHPVLLTVEQRKKLSSLLEFAQYLLAHSMFSRLSFCQELWKIQSSLLLEAVWHLHVQGIVSLQELLESHPDMHAVGSWLFRNLCCLCEQMEASCQHADVARAMLSDFVQMFVLRGFQKNSDLRRTVEPEKMPQVTVDVLQRMLIFALDALAAGVQEESSTHKIVRC

SEQ ID NO: 11964 - protein, 1424 aa, Homo sapiens
MSDSWVPNSASGQDPGGRRRAWAELLAGRVKREKYNPERAQKLKESAVRLLRSHQDLNALLLEVEGPLCKKLSLSKVIDCDSSEAYANHSSSFIGSALQDQASRLGVPVGILSAGMVASSVGQICTAPAETSHPVLLTVEQRKKLSSLLEFAQYLLAHSMFSRLSFCQELWKIQSSLLLEAVWHLHVQGIVSLQELLESHPDMHAVGSWLFRNLCCLCEQMEASCQHADVARAMLSDFVQMFVLRGFQKNSDLRRTVEPEKMPQVTVDVLQRMLIFALDALAAGVQEESSTHKIVRCWFGVFSGHTLGSVISTDPLKRFFSHTLTQILTHSPVLKASDAVQMQREWSFARTHPLLTSLYRRLFVMLSAEELVGHLQEVLETQEVHWQRVLSFVSALVVCFPEAQQLLEDWVARLMAQAFESCQLDSMVTAFLVVRQAALEGPSAFLSYADWFKASFGSTRGYHGCSKKALVFLFTFLSELVPFESPRYLQVHILHPPLVPGKYRSLLTDYISLAKTRLADLKVSIENMGLYEDLSSAGDITEPHSQALQDVEKAIMVFEHTGNIPVTVMEASIFRRPYYVSHFLPALLTPRVLPKVPDSRVAFIESLKRADKIPPSLYSTYCQACSAAEEKPEDAALGVRAEPNSAEEPLGQLTAALGELRASMTDPSQRDVISAQVAVISERLRAVLGHNEDDSSVEISKIQLSINTPRLEPREHMAVDLLLTSFCQNLMAASSVAPPERQGPWAALFVRTMCGRVLPAVLTRLCQLLRHQGPSLSAPHVLGLAALAVHLGESRSALPEVDVGPPAPGAGLPVPALFDSLLTCRTRDSLFFCLKFCTAAISYSLCKFSSQSRDTLCSCLSPGLIKKFQFLMFRLFSEARQPLSEEDVASLSWRPLHLPSADWQRAALSLWTHRTFREVLKEEDVHLTYQDWLHLELEIQPEADALSDTERQDFHQWAIHEHFLPESSASGGCDGDLQAACTILVNALMDFHQSSRSYDHSENSDLVFGGRTGNEDIISRLQEMVADLELQQDLIVPLGHTPSQEHFLFEIFRRRLQALTSGWSVAASLQRQRELLMYKRILLRLPSSVLCGSSFQAEQPITARCEQFFHLVNSEMRNFCSHGGALTQDITAHFFRGLLNACLRSRDPSLMVDFILAKCQTKCPLILTSALVWWPSLEPVLLCRWRRHCQSPLPRELQKLQEGRQFASDFLSPEAASPAPNPDWLSAAALHFAIQQVREENIRKQLKKLDCEREELLVFLFFFSLMGLLSSHLTSNSTTDLPKAFHVCAAILECLEKRKISWLALFQLTESDLRLGRLLLRVAPDQHTRLLPFAFYSLLSYFHEDAAIREEAFLHVAVDMYLKLVQLFVAGDTSTVSPPAGRSLELKGQAGQPRGTDNKSSSFSAAVNTSVPEKELLTRGRAAG

SEQ ID NO: 11965 - protein, 374 aa, Homo sapiens
MDPLGPAKPQWLWRRCLAGLLFQLLVAVCFFSYLRVSRDDATGSPRPGLMAVEPVTGAPNGSRCQDSMATPAHPTLLILLWTWPFNTPVALPRCSEMVPGAADCNITADSSVYPQADAVIVHHWDIMYNPSANLPPPTRPQGQRWIWFSMESPSNCRHLEALDGYFNLTMSYRSDSDIFTPYGWLEPWSGQPAHPPLNLSAKTELVAWAVSNWKPDSARVRYYQSLQAHLKVDVYGRSHKPLPKGTMMETLSRYKFYLAFENSLHPDYITEKLWRNALEAWAVPVVLGPSRSNYERFLPPDAFIHVDDFQSPKDLARYLQELDKDHARYLSYFRWRETLRPRSFSWALAFCKACWKLQQESRYQTVRSIAAWFT

SEQ ID NO: 11966 - protein, 622 aa, Homo sapiens
MNKLNFHNNRVMQDRRSVCIFLPNDESLNIIINVKILCHQLLVQVCDLLRLKDCHLFGLSVIQNNEHVYMELSQKLYKYCPKEWKKEASKVRQYEVTWGIDQFGPPMIIHFRVQYYVENGRLISDRAARYYYYWHLRKQVLHSQCVLREEAYFLLAAFALQADLGNFKRNKHYGKYFEPEAYFPSWVVSKRGKDYILKHIPNMHKDQFALTASEAHLKYIKEAVRLDDVAVHYYRLYKDKREIEASLTLGLTMRGIQIFQNLDEEKQLLYDFPWTNVGKLVFVGKKFEILPDGLPSARKLIYYTGCPMRSRHLLQLLSNSHRLYMNLQPVLRHIRKLEENEEKKQYRESYISDNLDLDMDQLEKRSRASGSSAGSMKHKRLSRHSTASHSSSHTSGIEADTKPRDTGPEDSYSSSAIHRKLKTCSSMTSHGSSHTSGVESGGKDRLEEDLQDDEIEMLVDDPRDLEQMNEESLEVSPDMCIYITEDMLMSRKLNGHSGLIVKEIGSSTSSSSETVVKLRGQSTDSLPQTICRKPKTSTDRHSLSLDDIRLYQKDFLRIAGLCQDTAQSYTFGCGHELDEEGLYCNSCLAQQCINIQDAFPVKRTSKYFSLDLTHDEVPEFVV

SEQ ID NO: 11967 - protein, 614 aa, Homo sapiens
MNKLNFHNNRVMQDRRSVCIFLPNDESLNIIINVKILCHQLLVQVCDLLRLKDCHLFGLSVIQNNEHVYMELSQKLYKYCPKEWKKEASKGIDQFGPPMIIHFRVQYYVENGRLISDRAARYYYYWHLRKQVLHSQCVLREEAYFLLAAFALQADLGNFKRNKHYGKYFEPEAYFPSWVVSKRGKDYILKHIPNMHKDQFALTASEAHLKYIKEAVRLDDVAVHYYRLYKDKREIEASLTLGLTMRGIQIFQNLDEEKQLLYDFPWTNVGKLVFVGKKFEILPDGLPSARKLIYYTGCPMRSRHLLQLLSNSHRLYMNLQPVLRHIRKLEENEEKKQYRESYISDNLDLDMDQLEKRSRASGSSAGSMKHKRLSRHSTASHSSSHTSGIEADTKPRDTGPEDSYSSSAIHRKLKTCSSMTSHGSSHTSGVESGGKDRLEEDLQDDEIEMLVDDPRDLEQMNEESLEVSPDMCIYITEDMLMSRKLNGHSGLIVKEIGSSTSSSSETVVKLRGQSTDSLPQTICRKPKTSTDRHSLSLDDIRLYQKDFLRIAGLCQDTAQSYTFGCGHELDEEGLYCNSCLAQQCINIQDAFPVKRTSKYFSLDLTHDEVPEFVV

SEQ ID NO: 11968 - protein, 264 aa, Homo sapiens
MDQLEKRSRASGSSAGSMKHKRLSRHSTASHSSSHTSGIEADTKPRDTGPEDSYSSSAIHRKLKTCSSMTSHGSSHTSGVESGGKDRLEEDLQDDEIEMLVDDPRDLEQMNEESLEVSPDMCIYITEDMLMSRKLNGHSGLIVKEIGSSTSSSSETVVKLRGQSTDSLPQTICRKPKTSTDRHSLSLDDIRLYQKDFLRIAGLCQDTAQSYTFGCGHELDEEGLYCNSCLAQQCINIQDAFPVKRTSKYFSLDLTHDEVPEFVV

SEQ ID NO: 11969 - protein, 578 aa, Homo sapiens
MAVRWTWAGKSCLLLAFLTVAYIFVELLVSTFHASAGAGRARELGSRRLSDLQKNTEDLSRPLYKKPPADSRALGEWGKASKLQLNEDELKQQEELIERYAINIYLSDRISLHRHIEDKRMYECKSQKFNYRTLPTTSVIIAFYNEAWSTLLRTIHSVLETSPAVLLKEIILVDDLSDRVYLKTQLETYISNLDRVRLIRTNKREGLVRARLIGATFATGDVLTFLDCHCECNSGWLEPLLERIGRDETAVVCPVIDTIDWNTFEFYMQIGEPMIGGFDWRLTFQWHSVPKQERDRRISRIDPIRSPTMAGGLFAVSKKYFQYLGTYDTGMEVWGGENLELSFRVWQCGGKLEIHPCSHVGHVFPKRAPYARPNFLQNTARAAEVWMDEYKEHFYNRNPPARKEAYGDISERKLLRERLRCKSFDWYLKNVFPNLHVPEDRPGWHGAIRSRGISSECLDYNSPDNNPTGANLSLFGCHGQGGNQFFEYTSNKEIRFNSVTELCAEVPEQKNYVGMQNCPKDGFPVPANIIWHFKEDGTIFHPHSGLCLSAYRTPEGRPDVQMRTCDALDKNQIWSFEK

SEQ ID NO: 11970 - protein, 406 aa, Homo sapiens
MAWCVATADPAHTSRPLFTGLAVSRGSAGHAWSAGFDWAAVVVVTGRRCRSGQTVPGAARSPLLPHPLPSPLRVPPPTGALGRPLPRWPQPRRTPFWSVISKATKLRSPPWTSAPTASNLERDRRISRIDPIRSPTMAGGLFAVSKKYFQYLGTYDTGMEVWGGENLELSFRVWQCGGKLEIHPCSHVGHVFPKRAPYARPNFLQNTARAAEVWMDEYKEHFYNRNPPARKEAYGDISERKLLRERLRCKSFDWYLKNVFPNLHVPEDRPGWHGAIRSRGISSECLDYNSPDNNPTGANLSLFGCHGQGGNQFFEYTSNKEIRFNSVTELCAEVPEQKNYVGMQNCPKDGFPVPANIIWHFKEDGTIFHPHSGLCLSAYRTPEGRPDVQMRTCDALDKNQIWSFEK

SEQ ID NO: 11971 - protein, 429 aa, Homo sapiens
MAAQGYGYYRTVIFSAMFGGYSLYYFNRKTFSFVMPSLVEEIPLDKDDLGFITSSQSAAYAISKFVSGVLSDQMSARWLFSSGLLLVGLVNIFFAWSSTVPVFAALWFLNGLAQGLGWPPCGKVLRKWFEPSQFGTWWAILSTSMNLAGGLGPILATILAQSYSWRSTLALSGALCVVVSFLCLLLIHNEPADVGLRNLDPMPSEGKKGSLKEESTLQELLLSPYLWVLSTGYLVVFGVKTCCTDWGQFFLIQEKGQSALVGSSYMSALEVGGLVGSIAAGYLSDRAMAKAGLSNYGNPRHGLLLFMMAGMTVSMYLFRVTVTSDSPKLWILVLGAVFGFSSYGPIALFGVIANESAPPNLCGTSHAIVGLMANVGGFLAGLPFSTIAKHYSWSTAFWVAEVICAASTAAFFLLRNIRTKMGRVSKKAE

SEQ ID NO: 11972 - protein, 451 aa, Homo sapiens
MAAQGYGYYRTVIFSAMFGGYSLYYFNRKTFSFVMPSLVEEIPLDKDDLGFITSSQSAAYAISKFVSGVLSDQMSARWLFSSGLLLVGLVNIFFAWSSTVPVFAALWFLNGLAQGLGWPPCGKVLRKWFEPSQFGTWWAILSTSMNLAGGLGPILATILAQSYSWRSTLALSGALCVVVSFLCLLLIHNEPADVGLRNLDPMPSEGKKGSLKEESTLQELLLSPYLWVLSTGYLVVFGVKTCCTDWGQFFLIQEKGQSALVGSSYMSALEVGGLVGSIAAGYLSDRAMAKAGLSNYGNPRHGLLLFMMAGMTVSMYLFRVTVTSDSPKDVAFWTLALHPLAELTGFTEHELWILVLGAVFGFSSYGPIALFGVIANESAPPNLCGTSHAIVGLMANVGGFLAGLPFSTIAKHYSWSTAFWVAEVICAASTAAFFLLRNIRTKMGRVSKKAE

SEQ ID NO: 11973 - protein, 379 aa, Homo sapiens
MSRSGTDPQQRQQASEADAAAATFRANDHQHIRYNPLQDEWVLVSAHRMKRPWQGQVEPQLLKTVPRHDPLNPLCPGAIRANGEVNPQYDSTFLFDNDFPALQPDAPSPGPSDHPLFQAKSARGVCKVMCFHPWSDVTLPLMSVPEIRAVVDAWASVTEELGAQYPWVQIFENKGAMMGCSNPHPHCQVWASSFLPDIAQREERSQQAYKSQHGEPLLMEYSRQELLRKERLVLTSEHWLVLVPFWATWPYQTLLLPRRHVRRLPELTPAERDDLASIMKKLLTKYDNLFETSFPYSMGWHGAPTGSEAGANWNHWQLHAHYYPPLLRSATVRKFMVGYEMLAQAQRDLTPEQAAERLRALPEVHYHLGQKDRETATIA

SEQ ID NO: 11974 - protein, 270 aa, Homo sapiens
MTLSTLCVLGPSEPTESKVMCFHPWSDVTLPLMSVPEIRAVVDAWASVTEELGAQYPWVQIFENKGAMMGCSNPHPHCQVWASSFLPDIAQREERSQQAYKSQHGEPLLMEYSRQELLRKERLVLTSEHWLVLVPFWATWPYQTLLLPRRHVRRLPELTPAERDDLASIMKKLLTKYDNLFETSFPYSMGWHGAPTGSEAGANWNHWQLHAHYYPPLLRSATVRKFMVGYEMLAQAQRDLTPEQAAERLRALPEVHYHLGQKDRETATIA

SEQ ID NO: 11975 - protein, 838 aa, Homo sapiens
MTGAEIEPSAQAKPEKKAGEEVIAGPERENDVPLVVRPKVRTQATTGARPKTETKSVPAARPKTEAQAMSGARPKTEVQVMGGARPKTEAQGITGARPKTDARAVGGARSKTDAKAIPGARPKDEAQAWAQSEFGTEAVSQAEGVSQTNAVAWPLATAESGSVTKSKGLSMDRELVNVDAETFPGTQGQKGIQPWFGPGEETNMGSWCYSRPRAREEASNESGFWSADETSTASSFWTGEETSVRSWPREESNTRSRHRAKHQTNPRSRPRSKQEAYVDSWSGSEDEASNPFSFWVGENTNNLFRPRVREEANIRSKLRTNREDCFESESEDEFYKQSWVLPGEEANSRFRHRDKEDPNTALKLRAQKDVDSDRVKQEPRFEEEVIIGSWFWAEKEASLEGGASAICESEPGTEEGAIGGSAYWAEEKSSLGAVAREEAKPESEEEAIFGSWFWDRDEACFDLNPCPVYKVSDRFRDAAEELNASSRPQTWDEVTVEFKPGLFHGVGFRSTSPFGIPEEASEMLEAKPKNLELSPEGEEQESLLQPDQPSPEFTFQYDPSYRSVREIREHLRARESAESESWSCSCIQCELKIGSEEFEEFLLLMDKIRDPFIHEISKIAMGMRSASQFTRDFIRDSGVVSLIETLLNYPSSRVRTSFLENMIHMAPPYPNLNMIETFICQVCEETLAHSVDSLEQLTGIRMLRHLTMTIDYHTLIANYMSGFLSLLTTANARTKFHVLKMLLNLSENPAVAKKLFSAKALSIFVGLFNIEETNDNIQIVIKMFQNISNIIKSGKMSLIDDDFSLEPLISAFREFEELAKQLQAQIDNQNDPEVGQQS

SEQ ID NO: 11976 - protein, 1322 aa, Homo sapiens
MDVFSFVKIAKLSSHRTKSSGWPPPSGTWGLSQVPPYGWEMTANRDGRDYFINHMTQAIPFDDPRLESCQIIPPAPRKVEMRRDPVLGFGFVAGSEKPVVVRSVTPGGPSEGKLIPGDQIVMINDEPVSAAPRERVIDLVRSCKESILLTVIQPYPSPKSAFISAAKKARLKSNPVKVRFSEEVIINGQVSETVKDNSLLFMPNVLKVYLENGQTKSFRFDCSTSIKDVILTLQEKLSIKGIEHFSLMLEQRTEGAGTKLLLLHEQETLTQVTQRPSSHKMRCLFRISFVPKDPIDLLRRDPVAFEYLYVQSCNDVVQERFGPELKYDIALRLAALQMYIATVTTKQTQKISLKYIEKEWGLETFLPSAVLQSMKEKNIKKALSHLVKANQNLVPPGKKLSALQAKVHYLKFLSDLRLYGGRVFKATLVQAEKRSEVTLLVGPRYGISHVINTKTNLVALLADFSHVNRIEMFSEEESLVRVELHVLDVKPITLLMESSDAMNLACLTAGYYRLLVDSRRSIFNMANKKNTATQETGPENKGKHNLLGPDWNCIPQMTTFIGEGEQEAQITYIDSKQKTVEITDSTMCPKEHRHLYIDNAYSSDGLNQQLSQPGEAPCEADYRSLAQRSLLTLSGPETLKKAQESPRGAKVSFIFGDFALDDGISPPTLGYETLLDEGPEMLEKQRNLYIGSANDMKGLDLTPEAEGIQFVENSVYANIGDVKSFQAAEGIEEPLLHDICYAENTDDAEDEDEVSCEEDLVVGEMNQPAILNLSGSSDDIIDLTSLPPPEGDDNEDDFLLRSLNMAIAAPPPGFRDSSDEEDSQSQAASFPEDKEKGSSLQNDEIPVSLIDAVPTSAEGKCEKGLDNAVVSTLGALEALSVSEEQQTSDNSGVAILRAYSPESSSDSGNETNSSEMTESSELATAQKQSENLSRMFLATHEGYHPLAEEQTEFPASKTPAGGLPPKSSHALAARPATDLPPKVVPSKQLLHSDHMEMEPETMETKSVTDYFSKLHMGSVAYSCTSKRKSKLADGEGKAPPNGNTTGKKQQGTKTAEMEEEASGKFGTVSSRDSQHLSTFNLERTAFRKDSQRWYVATEGGMAEKSGLEAATGKTFPRASGLGAREAEGKEEGAPDGETSDGSGLGQGDRFLTDVTCASSAKDLDNPEDADSSTCDHPSKLPEADESVARLCDYHLAKRMSSLQSEGHFSLQSSQGSSVDAGCGTGSSGSACATPVESPLCPSLGKHLIPDASGKGVNYIPSEERAPGLPNHGATFKELHPQTEGMCPRMTVPALHTAINTEPLFGTLRDGCHRLPKIKETTV

SEQ ID NO: 11977 - protein, 694 aa, Homo sapiens
MSGGEVVCSGWLRKSPPEKKLKRYAWKRRWFVLRSGRLTGDPDVLEYYKNDHAKKPIRIIDLNLCQQVDAGLTFNKKEFENSYIFDINTIDRIFYLVADSEEEMNKWVRCICDICGFNPTEEDPVKPPGSSLQAPADLPLAINTAPPSTQADSSSATLPPPYQLINVPPHLETLGIQEDPQDYLLLINCQSKKPEPTRTHADSAKSTSSETDCNDNVPSHKNPASSQSKHGMNGFFQQQMIYDSPPSRAPSASVDSSLYNLPRSYSHDVLPKVSPSSTEADGELYVFNTPSGTSSVETQMRHVSISYDIPPTPGNTYQIPRTFPEGTLGQTSKLDTIPDIPPPRPPKPHPAHDRSPVETCSIPRTASDTDSSYCIPTAGMSPSRSNTISTVDLNKLRKDASSQDCYDIPRAFPSDRSSSLEGFHNHFKVKNVLTVGSVSSEELDENYVPMNPNSPPRQHSSSFTEPIQEANYVPMTPGTFDFSSFGMQVPPPAHMGFRSSPKTPPRRPVPVADCEPPPVDRNLKPDRKVKPAPLEIKPLPEWEELQAPVRSPITRSFARDSSRFPMSPRPDSVHSTTSSSDSHDSEENYVPMNPNLSSEDPNLFGSNSLDGGSSPMIKPKGDKQVEYLDLDLDSGKSTPPRKQKSSGSGSSVADERVDYVVVDQQKTLALKSTREAWTDGRQSTESETPAKSVK

SEQ ID NO: 11978 - protein, 724 aa, Homo sapiens
MSGGEVVCSGWLRKSPPEKKLKRYAWKRRWFVLRSGRLTGDPDVLEYYKNDHAKKPIRIIDLNLCQQVDAGLTFNKKEFENSYIFDINTIDRIFYLVADSEEEMNKWVRCICDICGFNPTEEDPVKPPGSSLQAPADLPLAINTAPPSTQADSSSATLPPPYQLINVPPHLETLGIQEDPQDYLLLINCQSKKPEPTRTHADSAKSTSSETDCNDNVPSHKNPASSQSKHGMNGFFQQQMIYDSPPSRAPSASVDSSLYNLPRSYSHDVLPKVSPSSTEADGELYVFNTPSGTSSVETQMRHVSISYDIPPTPGNTYQIPRTFPEGTLGQTSKLDTIPDIPPPRPPKPHPAHDRSPVETCSIPRTASDTDSSYCIPTAGMSPSRSNTISTVDLNKLRKDASSQDCYDIPRAFPSDRSSSLEGFHNHFKVKNVLTVGSVSSEELDENYVPMNPNSPPRQHSSSFTEPIQEANYVPMTPGTFDFSSFGMQVPPPAHMGFRSSPKTPPRRPVPVADCEPPPVDRNLKPDRKGQSPKILRLKPHGLERTDSQTIGDFATRRKVKPAPLEIKPLPEWEELQAPVRSPITRSFARDSSRFPMSPRPDSVHSTTSSSDSHDSEENYVPMNPNLSSEDPNLFGSNSLDGGSSPMIKPKGDKQVEYLDLDLDSGKSTPPRKQKSSGSGSSVADERVDYVVVDQQKTLALKSTREAWTDGRQSTESETPAKSVK

SEQ ID NO: 11979 - protein, 101 aa, Homo sapiens
MQRLCVYVLIFALALAAFSEASWKPRSQQPDAPLGTGANRDLELPWLEQQGPASHHRRQLGPQGPPHLVADPSKKQGPWLEEEEEAYGWMDFGRRSAEDEN

SEQ ID NO: 11980 - protein, 3013 aa, Homo sapiens
MSNITIDPDVKPGEYVIKSLFAEFAVQAEKKIEVVMAEPLEKLLSRSLQRGEDLQFDQLISSMSSVAEHCLPSLLRTLFDWYRRQNGTEDESYEYRPRSSTKSKGDEQQRERDYLLERRDLAVDFIFCLVLVEVLKQIPVHPVPDPLVHEVLNLAFKHFKHKEGYSGTNTGNVHIIADLYAEVIGVLAQSKFQAVRKKFVTELKELRQKEQSPHVVQSVISLIMGMKFFRVKMYPVEDFEASFQFMQECAQYFLEVKDKDIKHALAGLFVEILIPVAAAVKNEVNVPCLKNFVEMLYQTTFELSSRKKHSLALYPLITCLLCVSQKQFFLNNWHIFLQNCLSHLKNKDPKMSRVALESLYRLLWVYVIRIKCESNTVTQSRLMSIVSALFPKGSRSVVPRDTPLNIFVKIIQFIAQERLDFAMKEIIFDLLSVGKSTKTFTINPERMNIGLRVFLVIADSLQQKDGEPPMPTTGVILPSGNTLRVKKIFLNKTLTDEEAKVIGMSVYYPQVRKALDSILRHLDKEVGRPMCMTSVQMSNKEPEDMITGERKPKIDLFRTCIAAIPRLIPDGMSRTDLIELLARLTIHMDEELRALAFNTLQALMLDFPDWREDVLSGFVYFIVREVTDVHPTLLDNAVKMLVQLINQWKQAAQMHNKNQDTQHGVANGASHPPPLERSPYSNVFHVVEGFALVILCSSRPATRRLAVSVLREIRALFALLEIPKGDDELAIDVMDRLSPSILESFIHLTGADQTTLLYCPSSIDLQTLAEWNSSPISHQFDVISPSHIWIFAHVTQGQDPWIISLSSFLKQENLPKHCSTAVSYAWMFAYTRLQLLSPQVDINSPINAKKVNTTTSSDSYIGLWRNYLILCCSAATSSSSTSAGSVRCSPPETLASTPDSGYSIDSKIIGIPSPSSLFKHIVPMMRSESMEITESLVLGLGRTNPGAFRELIEELHPIIKEALERRPENMKRRRRRDILRVQLVRIFELLADAGVISHSASGGLDNETHFLNNTLLEYVDLTRQLLEAENEKDSDTLKDIRCHFSALVANIIQNVPVHQRRSIFPQQSLRHSLFMLFSHWAGPFSIMFTPLDRYSDRNMQINRHQYCALKAMSAVLCCGPVADNVGLSSDGYLYKWLDNILDSLDKKVHQLGCEAVTLLLELNPDQSNLMYWAVDRCYTGSGRVAAGCFKAIANVFQNRDYQCDTVMLLNLILFKAADSSRSIYEVAMQLLQILEPKMFRYAHKLEVQRTDGVLSQLSPLPHLYSVSYYQLSEELARAYPELTLAIFSEISQRIQTAHPAGRQVMLHYLLPWMNNIELVDLKPLPTARRHDEDEDDSLKDRELMVTSRRWLRGEGWGSPQATAMVLNNLMYMTAKYGDELAWSEVENVWTTLADGWPKNLKIILHFLISICGVNSEPSLLPYVKKVIVYLGRDKTMQLLEELVSELQLTDPVSSGVTHMDNPPYYRITSSYKIPSVTSGTTSSSNTMVAPTDGNPDNKPIKENIEESYVHLDIYSGLNSHLNRQHHRLESRYSSSSGGSYEEEKSDSMPLYSNWRLKVMEHNQGEPLPFPPAGGCWSPLVDYVPETSSPGLPLHRCNIAVILLTDLIIDHSVKVEWGSYLHLLLHAIFIGFDHCHPEVYEHCKRLLLHLLIVMGPNSNIRTVASVLLRNKEFNEPRVLTVKQVAHLDYNFTAGINDFIPDYQPSPMTDSGLSSSSTSSSISLGNNSAAISHLHTTILNEVDISVEQDGKVKTLMEFITSRKRGPLWNHEDVSAKNPSIKSAEQLTTFLKHVVSVFKQSSSEGIHLEHHLSEVALQTALSCSSRHYAGRSFQIFRALKQPLTATTLSDVLSRLVETVGDPGEDAQGFVIELLLTLESAIDTLAETMKHYDLLSALSQTSYHDPIMGNKYAANRKSTGQLNLSTSPINSSSYLGYNSNARSNSLRLSLIGDRRGDRRRSNTLDIMDGRINHSSSLARTRSLSSLREKGMYDVQSTTEPTNLMATIFWIAASLLESDYEYEYLLALRLLNKLLIHLPLDKSESREKIENVQSKLKWTNFPGLQQLFLKGFTSASTQEMTVHLLSKLISVSKHTLVDPSQLSGFPLNILCLLPHLIQHFDSPTQFCKETASRIAKVCAEEKCPTLVNLAHMMSLYSTHTYSRDCSNWINVVCRYLHDSFSDTTFNLVTYLAELLEKGLSSMQQSLLQIIYSLLSHIDLSAAPAKQFNLEIIKIIGKYVQSPYWKEALNILKLVVSRSASLVVPSDIPKTYGGDTGSPEISFTKIFNNVSKELPGKTLDFHFDISETPIIGNKYGDQHSAAGRNGKPKVIAVTRSTSSTSSGSNSNALVPVSWKRPQLSQRRTREKLMNVLSLCGPESGLPKNPSVVFSSNEDLEVGDQQTSLISTTEDINQEEEVAVEDNSSEQQFGVFKDFDFLDVELEDAEGESMDNFNWGVRRRSLDSIDKGDTPSLQEYQCSSSTPSLNLTNQEDTDESSEEEAALTASQILSRTQMLNSDSATDETIPDHPDLLLQSEDSTGSITTEEVLQIRDETPTLEASLDNANSRLPEDTTSVLKEEHVTTFEDEGSYIIQEQQESLVCQGILDLEETEMPEPLAPESYPESVCEEDVTLALKELDERCEEEEADFSGLSSQDEEEQDGFPEVQTSPLPSPFLSAIIAAFQPVAYDDEEEAWRCHVNQMLSDTDGSSAVFTFHVFSRLFQTIQRKFGEITNEAVSFLGDSLQRIGTKFKSSLEVMMLCSECPTVFVDAETLMSCGLLETLKFGVLELQEHLDTYNVKREAAEQWLDDCKRTFGAKEDMYRINTDAQQMEILAELELCRRLYKLHFQLLLLFQAYCKLINQVNTIKNEAEVINMSEELAQLESILKEAESASENEEIDISKAAQTTIETAIHSLIETLKNKEFISAVAQVKAFRSLWPSDIFGSCEDDPVQTLLHIYFHHQTLGQTGSFAVIGSNLDMSEANYKLMELNLEIRESLRMVQSYQLLAQAKPMGNMVSTGF

SEQ ID NO: 11981 - protein, 403 aa, Homo sapiens
MPEPLAPESYPESVCEEDVTLALKELDERCEEEEADFSGLSSQDEEEQDGFPEVQTSPLPSPFLSAIIAAFQPVAYDDEEEAWRCHVNQMLSDTDGSSAVFTFHVFSRLFQTIQRKFGEITNEAVSFLGDSLQRIGTKFKSSLEVMMLCSECPTVFVDAETLMSCGLLETLKFGVLELQEHLDTYNVKREAAEQWLDDCKRTFGAKEDMYRINTDAQELELCRRLYKLHFQLLLLFQAYCKLINQVNTIKNEAEVINMSEELAQLESILKEAESASENEEIDISKAAQTTIETAIHSLIETLKNKEFISAVAQVKAFRSLWPSDIFGSCEDDPVQTLLHIYFHHQTLGQTGSFAVIGSNLDMSEANYKLMELNLEIRESLRMVQSYQLLAQAKPMGNMVSTGF

SEQ ID NO: 11982 - protein, 465 aa, Homo sapiens
MGPLKAFLFSPFLLRSQSRGVRLVFLLLTLHLGNCVDKADDEDDEDLTVNKTWVLAPKIHEGDITQILNSLLQGYDNKLRPDIGVRPTVIETDVYVNSIGPVDPINMEYTIDIIFAQTWFDSRLKFNSTMKVLMLNSNMVGKIWIPDTFFRNSRKSDAHWITTPNRLLRIWNDGRVLYTLRLTINAECYLQLHNFPMDEHSCPLEFSSYGYPKNEIEYKWKKPSVEVADPKYWRLYQFAFVGLRNSTEITHTISGDYVIMTIFFDLSRRMGYFTIQTYIPCILTVVLSWVSFWINKDAVPARTSLGITTVLTMTTLSTIARKSLPKVSYVTAMDLFVSVCFIFVFAALMEYGTLHYFTSNQKGKTATKDRKLKNKASMTPGLHPGSTLIPMNNISVPQEDDYGYQCLEGKDCASFFCCFEDCRTGSWREGRIHIRIAKIDSYSRIFFPTAFALFNLVYWVGYLYL

SEQ ID NO: 11983 - protein, 301 aa, Homo sapiens
MDYNRMNSFLEYPLCNRGPSAYSAHSAPTSFPPSSAQAVDSYASEGRYGGGLSSPAFQQNSGYPAQQPPSTLGVPFPSSAPSGYAPAACSPSYGPSQYYPLGQSEGDGGYFHPSSYGAQLGGLSDGYGAGGAGPGPYPPQHPPYGNEQTASFAPAYADLLSEDKETPCPSEPNTPTARTFDWMKVKRNPPKTAKVSEPGLGSPSGLRTNFTTRQLTELEKEFHFNKYLSRARRVEIAATLELNETQVKIWFQNRRMKQKKREREEGRVPPAPPGCPKEAAGDASDQSTCTSPEASPSSVTS

SEQ ID NO: 11984 - protein, 232 aa, Homo sapiens
MDYNRMNSFLEYPLCNRGPSAYSAHSAPTSFPPSSAQAVDSYASEGRYGGGLSSPAFQQNSGYPAQQPPSTLGVPFPSSAPSGYAPAACSPSYGPSQYYPLGQSEGDGGYFHPSSYGAQLGGLSDGYGAGGAGPGPYPPQHPPYGNEQTASFAPAYADLLSEDKETPCPSEPNTPTARTFDWMKVKRNPPKTGRAQMWPPLLRGPKHLCFPCSDMSWVWAGFFSFSGSGRHR

SEQ ID NO: 11985 - protein, 637 aa, Homo sapiens
MGLLSQGSPLSWEETKRHADHVRRHGILQFLHIYHAVKDRHKDVLKWGDEVEYMLVSFDHENKKVRLVLSGEKVLETLQEKGERTNPNHPTLWRPEYGSYMIEGTPGQPYGGTMSEFNTVEANMRKRRKEATSILEENQALCTITSFPRLGCPGFTLPEVKPNPVEGGASKSLFFPDEAINKHPRFSTLTRNIRHRRGEKVVINVPIFKDKNTPSPFIETFTEDDEASRASKPDHIYMDAMGFGMGNCCLQVTFQACSISEARYLYDQLATICPIVMALSAASPFYRGYVSDIDCRWGVISASVDDRTREERGLEPLKNNNYRISKSRYDSIDSYLSKCGEKYNDIDLTIDKEIYEQLLQEGIDHLLAQHVAHLFIRDPLTLFEEKIHLDDANESDHFENIQSTNWQTMRFKPPPPNSDIGWRVEFRPMEVQLTDFENSAYVVFVVLLTRVILSYKLDFLIPLSKVDENMKVAQKRDAVLQGMFYFRKDICKGGNAVVDGCGKAQNSTELAAEEYTLMSIDTIINGKEGVFPGLIPILNSYLENMEVDVDTRCSILNYLKLIKKRASGELMTVARWMREFIANHPDYKQDSVITDEMNYSLILKCNQIANELCECPELLGSAFRKVKYSGSKTDSSN

SEQ ID NO: 11986 - protein, 127 aa, Homo sapiens
MGRKEHESPSQPHMCGWEDSQKPSVPSHGPKTPSCKGVKAPHSSRPRAWKQDLEQSLAAAYVPVVVDSKGQNPDKLRFNFYTSQYSNSLNPFYTLQKPTCGYLYRRDTDHTRKRFDVPPANLVLWRS

SEQ ID NO: 11987 - protein, 226 aa, Homo sapiens
MSETAPAETATPAPVEKSPAKKKATKKAAGAGAAKRKATGPPVSELITKAVAASKERNGLSLAALKKALAAGGYDVEKNNSRIKLGLKSLVSKGTLVQTKGTGASGSFKLNKKAASGEAKPKAKKAGAAKAKKPAGATPKKAKKAAGAKKAVKKTPKKAKKPAAAGVKKVAKSPKKAKAAAKPKKATKSPAKPKAVKPKAAKPKAAKPKAAKPKAAKAKKAAAKKK

SEQ ID NO: 11988 - protein, 409 aa, Homo sapiens
MEESWEAAPGGQAGAELPMEPVGSLVPTLEQPQVPAKVRQPEGPESSPSPAGAVEKAAGAGLEPSSKKKPPSPRPGSPRVPPLSLGYGVCPEPPSPGPALVKLPRNGEAPGAEPAPSAWAPMELQVDVRVKPVGAAGGSSTPSPRPSTRFLKVPVPESPAFSRHADPAHQLLLRAPSQGGTWGRRSPLAAARTESGCDAEGRASPAEGSAGSPGSPTCCRCKELGLEKEDAALLPRAGLDGDEKLPRAVTLTGLPMYVKSLYWALAFMAVLLAVSGVVIVVLASRAGARCQQCPPGWVLSEEHCYYFSAEAQAWEASQAFCSAYHATLPLLSHTQDFLGRYPVSRHSWVGAWRGPQGWHWIDEAPLPPQLLPEDGEDNLDINCGALEEGTLVAANCSTPRPWVCAKGTQ

SEQ ID NO: 11989 - protein, 314 aa, Homo sapiens
MEESWEAAPGGQAGAELPMEPVGSLVPTLEQPQVPAKVRQPEGPESSPSPAGAVEKAAGAGLEPSSKKKPPSPRPGSPRVPPLSLGYGVCPEPPSPGPALVKLPRNGEAPGAEPAPSAWAPMELQVDVRVKPVGAAGGSSTPSPRPSTRFLKVPVPESPAFSRHADPAHQLLLRAPSQGGTWGRRSPLAAARTESGCDAEGRASPAEGSAGSPGSPTCCRCKELGLEKEDAALLPRAGLDGDEKLPRAVTLTDSLRTARTIWISTVGPWRKARWWLQTAALQDPGSVPRGPSDLGSAWSSACQADAAPPTGEAS

SEQ ID NO: 11990 - protein, 136 aa, Homo sapiens
MARTKQTARKSTGGKAPRKQLATKAARKSAPATGGVKKPHRYRPGTVALREIRRYQKSTELLIRKLPFQRLVREIAQEFKTDLRFQSSAVMALQEAREAYLVGLFEDTNLCAIHAKRVTIMPKDIQLVSRIRGERA

SEQ ID NO: 11991 - protein, 140 aa, Homo sapiens
MDRSNPVKPALDYFSNRLVNYQISVKCSNQFKLEVCLLNAENKVVDNQAGTQGQLKVLGANLWWPYLMHEHPASLYSWEDGDCSHQSLGPLPACDLCDQLHLRSRQGGSVCGCDPCEQLLLLVSQLRAPGVDSAAAGRPV

SEQ ID NO: 11992 - protein, 136 aa, Homo sapiens
MARTKQTARKSTGGKAPRKQLATKVARKSAPATGGVKKPHRYRPGTVALREIRRYQKSTELLIRKLPFQRLMREIAQDFKTDLRFQSSAVMALQEACESYLVGLFEDTNLCVIHAKRVTIMPKDIQLARRIRGERA

SEQ ID NO: 11993 - protein, 115 aa, Homo sapiens
MPRRRRRRGSSGAGGRGRTCSRTVRAELSFSVSQVERSLREGHYAQRLSRTAPVYLAAVIEYLTAKVLELAGNEAQNSGERNITPLLLDMVVHNDRLLSTLFNTTTISQVAPGED

SEQ ID NO: 11994 - protein, 143 aa, Homo sapiens
MSGRGKTGGKARAKAKSRSSRAGLQFPVGRVHRLLRKGHYAERVGAGAPVYLAAVLEYLTAEILELAGNAARDNKKTRIIPRHLQLAIRNDEELNKLLGGVTIAQGGVLPNIQAVLLPKKTSATVGPKAPSGGKKATQASQEY

SEQ ID NO: 11995 - protein, 136 aa, Homo sapiens
MARTKQTARKSTGGKAPRKQLATKAARKSAPSTGGVKKPHRYRPGTVALREIRRYQKSTELLIRKLPFQRLVREIAQDFKTDLRFQSAAIGALQEASEAYLVGLFEDTNLCAIHAKRVTIMPKDIQLARRIRGERA

SEQ ID NO: 11996 - protein, 225 aa, Homo sapiens
MAVRSLWAGRLRVQRLLAWSAAWESKGWPLPFSTATQRTAGEDCRSEDPPDELGPPLAERALRVKAVKLEKEVQDLTVRYQRAIADCENIRRRTQRCVEDAKIFGIQSFCKDLVEVADILEKTTECISEESEPEDQKLTLEKVFRGLLLLEAKLKSVFAKHGLEKLTPIGDKYDPHEHELICHVPAGVGVQPGTVALVRQDGYKLHGRTIRLARVEVAVESQRRL

SEQ ID NO: 11997 - protein, 122 aa, Homo sapiens
MAVRSLWAGRLRVQRLLAWSAAWESKGWPLPFSTATQRTAGEDCRSEDPPDELGPPLAERALRVKAVKLEKEVQDLTESRVSVRTWWRWLTFWRRLQSAFLKNRSLRTKSSLWRRSSEGCCF

SEQ ID NO: 11998 - protein, 382 aa, Homo sapiens
MLLMVVSMACVGLFLVQRAGPHMGGQDKPFLSAWPSAVVPRGGHVTLRCHYRHRFNNFMLYKEDRIHVPIFHGRIFQEGFNMSPVTTAHAGNYTCRGSHPHSPTGWSAPSNPMVIMVTGNHRKPSLLAHPGPLVKSGERVILQCWSDIMFEHFFLHREWISKDPSRLVGQIHDGVSKANFSIGSMMRALAGTYRCYGSVTHTPYQLSAPSDPLDIVVTGLYEKPSLSAQPGPKVQAGESVTLSCSSRSSYDMYHLSREGGAHERRLPAVRKVNRTFQADFPLGPATHGGTYRCFGSFRHSPYEWSDPSDPLLVSVTGNPSSSWPSPTEPSSKSGNLRHLHILIGTSVVKIPFTILLFFLLHRWCSNKKKCCCNGPRACREQK

SEQ ID NO: 11999 - protein, 1212 aa, Homo sapiens
MVLLLILSVLLLKEDVRGSAQSSERRVVAHMPGDIIIGALFSVHHQPTVDKVHERKCGAVREQYGIQRVEAMLHTLERINSDPTLLPNITLGCEIRDSCWHSAVALEQSIEFIRDSLISSEEEEGLVRCVDGSSSSFRSKKPIVGVIGPGSSSVAIQVQNLLQLFNIPQIAYSATSMDLSDKTLFKYFMRVVPSDAQQARAMVDIVKRYNWTYVSAVHTEGNYGESGMEAFKDMSAKEGICIAHSYKIYSNAGEQSFDKLLKKLTSHLPKARVVACFCEGMTVRGLLMAMRRLGLAGEFLLLGSDGWADRYDVTDGYQREAVGGITIKLQSPDVKWFDDYYLKLRPETNHRNPWFQEFWQHRFQCRLEGFPQENSKYNKTCNSSLTLKTHHVQDSKMGFVINAIYSMAYGLHNMQMSLCPGYAGLCDAMKPIDGRKLLESLMKTNFTGVSGDTILFDENGDSPGRYEIMNFKEMGKDYFDYINVGSWDNGELKMDDDEVWSKKSNIIRSVCSEPCEKGQIKVIRKGEVSCCWTCTPCKENEYVFDEYTCKACQLGSWPTDDLTGCDLIPVQYLRWGDPEPIAAVVFACLGLLATLFVTVVFIIYRDTPVVKSSSRELCYIILAGICLGYLCTFCLIAKPKQIYCYLQRIGIGLSPAMSYSALVTKTNRIARILAGSKKKICTKKPRFMSACAQLVIAFILICIQLGIIVALFIMEPPDIMHDYPSIREVYLICNTTNLGVVTPLGYNGLLILSCTFYAFKTRNVPANFNEAKYIAFTMYTTCIIWLAFVPIYFGSNYKIITMCFSVSLSATVALGCMFVPKVYIILAKPERNVRSAFTTSTVVRMHVGDGKSSSAASRSSSLVNLWKRRGSSGETLRYKDRRLAQHKSEIECFTPKGSMGNGGRATMSSSNGKSVTWAQNEKSSRGQHLWQRLSIHINKKENPNQTAVIKPFPKSTESRGLGAGAGAGGSAGGVGATGGAGCAGAGPGGPESPDAGPKALYDVAEAEEHFPAPARPRSPSPISTLSHRAGSASRTDDDVPSLHSEPVARSSSSQGSLMEQISSVVTRFTANISELNSMMLSTAAPSPGVGAPLCSSYLIPKEIQLPTTMTTFAEIQPLPAIEVTGGAQPAAGAQAAGDAARESPAAGPEAAAAKPDLEELVALTPPSPFRDSVDSGSTTPNSPVSESALCIPSSPKYDTLIIRDYTQSSSSL

SEQ ID NO: 12000 - protein, 1180 aa, Homo sapiens
MVLLLILSVLLLKEDVRGSAQSSERRVVAHMPGDIIIGALFSVHHQPTVDKVHERKCGAVREQYGIQRVEAMLHTLERINSDPTLLPNITLGCEIRDSCWHSAVALEQSIEFIRDSLISSEEEEGLVRCVDGSSSSFRSKKPIVGVIGPGSSSVAIQVQNLLQLFNIPQIAYSATSMDLSDKTLFKYFMRVVPSDAQQARAMVDIVKRYNWTYVSAVHTEGNYGESGMEAFKDMSAKEGICIAHSYKIYSNAGEQSFDKLLKKLTSHLPKARVVACFCEGMTVRGLLMAMRRLGLAGEFLLLGSDGWADRYDVTDGYQREAVGGITIKLQSPDVKWFDDYYLKLRPETNHRNPWFQEFWQHRFQCRLEGFPQENSKYNKTCNSSLTLKTHHVQDSKMGFVINAIYSMAYGLHNMQMSLCPGYAGLCDAMKPIDGRKLLESLMKTNFTGVSGDTILFDENGDSPGRYEIMNFKEMGKDYFDYINVGSWDNGELKMDDDEVWSKKSNIIRSVCSEPCEKGQIKVIRKGEVSCCWTCTPCKENEYVFDEYTCKACQLGSWPTDDLTGCDLIPVQYLRWGDPEPIAAVVFACLGLLATLFVTVVFIIYRDTPVVKSSSRELCYIILAGICLGYLCTFCLIAKPKQIYCYLQRIGIGLSPAMSYSALVTKTNRIARILAGSKKKICTKKPRFMSACAQLVIAFILICIQLGIIVALFIMEPPDIMHDYPSIREVYLICNTTNLGVVTPLGYNGLLILSCTFYAFKTRNVPANFNEAKYIAFTMYTTCIIWLAFVPIYFGSNYKIITMCFSVSLSATVALGCMFVPKVYIILAKPERNVRSAFTTSTVVRMHVGDGKSSSAASRSSSLVNLWKRRGSSGETLSSNGKSVTWAQNEKSSRGQHLWQRLSIHINKKENPNQTAVIKPFPKSTESRGLGAGAGAGGSAGGVGATGGAGCAGAGPGGPESPDAGPKALYDVAEAEEHFPAPARPRSPSPISTLSHRAGSASRTDDDVPSLHSEPVARSSSSQGSLMEQISSVVTRFTANISELNSMMLSTAAPSPGVGAPLCSSYLIPKEIQLPTTMTTFAEIQPLPAIEVTGGAQPAAGAQAAGDAARESPAAGPEAAAAKPDLEELVALTPPSPFRDSVDSGSTTPNSPVSESALCIPSSPKYDTLIIRDYTQSSSSL

SEQ ID NO: 12001 - protein, 942 aa, Homo sapiens
MVLLLILSVLLLKEDVRGSAQSSERRVVAHMPGDIIIGALFSVHHQPTVDKVHERKCGAVREQYGIQRVEAMLHTLERINSDPTLLPNITLGCEIRDSCWHSAVALEQSIEFIRDSLISSEEEEGLVRCVDGSSSSFRSKKPIVGVIGPGSSSVAIQVQNLLQLFNIPQIAYSATSMDLSDKTLFKYFMRVVPSDAQQARAMVDIVKRYNWTYVSAVHTEGNYGESGMEAFKDMSAKEGICIAHSYKIYSNAGEQSFDKLLKKLTSHLPKARVVACFCEGMTVRGLLMAMRRLGLAGEFLLLGSDGWADRYDVTDGYQREAVGGITIKLQSPDVKWFDDYYLKLRPETNHRNPWFQEFWQHRFQCRLEGFPQENSKYNKTCNSSLTLKTHHVQDSKMGFVINAIYSMAYGLHNMQMSLCPGYAGLCDAMKPIDGRKLLESLMKTNFTGVSGDTILFDENGDSPGRYEIMNFKEMGKDYFDYINVGSWDNGELKMDDDEVWSKKSNIIRSVCSEPCEKGQIKVIRKGEVSCCWTCTPCKENEYVFDEYTCKACQLGSWPTDDLTGCDLIPVQYLRWGDPEPIAAVVFACLGLLATLFVTVVFIIYRDTPVVKSSSRELCYIILAGICLGYLCTFCLIAKPKQIYCYLQRIGIGLSPAMSYSALVTKTNRIARILAGSKKKICTKKPRFMSACAQLVIAFILICIQLGIIVALFIMEPPDIMHDYPSIREVYLICNTTNLGVVTPLGYNGLLILSCTFYAFKTRNVPANFNEAKYIAFTMYTTCIIWLAFVPIYFGSNYKIITMCFSVSLSATVALGCMFVPKVYIILAKPERNVRSAFTTSTVVRMHVGDGKSSSAASRSSSLVNLWKRRGSSGETLRYKDRRLAQHKSEIECFTPPSPFRDSVDSGSTTPNSPVSESALCIPSSPKYDTLIIRDYTQSSSSL

SEQ ID NO: 12002 - protein, 952 aa, Homo sapiens
MDLRVGQRPPVEPPPEPTLLALQRPQRLHHHLFLAGLQQQRSVEPMRLSMDTPMPELQVGPQEQELRQLLHKDKSKRSAVASSVVKQKLAEVILKKQQAALERTVHPNSPGIPYRTLEPLETEGATRSMLSSFLPPVPSLPSDPPEHFPLRKTVSEPNLKLRYKPKKSLERRKNPLLRKESAPPSLRRRPAETLGDSSPSSSSTPASGCSSPNDSEHGPNPILGSEALLGQRLRLQETSVAPFALPTVSLLPAITLGLPAPARADSDRRTHPTLGPRGPILGSPHTPLFLPHGLEPEAGGTLPSRLQPILLLDPSGSHAPLLTVPGLGPLPFHFAQSLMTTERLSGSGLHWPLSRTRSEPLPPSATAPPPPGPMQPRLEQLKTHVQVIKRSAKPSEKPRLRQIPSAEDLETDGGGPGQVVDDGLEHRELGHGQPEARGPAPLQQHPQVLLWEQQRLAGRLPRGSTGDTVLLPLAQGGHRPLSRAQSSPAAPASLSAPEPASQARVLSSSETPARTLPFTTGLIYDSVMLKHQCSCGDNSRHPEHAGRIQSIWSRLQERGLRSQCECLRGRKASLEELQSVHSERHVLLYGTNPLSRLKLDNGKLAGLLAQRMFVMLPCGGVGVDTDTIWNELHSSNAARWAAGSVTDLAFKVASRELKNGFAVVRPPGHHADHSTAMGFCFFNSVAIACRQLQQQSKASKILIVDWDVHHGNGTQQTFYQDPSVLYISLHRHDDGNFFPGSGAVDEVGAGSGEGFNVNVAWAGGLDPPMGDPEYLAAFRIVVMPIAREFSPDLVLVSAGFDAAEGHPAPLGGYHVSAKCFGYMTQQLMNLAGGAVVLALEGGHDLTAICDASEACVAALLGNRVDPLSEEGWKQKPNLNAIRSLEAVIRVHSKYWGCMQRLASCPDSWVPRVPGADKEEVEAVTALASLSVGILAEDRPSEQLVEEEEPMNL

SEQ ID NO: 12003 - protein, 480 aa, Homo sapiens
MQACVGVRGVYPPGSMWVPAVAVLACSLQPRPWGVRTPWVPALTLAPAGLIYDSVMLKHQCSCGDNSRHPEHAGRIQSIWSRLQERGLRSQCECLRGRKASLEELQSVHSERHVLLYGTNPLSRLKLDNGKLAGLLAQRMFVMLPCGGVGVDTDTIWNELHSSNAARWAAGSVTDLAFKVASRELKNGFAVVRPPGHHADHSTAMGFCFFNSVAIACRQLQQQSKASKILIVDWDVHHGNGTQQTFYQDPSVLYISLHRHDDGNFFPGSGAVDEVGAGSGEGFNVNVAWAGGLDPPMGDPEYLAAFRIVVMPIAREFSPDLVLVSAGFDAAEGHPAPLGGYHVSAKCFGYMTQQLMNLAGGAVVLALEGGHDLTAICDASEACVAALLGNRVDPLSEEGWKQKPNLNAIRSLEAVIRVHSKYWGCMQRLASCPDSWVPRVPGADKEEVEAVTALASLSVGILAEDRPSEQLVEEEEPMNL

SEQ ID NO: 12004 - protein, 915 aa, Homo sapiens
MDLRVGQRPPVEPPPEPTLLALQRPQRLHHHLFLAGLQQQRSVEPMRLSMDTPMPELQVGPQEQELRQLLHKDKSKRSAVASSVVKQKLAEVILKKQQAALERTVHPNSPGIPYRTLEPLETEGATRSMLSSFLPPVPSLPSDPPEHFPLRKTVSEPNLKLRYKPKKSLERRKNPLLRKESAPPSLRRRPAETLGDSSPSSSSTPASGCSSPNDSEHGPNPILGSEADSDRRTHPTLGPRGPILGSPHTPLFLPHGLEPEAGGTLPSRLQPILLLDPSGSHAPLLTVPGLGPLPFHFAQSLMTTERLSGSGLHWPLSRTRSEPLPPSATAPPPPGPMQPRLEQLKTHVQVIKRSAKPSEKPRLRQIPSAEDLETDGGGPGQVVDDGLEHRELGHGQPEARGPAPLQQHPQVLLWEQQRLAGRLPRGSTGDTVLLPLAQGGHRPLSRAQSSPAAPASLSAPEPASQARVLSSSETPARTLPFTTGLIYDSVMLKHQCSCGDNSRHPEHAGRIQSIWSRLQERGLRSQCECLRGRKASLEELQSVHSERHVLLYGTNPLSRLKLDNGKLAGLLAQRMFVMLPCGGVGVDTDTIWNELHSSNAARWAAGSVTDLAFKVASRELKNGFAVVRPPGHHADHSTAMGFCFFNSVAIACRQLQQQSKASKILIVDWDVHHGNGTQQTFYQDPSVLYISLHRHDDGNFFPGSGAVDEVGAGSGEGFNVNVAWAGGLDPPMGDPEYLAAFRIVVMPIAREFSPDLVLVSAGFDAAEGHPAPLGGYHVSAKCFGYMTQQLMNLAGGAVVLALEGGHDLTAICDASEACVAALLGNRVDPLSEEGWKQKPNLNAIRSLEAVIRVHSKYWGCMQRLASCPDSWVPRVPGADKEEVEAVTALASLSVGILAEDRPSEQLVEEEEPMNL

SEQ ID NO: 12005 - protein, 922 aa, Homo sapiens
MDLRVGQRPPVEPPPEPTLLALQRPQRLHHHLFLAGLQQQRSVEPMRLSMDTPMPELQVGPQEQELRQLLHKDKSKRSAVASSVVKQKLAEVILKKQQAALERTVHPNSPGIPYRTLEPLETEGATRSMLSSFLPPVPSLPSDPPEHFPLRKTVSEPNLKLRYKPKKSLERRKNPLLRKESAPPSLRRRPAETLGDSSPSSSSTPASGCSSPNDSEHGPNPILGSEGLPAPARADSDRRTHPTLGPRGPILGSPHTPLFLPHGLEPEAGGTLPSRLQPILLLDPSGSHAPLLTVPGLGPLPFHFAQSLMTTERLSGSGLHWPLSRTRSEPLPPSATAPPPPGPMQPRLEQLKTHVQVIKRSAKPSEKPRLRQIPSAEDLETDGGGPGQVVDDGLEHRELGHGQPEARGPAPLQQHPQVLLWEQQRLAGRLPRGSTGDTVLLPLAQGGHRPLSRAQSSPAAPASLSAPEPASQARVLSSSETPARTLPFTTGLIYDSVMLKHQCSCGDNSRHPEHAGRIQSIWSRLQERGLRSQCECLRGRKASLEELQSVHSERHVLLYGTNPLSRLKLDNGKLAGLLAQRMFVMLPCGGVGVDTDTIWNELHSSNAARWAAGSVTDLAFKVASRELKNGFAVVRPPGHHADHSTAMGFCFFNSVAIACRQLQQQSKASKILIVDWDVHHGNGTQQTFYQDPSVLYISLHRHDDGNFFPGSGAVDEVGAGSGEGFNVNVAWAGGLDPPMGDPEYLAAFRIVVMPIAREFSPDLVLVSAGFDAAEGHPAPLGGYHVSAKCFGYMTQQLMNLAGGAVVLALEGGHDLTAICDASEACVAALLGNRVDPLSEEGWKQKPNLNAIRSLEAVIRVHSKYWGCMQRLASCPDSWVPRVPGADKEEVEAVTALASLSVGILAEDRPSEQLVEEEEPMNL

SEQ ID NO: 12006 - protein, 991 aa, Homo sapiens
MHSPGADGTQVSPGAHYCSPTGAGCPRPCADTPGPQPQPMDLRVGQRPPVEPPPEPTLLALQRPQRLHHHLFLAGLQQQRSVEPMRLSMDTPMPELQVGPQEQELRQLLHKDKSKRSAVASSVVKQKLAEVILKKQQAALERTVHPNSPGIPYRTLEPLETEGATRSMLSSFLPPVPSLPSDPPEHFPLRKTVSEPNLKLRYKPKKSLERRKNPLLRKESAPPSLRRRPAETLGDSSPSSSSTPASGCSSPNDSEHGPNPILGSEALLGQRLRLQETSVAPFALPTVSLLPAITLGLPAPARADSDRRTHPTLGPRGPILGSPHTPLFLPHGLEPEAGGTLPSRLQPILLLDPSGSHAPLLTVPGLGPLPFHFAQSLMTTERLSGSGLHWPLSRTRSEPLPPSATAPPPPGPMQPRLEQLKTHVQVIKRSAKPSEKPRLRQIPSAEDLETDGGGPGQVVDDGLEHRELGHGQPEARGPAPLQQHPQVLLWEQQRLAGRLPRGSTGDTVLLPLAQGGHRPLSRAQSSPAAPASLSAPEPASQARVLSSSETPARTLPFTTGLIYDSVMLKHQCSCGDNSRHPEHAGRIQSIWSRLQERGLRSQCECLRGRKASLEELQSVHSERHVLLYGTNPLSRLKLDNGKLAGLLAQRMFVMLPCGGVGVDTDTIWNELHSSNAARWAAGSVTDLAFKVASRELKNGFAVVRPPGHHADHSTAMGFCFFNSVAIACRQLQQQSKASKILIVDWDVHHGNGTQQTFYQDPSVLYISLHRHDDGNFFPGSGAVDEVGAGSGEGFNVNVAWAGGLDPPMGDPEYLAAFRIVVMPIAREFSPDLVLVSAGFDAAEGHPAPLGGYHVSAKCFGYMTQQLMNLAGGAVVLALEGGHDLTAICDASEACVAALLGNRVDPLSEEGWKQKPNLNAIRSLEAVIRVHSKYWGCMQRLASCPDSWVPRVPGADKEEVEAVTALASLSVGILAEDRPSEQLVEEEEPMNL

SEQ ID NO: 12007 - protein, 974 aa, Homo sapiens
MHSPGAGCPRPCADTPGPQPQPMDLRVGQRPPVEPPPEPTLLALQRPQRLHHHLFLAGLQQQRSVEPMRLSMDTPMPELQVGPQEQELRQLLHKDKSKRSAVASSVVKQKLAEVILKKQQAALERTVHPNSPGIPYRTLEPLETEGATRSMLSSFLPPVPSLPSDPPEHFPLRKTVSEPNLKLRYKPKKSLERRKNPLLRKESAPPSLRRRPAETLGDSSPSSSSTPASGCSSPNDSEHGPNPILGSEALLGQRLRLQETSVAPFALPTVSLLPAITLGLPAPARADSDRRTHPTLGPRGPILGSPHTPLFLPHGLEPEAGGTLPSRLQPILLLDPSGSHAPLLTVPGLGPLPFHFAQSLMTTERLSGSGLHWPLSRTRSEPLPPSATAPPPPGPMQPRLEQLKTHVQVIKRSAKPSEKPRLRQIPSAEDLETDGGGPGQVVDDGLEHRELGHGQPEARGPAPLQQHPQVLLWEQQRLAGRLPRGSTGDTVLLPLAQGGHRPLSRAQSSPAAPASLSAPEPASQARVLSSSETPARTLPFTTGLIYDSVMLKHQCSCGDNSRHPEHAGRIQSIWSRLQERGLRSQCECLRGRKASLEELQSVHSERHVLLYGTNPLSRLKLDNGKLAGLLAQRMFVMLPCGGVGVDTDTIWNELHSSNAARWAAGSVTDLAFKVASRELKNGFAVVRPPGHHADHSTAMGFCFFNSVAIACRQLQQQSKASKILIVDWDVHHGNGTQQTFYQDPSVLYISLHRHDDGNFFPGSGAVDEVGAGSGEGFNVNVAWAGGLDPPMGDPEYLAAFRIVVMPIAREFSPDLVLVSAGFDAAEGHPAPLGGYHVSAKCFGYMTQQLMNLAGGAVVLALEGGHDLTAICDASEACVAALLGNRVDPLSEEGWKQKPNLNAIRSLEAVIRVHSKYWGCMQRLASCPDSWVPRVPGADKEEVEAVTALASLSVGILAEDRPSEQLVEEEEPMNL

SEQ ID NO: 12008 - protein, 954 aa, Homo sapiens
MHSPGADGTQVSPGAHYCSPTGAGCPRPCADTPGPQPQPMDLRVGQRPPVEPPPEPTLLALQRPQRLHHHLFLAGLQQQRSVEPMRLSMDTPMPELQVGPQEQELRQLLHKDKSKRSAVASSVVKQKLAEVILKKQQAALERTVHPNSPGIPYRTLEPLETEGATRSMLSSFLPPVPSLPSDPPEHFPLRKTVSEPNLKLRYKPKKSLERRKNPLLRKESAPPSLRRRPAETLGDSSPSSSSTPASGCSSPNDSEHGPNPILGSEADSDRRTHPTLGPRGPILGSPHTPLFLPHGLEPEAGGTLPSRLQPILLLDPSGSHAPLLTVPGLGPLPFHFAQSLMTTERLSGSGLHWPLSRTRSEPLPPSATAPPPPGPMQPRLEQLKTHVQVIKRSAKPSEKPRLRQIPSAEDLETDGGGPGQVVDDGLEHRELGHGQPEARGPAPLQQHPQVLLWEQQRLAGRLPRGSTGDTVLLPLAQGGHRPLSRAQSSPAAPASLSAPEPASQARVLSSSETPARTLPFTTGLIYDSVMLKHQCSCGDNSRHPEHAGRIQSIWSRLQERGLRSQCECLRGRKASLEELQSVHSERHVLLYGTNPLSRLKLDNGKLAGLLAQRMFVMLPCGGVGVDTDTIWNELHSSNAARWAAGSVTDLAFKVASRELKNGFAVVRPPGHHADHSTAMGFCFFNSVAIACRQLQQQSKASKILIVDWDVHHGNGTQQTFYQDPSVLYISLHRHDDGNFFPGSGAVDEVGAGSGEGFNVNVAWAGGLDPPMGDPEYLAAFRIVVMPIAREFSPDLVLVSAGFDAAEGHPAPLGGYHVSAKCFGYMTQQLMNLAGGAVVLALEGGHDLTAICDASEACVAALLGNRVDPLSEEGWKQKPNLNAIRSLEAVIRVHSKYWGCMQRLASCPDSWVPRVPGADKEEVEAVTALASLSVGILAEDRPSEQLVEEEEPMNL

SEQ ID NO: 12009 - protein, 1014 aa, Homo sapiens
MSDLRKRELGALFTSRGTGGVEWDGTQVSPGAHYCSPTGAGCPRPCADTPGPQPQPMDLRVGQRPPVEPPPEPTLLALQRPQRLHHHLFLAGLQQQRSVEPMRLSMDTPMPELQVGPQEQELRQLLHKDKSKRSAVASSVVKQKLAEVILKKQQAALERTVHPNSPGIPYRTLEPLETEGATRSMLSSFLPPVPSLPSDPPEHFPLRKTVSEPNLKLRYKPKKSLERRKNPLLRKESAPPSLRRRPAETLGDSSPSSSSTPASGCSSPNDSEHGPNPILGSEALLGQRLRLQETSVAPFALPTVSLLPAITLGLPAPARADSDRRTHPTLGPRGPILGSPHTPLFLPHGLEPEAGGTLPSRLQPILLLDPSGSHAPLLTVPGLGPLPFHFAQSLMTTERLSGSGLHWPLSRTRSEPLPPSATAPPPPGPMQPRLEQLKTHVQVIKRSAKPSEKPRLRQIPSAEDLETDGGGPGQVVDDGLEHRELGHGQPEARGPAPLQQHPQVLLWEQQRLAGRLPRGSTGDTVLLPLAQGGHRPLSRAQSSPAAPASLSAPEPASQARVLSSSETPARTLPFTTGLIYDSVMLKHQCSCGDNSRHPEHAGRIQSIWSRLQERGLRSQCECLRGRKASLEELQSVHSERHVLLYGTNPLSRLKLDNGKLAGLLAQRMFVMLPCGGVGVDTDTIWNELHSSNAARWAAGSVTDLAFKVASRELKNGFAVVRPPGHHADHSTAMGFCFFNSVAIACRQLQQQSKASKILIVDWDVHHGNGTQQTFYQDPSVLYISLHRHDDGNFFPGSGAVDEVGAGSGEGFNVNVAWAGGLDPPMGDPEYLAAFRIVVMPIAREFSPDLVLVSAGFDAAEGHPAPLGGYHVSAKCFGYMTQQLMNLAGGAVVLALEGGHDLTAICDASEACVAALLGNRVDPLSEEGWKQKPNLNAIRSLEAVIRVHMGALTLSQIPGHGSSQQQAGGAFSRPGHPCRAAVVMVNTGAACSAWPPVQTPGCLECQGLTKKKWRQ

SEQ ID NO: 12010 - protein, 425 aa, Homo sapiens
MLKHQCSCGDNSRHPEHAGRIQSIWSRLQERGLRSQCECLRGRKASLEELQSVHSERHVLLYGTNPLSRLKLDNGKLAGLLAQRMFVMLPCGGVGVDTDTIWNELHSSNAARWAAGSVTDLAFKVASRELKNGFAVVRPPGHHADHSTAMGFCFFNSVAIACRQLQQQSKASKILIVDWDVHHGNGTQQTFYQDPSVLYISLHRHDDGNFFPGSGAVDEVGAGSGEGFNVNVAWAGGLDPPMGDPEYLAAFRIVVMPIAREFSPDLVLVSAGFDAAEGHPAPLGGYHVSAKCFGYMTQQLMNLAGGAVVLALEGGHDLTAICDASEACVAALLGNRVDPLSEEGWKQKPNLNAIRSLEAVIRVHSKYWGCMQRLASCPDSWVPRVPGADKEEVEAVTALASLSVGILAEDRPSEQLVEEEEPMNL

SEQ ID NO: 12011 - protein, 614 aa, Homo sapiens
MTTERLSGSGLHWPLSRTRSEPLPPSATAPPPPGPMQPRLEQLKTHVQVIKRSAKPSEKPRLRQIPSAEDLETDGGGPGQVVDDGLEHRELGHGQPEARGPAPLQQHPQVLLWEQQRLAGRLPRGSTGDTVLLPLAQGGHRPLSRAQSSPAAPASLSAPEPASQARVLSSSETPARTLPFTTGLIYDSVMLKHQCSCGDNSRHPEHAGRIQSIWSRLQERGLRSQCECLRGRKASLEELQSVHSERHVLLYGTNPLSRLKLDNGKLAGLLAQRMFVMLPCGGVGVDTDTIWNELHSSNAARWAAGSVTDLAFKVASRELKNGFAVVRPPGHHADHSTAMGFCFFNSVAIACRQLQQQSKASKILIVDWDVHHGNGTQQTFYQDPSVLYISLHRHDDGNFFPGSGAVDEVGAGSGEGFNVNVAWAGGLDPPMGDPEYLAAFRIVVMPIAREFSPDLVLVSAGFDAAEGHPAPLGGYHVSAKCFGYMTQQLMNLAGGAVVLALEGGHDLTAICDASEACVAALLGNRVDPLSEEGWKQKPNLNAIRSLEAVIRVHSKYWGCMQRLASCPDSWVPRVPGADKEEVEAVTALASLSVGILAEDRPSEQLVEEEEPMNL

SEQ ID NO: 12012 - protein, 1122 aa, Homo sapiens
MNSPNESDGMSGREPSLEILPRTSLHSIPVTVEVKPVLPRAMPSSMGGGGGGSPSPVELRGALVGSVDPTLREQQLQQELLALKQQQQLQKQLLFAEFQKQHDHLTRQHEVQLQKHLKQQQEMLAAKQQQEMLAAKRQQELEQQRQREQQRQEELEKQRLEQQLLILRNKEKSKESAIASTEVKLRLQEFLLSKSKEPTPGGLNHSLPQHPKCWGAHHASLDQSSPPQSGPPGTPPSYKLPLPGPYDSRDDFPLRKTASEPNLKVRSRLKQKVAERRSSPLLRRKDGTVISTFKKRAVEITGAGPGASSVCNSAPGSGPSSPNSSHSTIAENGFTGSVPNIPTEMLPQHRALPLDSSPNQFSLYTSPSLPNISLGLQATVTVTNSHLTASPKLSTQQEAERQALQSLRQGGTLTGKFMSTSSIPGCLLGVALEGDGSPHGHASLLQHVLLLEQARQQSTLIAVPLHGQSPLVTGERVATSMRTVGKLPRHRPLSRTQSSPLPQSPQALQQLVMQQQHQQFLEKQKQQQLQLGKILTKTGELPRQPTTHPEETEEELTEQQEVLLGEGALTMPREGSTESESTQEDLEEEDEEDDGEEEEDCIQVKDEEGESGAEEGPDLEEPGAGYKKLFSDAQPLQPLQVYQAPLSLATVPHQALGRTQSSPAAPGGMKSPPDQPVKHLFTTGVVYDTFMLKHQCMCGNTHVHPEHAGRIQSIWSRLQETGLLSKCERIRGRKATLDEIQTVHSEYHTLLYGTSPLNRQKLDSKKLLGPISQKMYAVLPCGGIGVDSDTVWNEMHSSSAVRMAVGCLLELAFKVAAGELKNGFAIIRPPGHHAEESTAMGFCFFNSVAITAKLLQQKLNVGKVLIVDWDIHHGNGTQQAFYNDPSVLYISLHRYDNGNFFPGSGAPEEVGGGPGVGYNVNVAWTGGVDPPIGDVEYLTAFRTVVMPIAHEFSPDVVLVSAGFDAVEGHLSPLGGYSVTARCFGHLTRQLMTLAGGRVVLALEGGHDLTAICDASEACVSALLSVELQPLDEAVLQQKPNINAVATLEKVIEIQSKHWSCVQKFAAGLGRSLREAQAGETEEAETVSAMALLSVGAEQAQAAAAREHSPRPAEEPMEQEPAL

SEQ ID NO: 12013 - protein, 1037 aa, Homo sapiens
MNSPNESDGMSGREPSLEILPRTSLHSIPVTVEVKPVLPRAMPSSMGGGGGGSPSPVELRGALVGSVDPTLREQQLQQELLALKQQQQLQKQLLFAEFQKQHDHLTRQHEVQLQKHLKQQQEMLAAKQQQEMLAAKRQQELEQQRQREQQRQEELEKQRLEQQLLILRNKEKSKESAIASTEVKLRLQEFLLSKSKEPTPGGLNHSLPQHPKCWGAHHASLDQSSPPQSGPPGTPPSYKLPLPGPYDSRDDFPLRKTASEPNLKVRSRLKQKVAERRSSPLLRRKDGTVISTFKKRAVEITGAGPGASSVCNSAPGSGPSSPNSSHSTIAENGFTGSVPNIPTEMLPQHRALPLDSSPNQFSLYTSPSLPNISLGLQATVTVTNSHLTASPKLSTQQEAERQALQSLRQGGTLTGKFMSTSSIPGCLLGVALEGDGSPHGHASLLQHVLLLEQARQQSTLIAVPLHGQSPLVTGERVATSMRTVGKLPRHRPLSRTQSSPLPQSPQALQQLVMQQQHQQFLEKQKQQQLQLGKILTKTGELPRQPTTHPEETEEELTEQQEVLLGEGALTMPREGSTESESTQEDLEEEDEEDDGEEEEDCIQVKDEEGESGAEEGPDLEEPGAGYKKLFSDAQPLQPLQVYQAPLSLATVPHQALGRTQSSPAAPGGMKSPPDQPVKHLFTTGPISQKMYAVLPCGGIGVDSDTVWNEMHSSSAVRMAVGCLLELAFKVAAGELKNGFAIIRPPGHHAEESTAMGFCFFNSVAITAKLLQQKLNVGKVLIVDWDIHHGNGTQQAFYNDPSVLYISLHRYDNGNFFPGSGAPEEVGGGPGVGYNVNVAWTGGVDPPIGDVEYLTAFRTVVMPIAHEFSPDVVLVSAGFDAVEGHLSPLGGYSVTARCFGHLTRQLMTLAGGRVVLALEGGHDLTAICDASEACVSALLSVELQPLDEAVLQQKPNINAVATLEKVIEIQSKHWSCVQKFAAGLGRSLREAQAGETEEAETVSAMALLSVGAEQAQAAAAREHSPRPAEEPMEQEPAL

SEQ ID NO: 12014 - protein, 1123 aa, Homo sapiens
MNSPNESADGMSGREPSLEILPRTSLHSIPVTVEVKPVLPRAMPSSMGGGGGGSPSPVELRGALVGSVDPTLREQQLQQELLALKQQQQLQKQLLFAEFQKQHDHLTRQHEVQLQKHLKQQQEMLAAKQQQEMLAAKRQQELEQQRQREQQRQEELEKQRLEQQLLILRNKEKSKESAIASTEVKLRLQEFLLSKSKEPTPGGLNHSLPQHPKCWGAHHASLDQSSPPQSGPPGTPPSYKLPLPGPYDSRDDFPLRKTASEPNLKVRSRLKQKVAERRSSPLLRRKDGTVISTFKKRAVEITGAGPGASSVCNSAPGSGPSSPNSSHSTIAENGFTGSVPNIPTEMLPQHRALPLDSSPNQFSLYTSPSLPNISLGLQATVTVTNSHLTASPKLSTQQEAERQALQSLRQGGTLTGKFMSTSSIPGCLLGVALEGDGSPHGHASLLQHVLLLEQARQQSTLIAVPLHGQSPLVTGERVATSMRTVGKLPRHRPLSRTQSSPLPQSPQALQQLVMQQQHQQFLEKQKQQQLQLGKILTKTGELPRQPTTHPEETEEELTEQQEVLLGEGALTMPREGSTESESTQEDLEEEDEEDDGEEEEDCIQVKDEEGESGAEEGPDLEEPGAGYKKLFSDAQPLQPLQVYQAPLSLATVPHQALGRTQSSPAAPGGMKSPPDQPVKHLFTTGVVYDTFMLKHQCMCGNTHVHPEHAGRIQSIWSRLQETGLLSKCERIRGRKATLDEIQTVHSEYHTLLYGTSPLNRQKLDSKKLLGPISQKMYAVLPCGGIGVDSDTVWNEMHSSSAVRMAVGCLLELAFKVAAGELKNGFAIIRPPGHHAEESTAMGFCFFNSVAITAKLLQQKLNVGKVLIVDWDIHHGNGTQQAFYNDPSVLYISLHRYDNGNFFPGSGAPEEVGGGPGVGYNVNVAWTGGVDPPIGDVEYLTAFRTVVMPIAHEFSPDVVLVSAGFDAVEGHLSPLGGYSVTARCFGHLTRQLMTLAGGRVVLALEGGHDLTAICDASEACVSALLSVELQPLDEAVLQQKPNINAVATLEKVIEIQSKHWSCVQKFAAGLGRSLREAQAGETEEAETVSAMALLSVGAEQAQAAAAREHSPRPAEEPMEQEPAL

SEQ ID NO: 12015 - protein, 106 aa, Homo sapiens
MATLGFVTPEAPFESSKPPIFEGLSPTVYSNPEGFKEKFLRKTRENPVVPIGFLCTAAVLTNGLYCFHQGNSQCSRLMMHTQIAAQGFTIAAILLGLAATAMKSPP

SEQ ID NO: 12016 - protein, 265 aa, Homo sapiens
MGLPGLFCLAVLAASSFSKAREEEITPVVSIAYKVLEVFPKGRWVLITCCAPQPPPPITYSLCGTKNIKVAKKVVKTHEPASFNLNVTLKSSPDLLTYFCWASSTSGAHVDSARLQMHWELWSKPVSELRANFTLQDRGAGPRVEMICQASSGSPPITNSLIGKDGQVHLQQRPCHRQPANFSFLPSQTSDWFWCQAANNANVQHSALTVVPPGGDQKMEDWQGPLESPILALPLYRSTRRLSEEEFGGFRIGNGEVRGRKAAAM

SEQ ID NO: 12017 - protein, 510 aa, Homo sapiens
MPRGFLVKRSKKSTPVSYRVRGGEDGDRALLLSPSCGGARAEPPAPSPVPGPLPPPPPAERAHAALAAALACAPGPQPPPQGPRAAHFGNPEAAHPAPLYSPTRPVSREHEKHKYFERSFNLGSPVSAESFPTPAALLGGGGGGGASGAGGGGTCGGDPLLFAPAELKMGTAFSAGAEAARGPGPGPPLPPAAALRPPGKRPPPPTAAEPPAKAVKAPGAKKPKAIRKLHFEDEVTTSPVLGLKIKEGPVEAPRGRAGGAARPLGEFICQLCKEEYADPFALAQHKCSRIVRVEYRCPECAKVFSCPANLASHRRWHKPRPAPAAARAPEPEAAARAEAREAPGGGSDRDTPSPGGVSESGSEDGLYECHHCAKKFRRQAYLRKHLLAHHQALQAKGAPLAPPAEDLLALYPGPDEKAPQEAAGDGEGAGVLGLSASAECHLCPVCGESFASKGAQERHLRLLHAAQVFPCKYCPATFYSSPGLTRHINKCHPSENRQVILLQVPVRPAC

SEQ ID NO: 12018 - protein, 239 aa, Homo sapiens
MEGTVESQTPDLRDVEGKVGRKTPEGLLRGLRGECELGTSGALLLPGASSTGHDLGDKIMALKMELAYLRAIDVKILQQLVTLNEGIEAVRWLLEERGTLTSHCSSLTSSQYSLTGGSPGRSRRGSWDSLPDTSTTDRLDSVSIGSFLDTVAPSELDEQGPPGAPRSEMDWAKVIAGGERARTEVDVAATRLGSLRAVWKPPGERLQGGPPESPEDESAKLGFEAHWFWEQCQDDVTFL

SEQ ID NO: 12019 - protein, 107 aa, Homo sapiens
MVRRTLLQAALRAWVIQCWWRSMQAKMLEQRRRLALRLYTCQEWAVVKVQAQVRMWQARRRFLQARQAACIIQSHWRWHASQTRGLIRGHYEVRASRLELDIEILMT

SEQ ID NO: 12020 - protein, 463 aa, Homo sapiens
MRAGPEPQALAGQKRGALRLLVPRLVLTVSAPAEVRRRVLRPVLSWMDRETRALADSHFRGLGVDVPGVGQAPGRVAFVSEPGAFSYADFVRGFLLPNLPCVFSSAFTQGWGSRRRWVTPAGRPDFDHLLRTYGDVVVPVANCGVQEYNSNPKEHMTLRDYITYWKEYIQAGYSSPRGCLYLKDWHLCRDFPVEDVFTLPVYFSSDWLNEFWDALDVDDYRFVYAGPAGSWSPFHADIFRSFSWSVNVCGRKKWLLFPPGQEEALRDRHGNLPYDVTSPALCDTHLHPRNQLAGPPLEITQEAGEMVFVPSGWHHQVHNLDDTISINHNWVNGFNLANMWRFLQQELCAVQEEVSEWRDSMPDWHHHCQVIMRSCSGINFEEFYHFLKVIAEKRLLVLREAAAEDGAGLGFEQAAFDVGRITEVLASLVAHPDFQRVDTSAFSPQPKELLQQLREAVDAAAAP

SEQ ID NO: 12021 - protein, 447 aa, Homo sapiens
MRAGPEPQALAGQKRGALRLLVPRLVLTVSAPAEVRRRVLRPVLSWMDRETRALADSHFRGLGVDVPGVGQAPGRVAFVSEPGAFSYADFVRGFLLPNLPCVFSSAFTQGWGSRRRWVTPAGRPDFDHLLRTYGDVVVPVANCGVQEYNSNPKEHMTLRDYITYWKEYIQAGYSSPRGCLYLKDWHLCRDFPVEDVFTLPVYFSSDWLNEFWDALDVDDYRFVYAGPAGSWSPFHADIFRSFSWSVNVCGRKKWLLFPPGQEEALRDRHGNLPYDVTSPALCDTHLHPRNQLAGPPLEITQEAGEMVFVPSGWHHQVHNLDDTISINHNWVNGFNLANMWRFLQQELCAVQEEVIMRSCSGINFEEFYHFLKVIAEKRLLVLREAAAEDGAGLGFEQAAFDVGRITEVLASLVAHPDFQRVDTSAFSPQPKELLQQLREAVDAAAAP

SEQ ID NO: 12022 - protein, 963 aa, Homo sapiens
MWCLHCNSERTQSLLELELDSGVEGEAPSSETGTSLDSPSAYPQGPLVPGSSLSPDHYEHTSVGAYGLYSGPPGQQQRTRRPKLQHSTSILRKQAEEEAIKRSRSLSESYELSSDLQDKQVEMLERKYGGRLVTRHAARTIQTAFRQYQMNKNFERLRSSMSENRMSRRIVLSNMRMQFSFEGPEKVHSSYFEGKQVSVTNDGSQLGALVSPECGDLSEPTTLKSPAPSSDFADAITELEDAFSRQVKSLAESIDDALNCRSLHTEEAPALDAARARDTEPQTALHGMDHRKLDEMTASYSDVTLYIDEEELSPPLPLSQAGDRPSSTESDLRLRAGGAAPDYWALAHKEDKADTDTSCRSTPSLERQEQRLRVEHLPLLTIEPPSDSSVDLSDRSERGSLKRQSAYERSLGGQQGSPKHGPHSGAPKSLPREEPELRPRPPRPLDSHLAINGSANRQSKSESDYSDGDNDSINSTSNSNDTINCSSESSSRDSLREQTLSKQTYHKEARNSWDSPAFSNDVIRKRHYRIGLNLFNKKPEKGVQYLIERGFVPDTPVGVAHFLLQRKGLSRQMIGEFLGNRQKQFNRDVLDCVVDEMDFSTMELDEALRKFQAHIRVQGEAQKVERLIEAFSQRYCICNPGVVRQFRNPDTIFILAFAIILLNTDMYSPNVKPERKMKLEDFIKNLRGVDDGEDIPREMLMGIYERIRKRELKTNEDHVSQVQKVEKLIVGKKPIGSLHPGLGCVLSLPHRRLVCYCRLFEVPDPNKPQKLGLHQREIFLFNDLLVVTKIFQKKKNSVTYSFRQSFSLYGMQVLLFENQYYPNGIRLTSSVPGADIKVLINFNAPNPQDRKKFTDDLRESIAEVQEMEKHRIESELEKQKGVVRPSMSQCSSLKKESGNGTLSRACLDDSYASGEGLKRSALSSSLRDLSEAGKRGRRSSAGSLESNVEFQPFEPLQPSVLCS

SEQ ID NO: 12023 - protein, 841 aa, Homo sapiens
MLERKYGGRLVTRHAARTIQTAFRQYQMNKNFERLRSSMSENRMSRRIVLSNMRMQFSFEGPEKVHSSYFEGKQVSVTNDGSQLGALVSPECGDLSEPTTLKSPAPSSDFADAITELEDAFSRQVKSLAESIDDALNCRSLHTEEAPALDAARARDTEPQTALHGMDHRKLDEMTASYSDVTLYIDEEELSPPLPLSQAGDRPSSTESDLRLRAGGAAPDYWALAHKEDKADTDTSCRSTPSLERQEQRLRVEHLPLLTIEPPSDSSVDLSDRSERGSLKRQSAYERSLGGQQGSPKHGPHSGAPKSLPREEPELRPRPPRPLDSHLAINGSANRQSKSESDYSDGDNDSINSTSNSNDTINCSSESSSRDSLREQTLSKQTYHKEARNSWDSPAFSNDVIRKRHYRIGLNLFNKKPEKGVQYLIERGFVPDTPVGVAHFLLQRKGLSRQMIGEFLGNRQKQFNRDVLDCVVDEMDFSTMELDEALRKFQAHIRVQGEAQKVERLIEAFSQRYCICNPGVVRQFRNPDTIFILAFAIILLNTDMYSPNVKPERKMKLEDFIKNLRGVDDGEDIPREMLMGIYERIRKRELKTNEDHVSQVQKVEKLIVGKKPIGSLHPGLGCVLSLPHRRLVCYCRLFEVPDPNKPQKLGLHQREIFLFNDLLVVTKIFQKKKNSVTYSFRQSFSLYGMQVLLFENQYYPNGIRLTSSVPGADIKVLINFNAPNPQDRKKFTDDLRESIAEVQEMEKHRIESELEKQKGVVRPSMSQCSSLKKESGNGTLSRACLDDSYASGEGLKRSALSSSLRDLSEAGKRGRRSSAGSLESNVEFQPFEPLQPSVLCS

SEQ ID NO: 12024 - protein, 1114 aa, Homo sapiens
MACRRRYFVEGEAPSSETGTSLDSPSAYPQGPLVPGSSLSPDHYEHTSVGAYGLYSGPPGQQQRTRRPKLQHSTSILRKQAEEEAIKRSRSLSESYELSSDLQDKQVEMLERKYGGRLVTRHAARTIQTAFRQYQMNKNFERLRSSMSENRMSRRIVLSNMRMQFSFEGPEKVHSSYFEGKQVSVTNDGSQLGALVSPECGDLSEPTTLKSPAPSSDFADAITELEDAFSRQVKSLAESIDDALNCRSLHTEEAPALDAARARDTEPQTALHGMDHRKLDEMTASYSDVTLYIDEEELSPPLPLSQAGDRPSSTESDLRLRAGGAAPDYWALAHKEDKADTDTSCRSTPSLERQEQRLRVEHLPLLTIEPPSDSSVDLSDRSERGSLKRQSAYERSLGGQQGSPKHGPHSGAPKSLPREEPELRPRPPRPLDSHLAINGSANRQSKSESDYSDGDNDSINSTSNSNDTINCSSESSSRDSLREQTLSKQTYHKEARNSWDSPAFSNDVIRKRHYRIGLNLFNKKPEKGVQYLIERGFVPDTPVGVAHFLLQRKGLSRQMIGEFLGNRQKQFNRDVLDCVVDEMDFSTMELDEALRKFQAHIRVQGEAQKVERLIEAFSQRYCICNPGVVRQFRNPDTIFILAFAIILLNTDMYSPNVKPERKMKLEDFIKNLRGVDDGEDIPREMLMGIYERIRKRELKTNEDHVSQVQKVEKLIVGKKPIGSLHPGLGCVLSLPHRRLVCYCRLFEVPDPNKPQKLGLHQREIFLFNDLLVVTKIFQKKKNSVTYSFRQSFSLYGMQVLLFENQYYPNGIRLTSSVPGADIKVLINFNAPNPQDRKKFTDDLRESIAEVQEMEKHRIESELEKQKGVVRPSMSQCSSLKKESGNGTLSRACLDDSYASGEGLKRSALSSSLRDLSEAGKRGRRSSAGSLESNVEGSIISSPHMRRRATSTRECPSRPHQTMPNSSSLLGSLFGSKRGKPPPQAHLPSAPALPPPHPPVVLPHLQHSVAGHHLGPPEGLPQAAMHGHHTQYCHMQNPPPYHHHHHHHPPQHIQHAHQYHHGPHGGHPAYGAHAHGHPPLPSAHVGHTVHHHGQPPAPPPPTSSKAKPSGISTIV

SEQ ID NO: 12025 - protein, 628 aa, Homo sapiens
MSPGGKFDFDDGGCYVGGWEAGRAHGYGVCTGPGAQGEYSGCWAHGFESLGVFTGPGGHSYQGHWQQGKREGLGVERKSRWTYRGEWLGGLKGRSGVWESVSGLRYAGLWKDGFQDGYGTETYSDGGTYQGQWQAGKRHGYGVRQSVPYHQAALLRSPRRTSLDSGHSDPPTPPPPLPLPGDEGGSPASGSRGGFVLAGPGDADGASSRKRTPAAGGFFRRSLLLSGLRAGGRRSSLGSKRGSLRSEVSSEVGSTGPPGSEASGPPAAAPPALIEGSATEVYAGEWRADRRSGFGVSQRSNGLRYEGEWLGNRRHGYGRTTRPDGSREEGKYKRNRLVHGGRVRSLLPLALRRGKVKEKVDRAVEGARRAVSAARQRQEIAAARAADALLKAVAASSVAEKAVEAARMAKLIAQDLQPMLEAPGRRPRQDSEGSDTEPLDEDSPGVYENGLTPSEGSPELPSSPASSRQPWRPPACRSPLPPGGDQGPFSSPKAWPEEWGGAGAQAEELAGYEAEDEAGMQGPGPRDGSPLLGGCSDSSGSLREEEGEDEEPLPPLRAPAGTEPEPIAMLVLRGSSSRGPDAGCLTEELGEPAATERPAQPGAANPLVVGAVALLDLSLAFLFSQLLT

SEQ ID NO: 12026 - protein, 76 aa, Homo sapiens
MMEVESSYSDFISCDRTGRRNAVPDIQGDSEAVSVRKLAGDMGELALEGAEGQVEGSAPDKEAGNQPQSSDGTTSS

SEQ ID NO: 12027 - protein, 448 aa, Homo sapiens
MSSRKLSGPKGRRLSIHVVTWNVASAAPPLDLSDLLQLNNRNLNLDIYVIGLQELNSGIISLLSDAAFNDSWSSFLMDVLSPLSFIKVSHVRMQGILLLVFAKYQHLPYIQILSTKSTPTGLFGYWGNKGGVNICLKLYGYYVSIINCHLPPHISNNYQRLEHFDRILEMQNCEGRDIPNILDHDLIIWFGDMNFRIEDFGLHFVRESIKNRCYGGLWEKDQLSIAKKHDPLLREFQEGRLLFPPTYKFDRNSNDYDTSEKKRKPAWTDRILWRLKRQPCAGPDTPIPPASHFSLSLRGYSSHMTYGISDHKPVSGTFDLELKPLVSAPLIVLMPEDLWTVENDMMVSYSSTSDFPSSPWDWIGLYKVGLRDVNDYVSYAWVGDSKVSCSDNLNQVYIDISNIPTTEDEFLLCYYSNSLRSVVGISRPFQIPPGSLREDPLGEAQPQI

SEQ ID NO: 12028 - protein, 372 aa, Homo sapiens
MDVLSPLSFIKVSHVRMQGILLLVFAKYQHLPYIQILSTKSTPTGLFGYWGNKGGVNICLKLYGYYVSIINCHLPPHISNNYQRLEHFDRILEMQNCEGRDIPNILDHDLIIWFGDMNFRIEDFGLHFVRESIKNRCYGGLWEKDQLSIAKKHDPLLREFQEGRLLFPPTYKFDRNSNDYDTSEKKRKPAWTDRILWRLKRQPCAGPDTPIPPASHFSLSLRGYSSHMTYGISDHKPVSGTFDLELKPLVSAPLIVLMPEDLWTVENDMMVSYSSTSDFPSSPWDWIGLYKVGLRDVNDYVSYAWVGDSKVSCSDNLNQVYIDISNIPTTEDEFLLCYYSNSLRSVVGISRPFQIPPGSLREDPLGEAQPQI

SEQ ID NO: 12029 - protein, 797 aa, Homo sapiens
MYLETRRAIFVFWIFLQVQGTKDISINIYHSETKDIDNPPRNETTESTEKMYKMSTMRRIFDLAKHRTKRSAFFPTGVKVCPQESMKQILDSLQAYYRLRVCQEAVWEAYRIFLDRIPDTGEYQDWVSICQQETFCLFDIGKNFSNSQEHLDLLQQRIKQRSFPDRKDEISAEKTLGEPGETIVISTDVANVSLGPFPLTPDDTLLNEILDNTLNDTKMPTTERETEFAVLEEQRVELSVSLVNQKFKAELADSQSPYYQELAGKSQLQMQKIFKKLPGFKKIHVLGFRPKKEKDGSSSTEMQLTAIFKRHSAEAKSPASDLLSFDSNKIESEEVYHGTMEEDKQPEIYLTATDLKRLISKALEEEQSLDVGTIQFTDEIAGSLPAFGPDTQSELPTSFAVITEDATLSPELPPVEPQLETVDGAEHGLPDTSWSPPAMASTSLSEAPPFFMASSIFSLTDQGTTDTMATDQTMLVPGLTIPTSDYSAISQLALGISHPPASSDDSRSSAGGEDMVRHLDEMDLSDTPAPSEVPELSEYVSVPDHFLEDTTPVSALQYITTSSMTIAPKGRELVVFFSLRVANMAFSNDLFNKSSLEYRALEQQFTQLLVPYLRSNLTGFKQLEILNFRNGSVIVNSKMKFAKSVPYNLTKAVHGVLEDFRSAAAQQLHLEIDSYSLNIEPADQADPCKFLACGEFAQCVKNERTEEAECRCKPGYDSQGSLDGLEPGLCGPGTKECEVLQGKGAPCRLPDHSENQAYKTSVKKFQNQQNNKVISKRNSELLTVEYEEFNHQDWEGN

SEQ ID NO: 12030 - protein, 147 aa, Homo sapiens
MYLETRRAIFVFWIFLQVQGTKVCQEAVWEAYRIFLDRIPDTGEYQDWVSICQQETFCLFDIGKNFSNSQEHLDLLQQRIKQRSFPDRKDEISAEKTLGEPGETIVISTEKNKGKTKPFNILQFGNNHHEHLLPIFCLLSSIIYTYY

SEQ ID NO: 12031 - protein, 1246 aa, Homo sapiens [sequence omitted]

SEQ ID NO: 12032 - protein, 960 aa, Homo sapiens
MAAPRVCQVQFLVAYLEEPGIEGLLGNDQSKGLGPASEQSENEKDDASQVSSTSNDVSSSDFEEGPSRKRPRLQAQRKFAQSQPNSPSTTPVKIVEPLLPPPATQISDLSKRKPKTEDFLTFLCLRGSPALPNSMVYFGSSQDEEEVEEEDDETEDVKTATNNASSSCQSTPRKGKTHKHVHNGHVFNGSSRSTREKEPVQKHKSKEATPAKEKHSDHRADSRREQASANHPAAAPSTGSSAKGLAATHHHPPLHRSAQDLRKQVSKVNGVTRMSSLGAGVTSAKKMREVRPSPSKTVKYTATVTKGAVTYTKAKRELVKDTKPNHHKPSSAVNHTISGKTESSNAKTRKQVLSLGGASKSTGPAVNGLKVSGRLNPKSCTKEVGGRQLREGLQLREGLRNSKRRLEEAHQAEKPQSPPKKMKGAAGPAEGPGKKAPAERGLLNGHVKKEVPERSLERNRPKRATAGKSTPGRQAHGKADSASCENRSTSQPESVHKPQDSGKAEKGGGKAGWAAMDEIPVLRPSAKEFHDPLIYIESVRAQVEKFGMCRVIPPPDWRPECKLNDEMRFVTQIQHIHKLGRRWGPNVQRLACIKKHLKSQGITMDELPLIGGCELDLACFFRLINEMGGMQQVTDLKKWNKLADMLRIPRTAQDRLAKLQEAYCQYLLSYDSLSPEEHRRLEKEVLMEKEILEKRKGPLEGHTENDHHKFHPLPRFEPKNGLIHGVAPRNGFRSKLKEVGQAQLKTGRRRLFAQEKEVVKEEEEDKGVLNDFHKCIYKGRSVSLTTFYRTARNIMSMCFSKEPAPAEIEQEYWRLVEEKDCHVAVHCGKVDTNTHGSGFPVGKSEPFSRHGWNLTVLPNNTGSILRHLGAVPGVTIPWLNIGMVFSTSCWSRDQNHLPYIDYLHTGADCICLSVEPVFPHLSVAVGSIVDLGISFLPCGDTRVMYPVESVAWRGVLGPRL

SEQ ID NO: 12033 - protein, 1074 aa, Homo sapiens
MVYFGSSQDEEEVEEEDDETEDVKTATNNASSSCQSTPRKGKTHKHVHNGHVFNGSSRSTREKEPVQKHKSKEATPAKEKHSDHRADSRREQASANHPAAAPSTGSSAKGLAATHHHPPLHRSAQDLRKQVSKVNGVTRMSSLGAGVTSAKKMREVRPSPSKTVKYTATVTKGAVTYTKAKRELVKDTKPNHHKPSSAVNHTISGKTESSNAKTRKQVLSLGGASKSTGPAVNGLKVSGRLNPKSCTKEVGGRQLREGLQLREGLRNSKRRLEEAHQAEKPQSPPKKMKGAAGPAEGPGKKAPAERGLLNGHVKKEVPERSLERNRPKRATAGKSTPGRQAHGKADSASCENRSTSQPESVHKPQDSGKAEKGGGKAGWAAMDEIPVLRPSAKEFHDPLIYIESVRAQVEKFGMCRVIPPPDWRPECKLNDEMRFVTQIQHIHKLGRRWGPNVQRLACIKKHLKSQGITMDELPLIGGCELDLACFFRLINEMGGMQQVTDLKKWNKLADMLRIPRTAQDRLAKLQEAYCQYLLSYDSLSPEEHRRLEKEVLMEKEILEKRKGPLEGHTENDHHKFHPLPRFEPKNGLIHGVAPRNGFRSKLKEVGQAQLKTGRRRLFAQEKEVVKEEEEDKGVLNDFHKCIYKGRSVSLTTFYRTARNIMSMCFSKEPAPAEIEQEYWRLVEEKDCHVAVHCGKVDTNTHGSGFPVGKSEPFSRHGWNLTVLPNNTGSILRHLGAVPGVTIPWLNIGMVFSTSCWSRDQNHLPYIDYLHTGADCIWYCIPAEEENKLEDVVHTLLQANGTPGLQMLESNVMISPEVLCKEGIKVHRTVQQSGQFVVCFPGSFVSKVCCGYSVSETVHFATTQWTSMGFETAKEMKRRHIAKPFSMEKLLYQIAQAEAKKENGPTLSTISALLDELRDTELRQRRQLFEAGLHSSARYGSHDGSSTVADGKKKPRKWLQLETSERRCQICQHLCYLSMVVQENENVVFCLECALRHVEKQKSCRGLKLMYRYDEEQIISLVNQICGKVSGKNGSIENCLSKPTPKRGPRKRATVDVPPSRLSASSSSKSASSSS

SEQ ID NO: 12034 - protein, 1037 aa, Homo sapiens
MDLNRIIQALKGTIDPKLRIAAENELNQSYKIINFAPSLLRIIVSDHVEFPVRQAAAIYLKNMVTQYWPDREPPPGEAIFPFNIHENDRQQIRDNIVEGIIRSPDLVRVQLTMCLRAIIKHDFPGHWPGVVDKIDYYLQSQSSASWLGSLLCLYQLVKTYEYKKAEEREPLIIAMQIFLPRIQQQIVQLLPDSSYYSVLLQKQILKIFYALVQYALPLQLVNNQTMTTWMEIFRTIIDRTVPPETLHIDEDDRPELVWWKCKKWALHIVARLFERYGSPGNVTKEYFEFSEFFLKTYAVGIQQVLLKILDQYRQKEYVAPRVLQQAFNYLNQGVVHSITWKQMKPHIQNISEDVIFSVMCYKDEDEELWQEDPYEYIRMKFDIFEDYASPTTAAQTLLYTAAKKRKEVLPKMMAFCYQILTDPNFDPRKKDGALHVIGSLAEILLKKSLFKDQMELFLQNHVFPLLLSNLGYLRARSCWVLHAFSSLKFHNELNLRNAVELAKKSLIEDKEMPVKVEAALALQSLISNQIQAKEYMKPHVRPIMQELLHIVRETENDDVTNVIQKMICEYSQEVASIAVDMTQHLAEIFGKVLQSDEYEEVEDKTVMAMGILHTIDTILTVVEDHKEITQQLENICLRIIDLVLQKHVIEFYEEILSLAYSLTCHSISPQMWQLLGILYEVFQQDCFEYFTDMMPLLHNYVTIDTDTLLSNAKHLEILFTMCRKVLCGDAGEDAECHAAKLLEVIILQCKGRGIDQCIPLFVQLVLERLTRGVKTSELRTMCLQVAIAALYYNPDLLLHTLERIQLPHNPGPITVQFINQWMNDTDCFLGHHDRKMCIIGLSILLELQNRPPAVDAVVGQIVPSILFLFLGLKQVCATRQLVNREDRSKAEKADMEENEEISSDEEETNVTAQAMQSNNGRGEDEEEEDDDWDEEVLEETALEGFSTPLDLDNSVDEYQFFTQALITVQSRDAAWYQLLMAPLSEDQRTALQEVYTLAEHRRTVAEAKKKIEQQGGFTFENKGVLSAFNFGTVPSNN

SEQ ID NO: 12035 - protein, 832 aa, Homo sapiens
MESLTLKGYALPLQLVNNQTMTTWMEIFRTIIDRTVPPETLHIDEDDRPELVWWKCKKWALHIVARLFERYGSPGNVTKEYFEFSEFFLKTYAVGIQQVLLKILDQYRQKEYVAPRVLQQAFNYLNQGVVHSITWKQMKPHIQNISEDVIFSVMCYKDEDEELWQEDPYEYIRMKFDIFEDYASPTTAAQTLLYTAAKKRKEVLPKMMAFCYQILTDPNFDPRKKDGALHVIGSLAEILLKKSLFKDQMELFLQNHVFPLLLSNLGYLRARSCWVLHAFSSLKFHNELNLRNAVELAKKSLIEDKEMPVKVEAALALQSLISNQIQAKEYMKPHVRPIMQELLHIVRETENDDVTNVIQKMICEYSQEVASIAVDMTQHLAEIFGKVLQSDEYEEVEDKTVMAMGILHTIDTILTVVEDHKEITQQLENICLRIIDLVLQKHVIEFYEEILSLAYSLTCHSISPQMWQLLGILYEVFQQDCFEYFTDMMPLLHNYVTIDTDTLLSNAKHLEILFTMCRKVLCGDAGEDAECHAAKLLEVIILQCKGRGIDQCIPLFVQLVLERLTRGVKTSELRTMCLQVAIAALYYNPDLLLHTLERIQLPHNPGPITVQFINQWMNDTDCFLGHHDRKMCIIGLSILLELQNRPPAVDAVVGQIVPSILFLFLGLKQVCATRQLVNREDRSKAEKADMEENEEISSDEEETNVTAQAMQSNNGRGEDEEEEDDDWDEEVLEETALEGFSTPLDLDNSVDEYQFFTQALITVQSRDAAWYQLLMAPLSEDQRTALQEVYTLAEHRRTVAEAKKKIEQQGGFTFENKGVLSAFNFGTVPSNN

SEQ ID NO: 12036 - protein, 963 aa, Homo sapiens
MERREEQPGAAGAGAAPALDFTVENVEKALHQLYYDPNIENKNLAQKWLMQAQVSPQAWHFSWQLLQPDKVPEIQYFGASALHIKISRYWSDIPTDQYESLKAQLFTQITRFASGSKIVLTRLCVALASLALSMMPDAWPCAVADMVRLFQAEDSPVDGQGRCLALLELLTVLPEEFQTSRLPQYRKGLVRTSLAVECGAVFPLLEQLLQQPSSPSCVRQKVLKCFSSWVQLEVPLQDCEALIQAAFAALQDSELFDSSVEAIVNAISQPDAQRYVNTLLKLIPLVLGLQEQLRQAVQNGDMETSHGICRIAVALGENHSRALLDQVEHWQSFLALVNMIMFCTGIPGHYPVNETTSSLTLTFWYTLQDDILSFEAEKQAVYQQVYRPVYFQLVDVLLHKAQFPSDEEYGFWSSDEKEQFRIYRVDISDTLMYVYEMLGAELLSNLYDKLGRLLTSSEEPYSWQHTEALLYGFQSIAETIDVNYSDVVPGLIGLIPRISISNVQLADTVMFTIGALSEWLADHPVMINSVLPLVLHALGNPELSVSSVSTLKKICRECKYDLPPYAANIVAVSQDVLMKQIHKTSQCMWLMQALGFLLSALQVEEILKNLHSLISPYIQQLEKLAEEIPNPSNKLAIVHILGLLSNLFTTLDISHHEDDHEGPELRKLPVPQGPNPVVVVLQQVFQLIQKVLSKWLNDAQVVEAVCAIFEKSVKTLLDDFAPMVPQLCEMLGRMYSTIPQASALDLTRQLVHIFAHEPAHFPPIEALFLLVTSVTLTLFQQGPRDHPDIVDSFMQLLAQALKRKPDLFLCERLDVKAVFQCAVLALKFPEAPTVKASCGFFTELLPRCGEVESVGKVVQEDGRMLLIAVLEAIGGQASRSLMDCFADILFALNKHCFSLLSMWIKEALQPPGFPSARLSPEQKDTFSQQILRERVNKRRVKEMVKEFTLLCRGLHGTDYTADY

SEQ ID NO: 12037 - protein, 1041 aa, Homo sapiens
MAAAAAAGAASGLPGPVAQGLKEALVDTLTGILSPVQEVRAAAEEQIKVLEVTEEFGVHLAELTVDPQGALAIRQLASVILKQYVETHWCAQSEKFRPPETTERAKIVIRELLPNGLRESISKVRSSVAYAVSAIAHWDWPEAWPQLFNLLMEMLVSGDLNAVHGAMRVLTEFTREVTDTQMPLVAPVILPEMYKIFTMAEVYGIRTRSRAVEIFTTCAHMICNMEELEKGAAKVLIFPVVQQFTEAFVQALQIPDGPTSDSGFKMEVLKAVTALVKNFPKHMVSSMQQILPIVWNTLTESAAFYVRTEVNYTEEVEDPVDSDGEVLGFENLVFSIFEFVHALLENSKFKSTVKKALPELIYYIILYMQITEEQIKVWTANPQQFVEDEDDDTFSYTVRIAAQDLLLAVATDFQNESAAALAAAATRHLQEAEQTKNSGTEHWWKIHEACMLALGSVKAIITDSVKNGRIHFDMHGFLTNVILADLNLSVSPFLLGRALWAASRFTVAMSPELIQQFLQATVSGLHETQPPSVRISAVRAIWGYCDQLKVSESTHVLQPFLPSILDGLIHLAAQFSSEVLNLVMETLCIVCTVDPEFTASMESKICPFTIAIFLKYSNDPVVASLAQDIFKELSQIEACQGPMQMRLIPTLVSIMQAPADKIPAGLCATAIDILTTVVRNTKPPLSQLLICQAFPAVAQCTLHTDDNATMQNGGECLRAYVSVTLEQVAQWHDEQGHNGLWYVMQVVSQLLDPRTSEFTAAFVGRLVSTLISKAGRELGENLDQILRAILSKMQQAETLSVMQSLIMVFAHLVHTQLEPLLEFLCSLPGPTGKPALEFVMAEWTSRQHLFYGQYEGKVSSVALCKLLQHGINADDKRLQDIRVKGEEIYSMDEGIRTRSKSAKNPERWTNIPLLVKILKLIINELSNVMEANAARQATPAEWSQDDSNDMWEDQEEEEEEEEDGLAGQLLSDILATSKYEEDYYEDDEEDDPDALKDPLYQIDLQAYLTDFLCQFAQQPCYIMFSGHLNDNERRVLQTIGI

SEQ ID NO: 12038 - protein, 286 aa, Homo sapiens
MSAPLDAALHALQEEQARLKMRLWDLQQLRKELGDSPKDKVPFSVPKIPLVFRGHTQQDPEVPKSLVSNLRIHCPLLAGSALITFDDPKVAEQVLQQKEHTINMEECRLRVQVQPLELPMVTTIQMSSQLSGRRVLVTGFPASLRLSEEELLDKLEIFFGKTRNGGGDVDVRELLPGSVMLGFARDGVAQRLCQIGQFTVPLGGQQVPLRVSPYVNGEIQKAEIRSQPVPRSVLVLNIPDILDGPELHDVLEIHFQKPTRGGGEVEALTVVPQGQQGLAVFTSESG

SEQ ID NO: 12039 - protein, 288 aa, Homo sapiens
MSAPLDAALHALQEEQARLKMRLWDLQQLRKELGDSPKDKVPFSVPKIPLVFRGHTQQDPEVPKSLVSNLRIHCPLLAGSALITFDDPKVAEQVLQQKEHTINMEECRLRVQVQPLELPMVTTIQVMMSSQLSGRRVLVTGFPASLRLSEEELLDKLEIFFGKTRNGGGDVDVRELLPGSVMLGFARDGVAQRLCQIGQFTVPLGGQQVPLRVSPYVNGEIQKAEIRSQPVPRSVLVLNIPDILDGPELHDVLEIHFQKPTRGGGEVEALTVVPQGQQGLAVFTSESG

SEQ ID NO: 12040 - protein, 432 aa, Homo sapiens
MTTSIRQFTSSSSIKGSSGLGGGSSRTSCRLSGGLGAGSCRLGSAGGLGSTLGGSSYSSCYSFGSGGGYGSSFGGVDGLLAGGEKATMQNLNDRLASYLDKVRALEEANTELEVKIRDWYQRQAPGPARDYSQYYRTIEELQNKILTATVDNANILLQIDNARLAADDFRTKFETEQALRLSVEADINGLRRVLDELTLARADLEMQIENLKEELAYLKKNHEEEMNALRGQVGGEINVEMDAAPGVDLSRILNEMRDQYEKMAEKNRKDAEDWFFSKTEELNREVATNSELVQSGKSEISELRRTMQALEIELQSQLSMKASLEGNLAETENRYCVQLSQIQGLIGSVEEQLAQLRCEMEQQNQEYKILLDVKTRLEQEIATYRRLLEGEDAHLTQYKKEPVTTRQVRTIVEEVQDGKVISSREQVHQTTR

SEQ ID NO: 12041 - protein, 494 aa, Homo sapiens
MDLSNNTMSLSVRTPGLSRRLSSQSVIGRPRGMSASSVGSGYGGSAFGFGASCGGGFSAASMFGSSSGFGGGSGSSMAGGLGAGYGRALGGGSFGGLGMGFGGSPGGGSLGILSGNDGGLLSGSEKETMQNLNDRLASYLDKVRALEEANTELENKIREWYETRGTGTADASQSDYSKYYPLIEDLRNKIISASIGNAQLLLQIDNARLAAEDFRMKYENELALRQGVEADINGLRRVLDELTLTRTDLEMQIESLNEELAYMKKNHEDELQSFRVGGPGEVSVEMDAAPGVDLTRLLNDMRAQYETIAEQNRKDAEAWFIEKSGELRKEISTNTEQLQSSKSEVTDLRRAFQNLEIELQSQLAMKKSLEDSLAEAEGDYCAQLSQVQQLISNLEAQLLQVRADAERQNVDHQRLLNVKARLELEIETYRRLLDGEAQGDGLEESLFVTDSKSQAQSTDSSKDPTKTRKIKTVVQEMVNGEVVSSQVQEIEELM

SEQ ID NO: 12042 - protein, 540 aa, Homo sapiens
MSRQFTYKSGAAAKGGFSGCSAVLSGGSSSSYRAGGKGLSGGFSSRSLYSLGGARSISFNVASGSGWAGGYGFGRGRASGFAGSMFGSVALGSVCPSLCPPGGIHQVTINKSLLAPLNVELDPEIQKVRAQEREQIKVLNNKFASFIDKVRFLEQQNQVLETKWELLQQLDLNNCKNNLEPILEGYISNLRKQLETLSGDRVRLDSELRSVREVVEDYKKRYEEEINKRTTAENEFVVLKKDVDAAYTSKVELQAKVDALDGEIKFFKCLYEGETAQIQSHISDTSIILSMDNNRNLDLDSIIAEVRAQYEEIARKSKAEAEALYQTKFQELQLAAGRHGDDLKHTKNEISELTRLIQRLRSEIESVKKQCANLETAIADAEQRGDCALKDARAKLDELEGALQQAKEELARMLREYQELLSVKLSLDIEIATYRKLLEGEECRMSGEYTNSVSISVINSSMAGMAGTGAGFGFSNAGTYGYWPSSVSGGYSMLPGGCVTGSGNCSPRGEARTRLGSASEFRDSQGKTLALSSPTKKTMR

SEQ ID NO: 12043 - protein, 381 aa, Homo sapiens
MSRQFTYKSGAAAKGGFSGCSAVLSGGSSSSYRAGGKGLSGGFSSRSLYSLGGARSISFNVASGSGWAGGYGFGRGRASGFAGSMFGSVALGSVCPSLCPPGGIHQVTINKSLLAPLNVELDPEIQKVRAQEREQIKVLNNKFASFIDKVRFLEQQNQVLETKWELLQQLDLNNCKNNLEPILEGYISNLRKQLETLSGDRVRLDSELRSVREVVEDYKKRYEEEINKRTTAENEFVVLKKDVDAAYTSKVELQAKVDALDGEIKFFKCLYEGETAQIQSHISDTSIILSMDNNRNLDLDSIIAEVRAQYEEIARKSKAEAEALYQTKFQELQLAAGRHGDDLKHTKNEISELTRLIQRLRSEIESVKKQVKGTGAFLTHS

SEQ ID NO: 12044 - protein, 584 aa, Homo sapiens
MSVRYSSSKHYSSSRSGGGGGGGGCGGGGGVSSLRISSSKGSLGGGFSSGGFSGGSFSRGSSGGGCFGGSSGGYGGLGGFGGGSFRGSYGSSSFGGSYGGIFGGGSFGGGSFGGGSFGGGGFGGGGFGGGFGGGFGGDGGLLSGNEKVTMQNLNDRLASYLDKVRALEESNYELEGKIKEWYEKHGNSHQGEPRDYSKYYKTIDDLKNQILNLTTDNANILLQIDNARLAADDFRLKYENEVALRQSVEADINGLRRVLDELTLTKADLEMQIESLTEELAYLKKNHEEEMKDLRNVSTGDVNVEMNAAPGVDLTQLLNNMRSQYEQLAEQNRKDAEAWFNEKSKELTTEIDNNIEQISSYKSEITELRRNVQALEIELQSQLALKQSLEASLAETEGRYCVQLSQIQAQISALEEQLQQIRAETECQNTEYQQLLDIKIRLENEIQTYRSLLEGEGSSGGGGRGGGSFGGGYGGGSSGGGSSGGGHGGGHGGSSGGGYGGGSSGGGSSGGGYGGGSSSGGHGGSSSGGYGGGSSGGGGGGYGGGSSGGGSSSGGGYGGGSSSGGHKSSSSGSVGESSSKGPRY

SEQ ID NO: 12045 - protein, 529 aa, Homo sapiens
MSRQLNIKSSGDKGNFSVHSAVVPRKAVGSLASYCAAGRGAGAGFGSRSLYSLGGNRRISFNVAGGGVRAGGYGFRPGSGYGGGRASGFAGSMFGSVALGPACLSVCPPGGIHQVTVNKSLLAPLNVELDPEIQKVRAQEREQIKVLNDKFASFIDKVRFLEQQNQVLETKWELLQQLDLNNCKKNLEPILEGYISNLRKQLETLSGDRVRLDSELRSMRDLVEDYKKRYEVEINRRTTAENEFVVLKKDADAAYAVKVELQAKVDSLDKEIKFLKCLYDAEIAQIQTHASETSVILSMDNNRDLDLDSIIAEVRMHYEEIALKSKAEAEALYQTKIQELQLAASRHGDDLKHTRSEMVELNRLIQRIRCEIGNVKKQRASLETAIADAEQRGDNALKDAQAKLDELEGALHQAKEELARMLREYQELMSLKLALDMEIATYRKLLEGEECRMSGENPSSVSISVISSSSYSYHHPSSAGVDLGASAVAGSSGSTQSGQTKTTEARGGDLKDTQGKSTPASIPARKATR

SEQ ID NO: 12046 - protein, 995 aa, Homo sapiens
MSAEAADREAATSSRPCTPPQTCWFEFLLEESLLEKHLRKPCPDPAPVQLIVQFLEQASKPSVNEQNQVQPPPDNKRNRILKLLALKVAAHLKWDLDILEKSLSVPVLNMLLNELLCISKVPPGTKHVDMDLATLPPTTAMAVLLYNRWAIRTIVQSSFPVKQAKPGPPQLSVMNQMQQEKELTENILKVLKEQAADSILVLEAALKLNKDLYVHTMRTLDLLAMEPGMVNGETESSTAGLKVKTEEMQCQVCYDLGAAYFQQGSTNSAVYENAREKFFRTKELIAEIGSLSLHCTIDEKRLAGYCQACDVLVPSSDSTSQQLTPYSQVHICLRSGNYQEVIQIFIEDNLTLSLPVQFRQSVLRELFKKAQQGNEALDEICFKVCACNTVRDILEGRTISVQFNQLFLRPNKEKIDFLLEVCSRSVNLEKASESLKGNMAAFLKNVCLGLEDLQYVFMISSHELFITLLKDEERKLLVDQMRKRSPRVNLCIKPVTSFYDIPASASVNIGQLEHQLILSVDPWRIRQILIELHGMTSERQFWTVSNKWEVPSVYSGVILGIKDNLTRDLVYILMAKGLHCSTVKDFSHAKQLFAACLELVTEFSPKLRQVMLNEMLLLDIHTHEAGTGQAGERPPSDLISRVRGYLEMRLPDIPLRQVIAEECVAFMLNWRENEYLTLQVPAFLLQSNPYVKLGQLLAATCKELPGPKESRRTAKDLWEVVVQICSVSSQHKRGNDGRVSLIKQRESTLGIMYRSELLSFIKKLREPLVLTIILSLFVKLHNVREDIVNDITAEHISIWPSSIPNLQSVDFEAVAITVKELVRYTLSINPNNHSWLIIQADIYFATNQYSAALHYYLQAGAVCSDFFNKAVPPDVYTDQVIKRMIKCCSLLNCHTQVAILCQFLREIDYKTAFKSLQEQNSHDAMDSYYDYIWDVTILEYLTYLHHKRGETDKRQIAIKAIGQTELNASNPEEVLQLAAQRRKKKFLQAMAKLYF

SEQ ID NO: 12047 - protein, 978 aa, Homo sapiens
MSAEAADREAATSSRPCTPPQTCWFEFLLEESLLEKHLRKPCPDPAPVQLIVQFLEQASKPSVNEQNQVQPPPDNKRNRILKLLALKVAAHLKWDLDILEKSLSVPVLNMLLNELLCISKVPPGTKHVDMDLATLPPTTAMAVLLYNRWAIRTIVQSSFPVKQAKPGPPQLSVMNQMQQEKELTENILKVLKEQAADSILVLEAALKLNKDLYVHTMRTLDLLAMEPGMVNGETESSTAGLKVKTEEMQCQVCYDLGAAYFQQGSTNSAVYENAREKFFRTKELIAEIGSLSLHCTIDEKRLAGYCQACDVLVPSSDSTSQQLTPYSQVHICLRSGNYQEVIQIFIEDNLTLSLPVQFRQSVLRELFKKAQQGNEALDEICFKVCACNTVRDILEGRTISVQFNQLFLRPNKEKIDFLLEVCSRSVNLEKASESLKGNMAAFLKNVCLGLEDLQYVFMISSHELFITLLKDEERKLLVDQMRKRSPRVNLCIKPVTSFYDIPASASVNIGQLEHQLILSVDPWRIRQILIELHGMTSERQFWTVSNKWEVPSVYSGVILGIKDNLTRDLVYILMAKGLHCSTVKDFSHAKQLFAACLELVTEFSPKLRQVMLNEMLLLDIHTHEAGTGQAGERPPSDLISRVRGYLEMRLPDIPLRQVIAEECVAFMLNWRENEYLTLQVPAFLLQSNPYVKLGQLLAATCKELPGPKESRRTAKDLWEVVVQICSVSSQHKRGNDGRVSLIKQRESTLGIMYRSELLSFIKKLREPLVLTIILSLFVKLHNVREDIVNDITAEHISIWPSSIPNLQSVDFEAVAITVKELVRYTLSINPNNHSWLIIQADIYFATNQYSAALHYYLQAGAVCSDFFNKAVPPDVYTDQVAILCQFLREIDYKTAFKSLQEQNSHDAMDSYYDYIWDVTILEYLTYLHHKRGETDKRQIAIKAIGQTELNASNPEEVLQLAAQRRKKKFLQAMAKLYF

SEQ ID NO: 12048 - protein, 289 aa, Homo sapiens
MVVVTGREPDSRRQDGAMSSSDAEDDFLEPATPTATQAGHALPLLPQEFPEVVPLNIGGAHFTTRLSTLRCYEDTMLAAMFSGRHYIPTDSEGRYFIDRDGTHFGDVLNFLRSGDLPPRERVRAVYKEAQYYAIGPLLEQLENMQPLKGEKVRQAFLGLMPYYKDHLERIVEIARLRAVQRKARFAKLKVCVFKEEMPITPYECPLLNSLRFERSESDGQLFEHHCEVDVSFGPWEAVADVYDLLHCLVTDLSAQGLTVDHQCIGVCDKHLVNHYYCKRPIYEFKITWW

SEQ ID NO: 12049 - protein, 288 aa, Homo sapiens
MVVVTGREPDSRRQDGAMSSSDAEDDFLEPATPTATQAGHALPLLPQEFPEVVPLNIGGAHFTTRLSTLRCYEDTMLAAMFSGRHYIPTDSEGRYFIDRDGTHFGDVLNFLRSGDLPPRERVRAVYKEAQYYAIGPLLEQLENMQPLKGEKVRQAFLGLMPYYKDHLERIVEIARLRAVQRKARFAKLKVCVFKEEMPITPYECPLLNSLRFERSESDGQLFEHHCEVDVSFGPWEAVADVYDLLHCLVTDLSAQGLTVDHQCIGVCDKHLVNHYYCKRPIYEFKITW

SEQ ID NO: 12050 - protein, 136 aa, Homo sapiens
MVNSCCGSVCSDQGCGLENCCRPSCCQTTCCRTTCCRPSCCVSSCCRPQCCQSVCCQPTCCSPSCCQTTCCRTTCCRPSCCVSSCFRPQCCQSVYCQPTCCRPSCGQTTCCRTTCYRPSCCVSTCCRPTCSSGSCC

SEQ ID NO: 12051 - protein, 210 aa, Homo sapiens
MVSSCCGSVCSDQGCSQDLCQETCCRPSCCQTTCCRTTCYRPSCCVSSCCRPQCCQSVCCQPTCCRPTCCETTCCHPRCCISSCCRPSCCMSSCCKPQCCQSVCCQPTCCHPSCCISSCCRPSCCVSRCCRPQCCQSVCCQPTCCRPSCCISSCCRPSCCESSCCRPSCCRPCCCLRPVCGRVSCHTTCYRPTCVISTCPRPLCCASSCC

SEQ ID NO: 12052 - protein, 96 aa, Homo sapiens
MCHTSCSSGCQPACCAPSPCQASCYIPVGCQSSVCVPVSFKPAVCVPVRCQSSVCVPVSCRPVVYAAPSCQSSGCCQPSCTSVLCRPISCSTPSCC

SEQ ID NO: 12053 - protein, 98 aa, Homo sapiens
MYCCALRSCSVPTGPATTFCSFDKSCRCGVCLPSTCPHEISLLQPICCDTCPPPCCKPDTYVPTCWLLNNCHPTPGLSGINLTTYVQPGCESPCEPRC

SEQ ID NO: 12054 - protein, 166 aa, Homo sapiens
MVNSCCGSVCSDQGCGLENCCRPSYCQTTCCRTTCCRPSCCVSSCCRPQCCQTTCCRTTCCHPSCCVSSCCRPQCCQSVCCQPTCCRPQCCQTTCCRTTCCRPSCCRPQCCQSVCCQPTCCCPSYCVSSCCRPQCCQTTCCRTTCCRPSCCVSRCYRPHCGQSLCC

SEQ ID NO: 12055 - protein, 98 aa, Homo sapiens
MDCCASRSCSVPTGPATTICSSDKSCRCGVCLPSTCPHTVWLLEPICCDNCPPPCHIPQPCVPTCFLLNSCQPTPGLETLNLTTFTQPCCEPCLPRGC

SEQ ID NO: 12056 - protein, 187 aa, Homo sapiens
MGCCGCSGGCGSGCGGCGSGCGGCGSSCCVPICCCKPVCCCVPACSCSSCGSCGGSKGGRGSCGGSKGDCGSCGGSKGGCGSCGCSQCSCYKPCCCSSGCGSSCCQSSCCKPCCSQSSCCKPCSCSSGCGSSCCQSSCCKPCCSQSSCCKPCCCSSGCGSSCCQSSCCKPCCSQSSCCVPICCQCKI

SEQ ID NO: 12057 - protein, 777 aa, Homo sapiens
MFPRGAEAQDWHLDMQLTGKVVLSAAALLLVTVAYRLYKSRPAPAQRWGGNGQAEAKEEAEGSGQPAVQEASPGVLLRGPRRRRSSKRAEAPQGCSCENPRGPYVLVTGATSTDRKPQRKGSGEERGGQGSDSEQVPPCCPSQETRTAVGSNPDPPHFPRLGSEPKSSPAGLIAAADGSCAGGEPSPWQDSKPREHPGLGQLEPPHCHYVAPLQGSSDMNQSWVFTRVIGVSREEAGALEAASDVDLTLHQQEGAPNSSYTFSSIARVRMEEHFIQKAEGVEPRLKGKVYDYYVESTSQAIFQGRLAPRTAALTEVPSPRPPPGSLGTGAASGGQAGDTKGAAERAASPQTGPWPSTRGFSRKESLLQIAENPELQLQPDGFRLPAPPCPDPGALPGLGRSSREPHVQPVAGTNFFHIPLTPASAPQVRLDLGNCYEVLTLAKRQNLEALKEAAYKVMSENYLQVLRSPDIYGCLSGAERELILQRRLRGRQYLVVADVCPKEDSGGLCCYDDEQDVWRPLARMPPEAVSRGCAICSLFNYLFVVSGCQGPGHQPSSRVFCYNPLTGIWSEVCPLNQARPHCRLVALDGHLYAIGGECLNSVERYDPRLDRWDFAPPLPSDTFALAHTATVRAKEIFVTGGSLRFLLFRFSAQEQRWWAGPTGGSKDRTAEMVAVNGFLYRFDLNRSLGIAVYRCSASTRLWYECATYRTPYPDAFQCAVVDNLIYCVGRRSTLCFLADSVSPRFVPKELRSFPAPQGTLLPTVLTLPTPDLPQTRV

SEQ ID NO: 12058 - protein, 655 aa, Homo sapiens
MPLKWKTSSPAIWKFPVPVLKTSRSTPLSPAYISLVEEEDQHMKLSLGGSEMGLSSHLQSSKAGPTRIFTSNTHSSVVLQGFDQLRLEGLLCDVTLMPGDTDDAFPVHRVMMASASDYFKAMFTGGMKEQDLMCIKLHGVSKVGLRKIIDFIYTAKLSLNMDNLQDTLEAASFLQILPVLDFCKVFLISGVTLDNCVEVGRIANTYNLTEVDKYVNSFVLKNFPALLSTGEFLKLPFERLAFVLSSNSLKHCTELELFKATCRWLRLEEPRMDFAAKLMKNIRFPLMTPQELINYVQTVDFMRTDNTCVNLLLEASNYQMMPYMQPVMQSDRTAIRSDTTHLVTLGGVLRQQLVVSKELRMYDEKAHEWKSLAPMDAPRYQHGIAVIGNFLYVVGGQSNYDTKGKTAVDTVFRFDPRYNKWMQVASLNEKRTFFHLSALKGYLYAVGGRNAAGELPTVECYNPRTNEWTYVAKMSEPHYGHAGTVYGGVMYISGGITHDTFQKELMCFDPDTDKWIQKAPMTTVRGLHCMCTVGERLYVIGGNHFRGTSDYDDVLSCEYYSPILDQWTPIAAMLRGQSDVGVAVFENKIYVVGGYSWNNRCMVEIVQKYDPDKDEWHKVFDLPESLGGIRACTLTVFPPEETTPSPSRESPLSAP

SEQ ID NO: 12059 - protein, 613 aa, Homo sapiens
MKLSLGGSEMGLSSHLQSSKAGPTRIFTSNTHSSVVLQGFDQLRLEGLLCDVTLMPGDTDDAFPVHRVMMASASDYFKAMFTGGMKEQDLMCIKLHGVSKVGLRKIIDFIYTAKLSLNMDNLQDTLEAASFLQILPVLDFCKVFLISGVTLDNCVEVGRIANTYNLTEVDKYVNSFVLKNFPALLSTGEFLKLPFERLAFVLSSNSLKHCTELELFKATCRWLRLEEPRMDFAAKLMKNIRFPLMTPQELINYVQTVDFMRTDNTCVNLLLEASNYQMMPYMQPVMQSDRTAIRSDTTHLVTLGGVLRQQLVVSKELRMYDEKAHEWKSLAPMDAPRYQHGIAVIGNFLYVVGGQSNYDTKGKTAVDTVFRFDPRYNKWMQVASLNEKRTFFHLSALKGYLYAVGGRNAAGELPTVECYNPRTNEWTYVAKMSEPHYGHAGTVYGGVMYISGGITHDTFQKELMCFDPDTDKWIQKAPMTTVRGLHCMCTVGERLYVIGGNHFRGTSDYDDVLSCEYYSPILDQWTPIAAMLRGQSDVGVAVFENKIYVVGGYSWNNRCMVEIVQKYDPDKDEWHKVFDLPESLGGIRACTLTVFPPEETTPSPSRESPLSAP

SEQ ID NO: 12060 - protein, 639 aa, Homo sapiens
MDHLHRGELVAAILRNRSLVEEEDQHMKLSLGGSEMGLSSHLQSSKAGPTRIFTSNTHSSVVLQGFDQLRLEGLLCDVTLMPGDTDDAFPVHRVMMASASDYFKAMFTGGMKEQDLMCIKLHGVSKVGLRKIIDFIYTAKLSLNMDNLQDTLEAASFLQILPVLDFCKVFLISGVTLDNCVEVGRIANTYNLTEVDKYVNSFVLKNFPALLSTGEFLKLPFERLAFVLSSNSLKHCTELELFKATCRWLRLEEPRMDFAAKLMKNIRFPLMTPQELINYVQTVDFMRTDNTCVNLLLEASNYQMMPYMQPVMQSDRTAIRSDTTHLVTLGGVLRQQLVVSKELRMYDEKAHEWKSLAPMDAPRYQHGIAVIGNFLYVVGGQSNYDTKGKTAVDTVFRFDPRYNKWMQVASLNEKRTFFHLSALKGYLYAVGGRNAAGELPTVECYNPRTNEWTYVAKMSEPHYGHAGTVYGGVMYISGGITHDTFQKELMCFDPDTDKWIQKAPMTTVRGLHCMCTVGERLYVIGGNHFRGTSDYDDVLSCEYYSPILDQWTPIAAMLRGQSDVGVAVFENKIYVVGGYSWNNRCMVEIVQKYDPDKDEWHKVFDLPESLGGIRACTLTVFPPEETTPSPSRESPLSAP

SEQ ID NO: 12061 - protein, 649 aa, Homo sapiens
MLRFISHLYCCSSKEDCSEDDKCILSRSLVEEEDQHMKLSLGGSEMGLSSHLQSSKAGPTRIFTSNTHSSVVLQGFDQLRLEGLLCDVTLMPGDTDDAFPVHRVMMASASDYFKAMFTGGMKEQDLMCIKLHGVSKVGLRKIIDFIYTAKLSLNMDNLQDTLEAASFLQILPVLDFCKVFLISGVTLDNCVEVGRIANTYNLTEVDKYVNSFVLKNFPALLSTGEFLKLPFERLAFVLSSNSLKHCTELELFKATCRWLRLEEPRMDFAAKLMKNIRFPLMTPQELINYVQTVDFMRTDNTCVNLLLEASNYQMMPYMQPVMQSDRTAIRSDTTHLVTLGGVLRQQLVVSKELRMYDEKAHEWKSLAPMDAPRYQHGIAVIGNFLYVVGGQSNYDTKGKTAVDTVFRFDPRYNKWMQVASLNEKRTFFHLSALKGYLYAVGGRNAAGELPTVECYNPRTNEWTYVAKMSEPHYGHAGTVYGGVMYISGGITHDTFQKELMCFDPDTDKWIQKAPMTTVRGLHCMCTVGERLYVIGGNHFRGTSDYDDVLSCEYYSPILDQWTPIAAMLRGQSDVGVAVFENKIYVVGGYSWNNRCMVEIVQKYDPDKDEWHKVFDLPESLGGIRACTLTVFPPEETTPSPSRESPLSAP

SEQ ID NO: 12062 - protein, 658 aa, Homo sapiens
MMRVQTLREKWAYWRRRQLSLKQADFKDIFKKSTSGSLVEEEDQHMKLSLGGSEMGLSSHLQSSKAGPTRIFTSNTHSSVVLQGFDQLRLEGLLCDVTLMPGDTDDAFPVHRVMMASASDYFKAMFTGGMKEQDLMCIKLHGVSKVGLRKIIDFIYTAKLSLNMDNLQDTLEAASFLQILPVLDFCKVFLISGVTLDNCVEVGRIANTYNLTEVDKYVNSFVLKNFPALLSTGEFLKLPFERLAFVLSSNSLKHCTELELFKATCRWLRLEEPRMDFAAKLMKNIRFPLMTPQELINYVQTVDFMRTDNTCVNLLLEASNYQMMPYMQPVMQSDRTAIRSDTTHLVTLGGVLRQQLVVSKELRMYDEKAHEWKSLAPMDAPRYQHGIAVIGNFLYVVGGQSNYDTKGKTAVDTVFRFDPRYNKWMQVASLNEKRTFFHLSALKGYLYAVGGRNAAGELPTVECYNPRTNEWTYVAKMSEPHYGHAGTVYGGVMYISGGITHDTFQKELMCFDPDTDKWIQKAPMTTVRGLHCMCTVGERLYVIGGNHFRGTSDYDDVLSCEYYSPILDQWTPIAAMLRGQSDVGVAVFENKIYVVGGYSWNNRCMVEIVQKYDPDKDEWHKVFDLPESLGGIRACTLTVFPPEETTPSPSRESPLSAP

SEQ ID NO: 12063 - protein, 196 aa, Homo sapiens [sequence omitted]

SEQ ID NO: 12064 - protein, 147 aa, Homo sapiens
MKPLVVFVLGGPGAGKGTQCARIVEEMDQTMAANAQKNKFLIDGFPRNQDNLQGWNKTMDGKADVSFVLFFDCNNEICIERCLERGKSSGRSDDNRESLEKRIQTYLQSTKPIIDLYEEMGKVKKIDASKSVDEVFDEVVQIFDKEG

SEQ ID NO: 12065 - protein, 228 aa, Homo sapiens
MLSRCRSGLLHVLGLSFLLQTRRPILLCSPRLMKPLVVFVLGGPGAGKGTQCARIVEKYGYTHLSAGELLRDERKNPDSQYGELIEKYIKEGKIVPVEITISLLKREMDQTMAANAQKNKFLIDGFPRNQDNLQGWNKTMDGKADVSFVLFFDCNNEICIERCLERGKSSGRSDDNRESLEKRIQTYLQSTKPIIDLYEEMGKVKKIDASKSVDEVFDEVVQIFDKEG

SEQ ID NO: 12066 - protein, 513 aa, Homo sapiens
MRQPPGESDMAVSDALLPSFSTFASGPAGREKTLRQAGAPNNRWREELSHMKRLPPVLPGRPYDLAAATVATDLESGGAGAACGGSNLAPLPRRETEEFNDLLDLDFILSNSLTHPPESVAATVSSSASASSSSSPSSSGPASAPSTCSFTYPIRAGNDPGVAPGGTGGGLLYGRESAPPPTAPFNLADINDVSPSGGFVAELLRPELDPVYIPPQQPQPPGGGLMGKFVLKASLSAPGSEYGSPSVISVSKGSPDGSHPVVVAPYNGGPPRTCPKIKQEAVSSCTHLGAGPPLSNGHRPAAHDFPLGRQLPSRTTPTLGLEEVLSSRDCHPALPLPPGFHPHPGPNYPSFLPDQMQPQVPPLHYQGQSRGFVARAGEPCVCWPHFGTHGMMLTPPSSPLELMPPGSCMPEEPKPKRGRRSWPRKRTATHTCDYAGCGKTYTKSSHLKAHLRTHTGEKPYHCDWDGCGWKFARSDELTRHYRKHTGHRPFQCQKCDRAFSRSDHLALHMKRHF

SEQ ID NO: 12067 - protein, 479 aa, Homo sapiens
MRQPPGESDMAVSDALLPSFSTFASGPAGREKTLRQAGAPNNRWREELSHMKRLPPVLPGRPYDLAAATVATDLESGGAGAACGGSNLAPLPRRETEEFNDLLDLDFILSNSLTHPPESVAATVSSSASASSSSSPSSSGPASAPSTCSFTYPIRAGNDPGVAPGGTGGGLLYGRESAPPPTAPFNLADINDVSPSGGFVAELLRPELDPVYIPPQQPQPPGGGLMGKFVLKASLSAPGSEYGSPSVISVSKGSPDGSHPVVVAPYNGGPPRTCPKIKQEAVSSCTHLGAGPPLSNGHRPAAHDFPLGRQLPSRTTPTLGLEEVLSSRDCHPALPLPPGFHPHPGPNYPSFLPDQMQPQVPPLHYQELMPPGSCMPEEPKPKRGRRSWPRKRTATHTCDYAGCGKTYTKSSHLKAHLRTHTGEKPYHCDWDGCGWKFARSDELTRHYRKHTGHRPFQCQKCDRAFSRSDHLALHMKRHF

SEQ ID NO: 12068 - protein, 429 aa, Homo sapiens
MKRLPPVLPGRPYDLAAATVATDLESGGAGAACGGSNLAPLPRRETEEFNDLLDLDFILSNSLTHPPESVAATVSSSASASSSSSPSSSGPASAPSTCSFTYPIRAGNDPGVAPGGTGGGLLYGRESAPPPTAPFNLADINDVSPSGGFVAELLRPELDPVYIPPQQPQPPGGGLMGKFVLKASLSAPGSEYGSPSVISVSKGSPDGSHPVVVAPYNGGPPRTCPKIKQEAVSSCTHLGAGPPLSNGHRPAAHDFPLGRQLPSRTTPTLGLEEVLSSRDCHPALPLPPGFHPHPGPNYPSFLPDQMQPQVPPLHYQELMPPGSCMPEEPKPKRGRRSWPRKRTATHTCDYAGCGKTYTKSSHLKAHLRTHTGEKPYHCDWDGCGWKFARSDELTRHYRKHTGHRPFQCQKCDRAFSRSDHLALHMKRHF

SEQ ID NO: 12069 - protein, 118 aa, Homo sapiens
MRQPPGESDMAVSDALLPSFSTFASGPAGREKTLRQAGAPNNSSCHPVPACQRSPSQRGEDDRGPGKGPPPTLVITRAAAKPTQRVPISRHTCEPTQVRNLTTVTGTAVDGNSPAQMN

SEQ ID NO: 12070 - protein, 63 aa, Homo sapiens
MRQPPGESDMAVSDALLPSFSTFASGPAGREKTLRQAGAPNNVRNLTTVTGTAVDGNSPAQMN

SEQ ID NO: 12071 - protein, 124 aa, Homo sapiens
MDIPISSRDFRGLQLACVALGLVAGSIIIGISVSKAAAAMGGVFIGAAVLGLLILAYPFLKARFNLDHILPTIGSLRIHPHPGADHGEGRSSTNGNKEGARSSLSTVSRTLEKLKPGTRGAEEC

SEQ ID NO: 12072 - protein, 101 aa, Homo sapiens
MDIPISSRDFRGLQLACVALGLVAGSIIIGISVSKAAAAMGGVFIGAAVLGSLRIHPHPGADHGEGRSSTNGNKEGARSSLSTVSRTLEKLKPGTRGAEEC

SEQ ID NO: 12073 - protein, 2342 aa, Homo sapiens
MDGVSSEANEENDNIERPVRRRHSSILKPPRSPLQDLRGGNERVQESNALRNKKNSRRVSFADTIKVFQTESHMKIVRKSEMEGCSAMVPSQLQLLPPGFKRFSCLSLPETETGENLLLIQNKKLEDNYCEITGMNTLLSAPIHTQMQQKEFSIIEHTRERKHANDQTVIFSDENQMDLTSSHTVMITKGLLDNPISEKSTKIDTTSFLANLKLHTEDSRMKKEVNFSVDQNTSSENKIDFNDFIKRLKTGKCSAFPDVPDKENFEIPIYSKEPNSASSTHQMHVSLKEDENNSNITRLFREKDDGMNFTQCHTANIQTLIPTSSETNSRESKGNDITIYGNDFMDLTFNHTLQILPATGNFSEIENQTQNAMDVTTGYGTKASGNKTVFKSKQNTAFQDLSINSADKIHITRSHIMGAETHIVSQTCNQDARILAMTPESIYSNPSIQGCKTVFYSSCNDAMEMTKCLSNMREEKNLLKHDSNYAKMYCNPDAMSSLTEKTIYSGEENMDITKSHTVAIDNQIFKQDQSNVQIAAAPTPEKEMMLQNLMTTSEDGKMNVNCNSVPHVSKERIQQSLSNPLSISLTDRKTELLSGENMDLTESHTSNLGSQVPLAAYNLAPESTSESHSQSKSSSDECEEITKSRNEPFQRSDIIAKNSLTDTWNKDKDWVLKILPYLDKDSPQSADCNQEIATSHNIVYCGGVLDKQITNRNTVSWEQSLFSTTKPLFSSGQFSMKNHDTAISSHTVKSVLGQNSKLAEPLRKSLSNPTPDYCHDKMIICSEEEQNMDLTKSHTVVIGFGPSELQELGKTNLEHTTGQLTTMNRQIAVKVEKCGKSPIEKSGVLKSNCIMDVLEDESVQKPKFPKEKQNVKIWGRKSVGGPKIDKTIVFSEDDKNDMDITKSYTIEINHRPLLEKRDCHLVPLAGTSETILYTCRQDDMEITRSHTTALECKTVSPDEITTRPMDKTVVFVDNHVELEMTESHTVFIDYQEKERTDRPNFELSQRKSLGTPTVICTPTEESVFFPGNGESDRLVANDSQLTPLEEWSNNRGPVEVADNMELSKSATCKNIKDVQSPGFLNEPLSSKSQRRKSLKLKNDKTIVFSENHKNDMDITQSCMVEIDNESALEDKEDFHLAGASKTILYSCGQDDMEITRSHTTALECKTLLPNEIAIRPMDKTVLFTDNYSDLEVTDSHTVFIDCQATEKILEENPKFGIGKGKNLGVSFPKDNSCVQEIAEKQALAVGNKIVLHTEQKQQLFAATNRTTNEIIKFHSAAMDEKVIGKVVDQACTLEKAQVESCQLNNRDRRNVDFTSSHATAVCGSSDNYSCLPNVISCTDNLEGSAMLLCDKDEEKANYCPVQNDLAYANDFASEYYLESEGQPLSAPCPLLEKEEVIQTSTKGQLDCVITLHKDQDLIKDPRNLLANQTLVYSQDLGEMTKLNSKRVSFKLPKDQMKVYVDDIYVIPQPHFSTDQPPLPKKGQSSINKEEVILSKAGNKSLNIIENSSAPICENKPKILNSEEWFAAACKKELKENIQTTNYNTALDFHSNSDVTKQVIQTHVNAGEAPDPVITSNVPCFHSIKPNLNNLNGKTGEFLAFQTVHLPPLPEQLLELGNKAHNDMHIVQATEIHNINIISSNAKDSRDEENKKSHNGAETTSLPPKTVFKDKVRRCSLGIFLPRLPNKRNCSVTGIDDLEQIPADTTDINHLETQPVSSKDSGIGSVAGKLNLSPSQYINEENLPVYPDEINSSDSINIETEEKALIETYQKEISPYENKMGKTCNSQKRTWVQEEEDIHKEKKIRKNEIKFSDTTQDREIFDHHTEEDIDKSANSVLIKNLSRTPSSCSSSLDSIKADGTSLDFSTYRSSQMESQFLRDTICEESLREKLQDGRITIREFFILLQVHILIQKPRQSNLPGNFTVNTPPTPEDLMLSQYVYRPKIQIYREDCEARRQKIEELKLSASNQDKLLVDINKNLWEKMRHCSDKELKAFGIYLNKIKSCFTKMTKVFTHQGKVALYGKLVQSAQNEREKLQIKIDEMDKILKKIDNCLTEMETETKNLEDEEKNNPVEEWDSEMRAAEKELEQLKTEEEELQRNLLELEVQKEQTLAQIDFMQKQRNRTEELLDQLSLSEWDVVEWSDDQAVFTFVYDTIQLTITFEESVVGFPFLDKRYRKIVDVNFQSLLDEDQAPPSSLLVHKLIFQYVEEKESWKKTCTTQHQLPKMLEEFSLVVHHCRLLGEEIEYLKRWGPNYNLMNIDINNNELRLLFSSSAAFAKFEITLFLSAYYPSVPLPSTIQNHVGNTSQDDIATILSKVPLENNYLKNVVKQIYQDLFQDCHFYH

SEQ ID NO: 12074 - protein, 2316 aa, Homo sapiens
MDGVSSEANEENDNIERPVRRRHSSILKPPRSPLQDLRGGNERVQESNALRNKKNSRRVSFADTIKVFQTESHMKIVRKSEMEETETGENLLLIQNKKLEDNYCEITGMNTLLSAPIHTQMQQKEFSIIEHTRERKHANDQTVIFSDENQMDLTSSHTVMITKGLLDNPISEKSTKIDTTSFLANLKLHTEDSRMKKEVNFSVDQNTSSENKIDFNDFIKRLKTGKCSAFPDVPDKENFEIPIYSKEPNSASSTHQMHVSLKEDENNSNITRLFREKDDGMNFTQCHTANIQTLIPTSSETNSRESKGNDITIYGNDFMDLTFNHTLQILPATGNFSEIENQTQNAMDVTTGYGTKASGNKTVFKSKQNTAFQDLSINSADKIHITRSHIMGAETHIVSQTCNQDARILAMTPESIYSNPSIQGCKTVFYSSCNDAMEMTKCLSNMREEKNLLKHDSNYAKMYCNPDAMSSLTEKTIYSGEENMDITKSHTVAIDNQIFKQDQSNVQIAAAPTPEKEMMLQNLMTTSEDGKMNVNCNSVPHVSKERIQQSLSNPLSISLTDRKTELLSGENMDLTESHTSNLGSQVPLAAYNLAPESTSESHSQSKSSSDECEEITKSRNEPFQRSDIIAKNSLTDTWNKDKDWVLKILPYLDKDSPQSADCNQEIATSHNIVYCGGVLDKQITNRNTVSWEQSLFSTTKPLFSSGQFSMKNHDTAISSHTVKSVLGQNSKLAEPLRKSLSNPTPDYCHDKMIICSEEEQNMDLTKSHTVVIGFGPSELQELGKTNLEHTTGQLTTMNRQIAVKVEKCGKSPIEKSGVLKSNCIMDVLEDESVQKPKFPKEKQNVKIWGRKSVGGPKIDKTIVFSEDDKNDMDITKSYTIEINHRPLLEKRDCHLVPLAGTSETILYTCRQDDMEITRSHTTALECKTVSPDEITTRPMDKTVVFVDNHVELEMTESHTVFIDYQEKERTDRPNFELSQRKSLGTPTVICTPTEESVFFPGNGESDRLVANDSQLTPLEEWSNNRGPVEVADNMELSKSATCKNIKDVQSPGFLNEPLSSKSQRRKSLKLKNDKTIVFSENHKNDMDITQSCMVEIDNESALEDKEDFHLAGASKTILYSCGQDDMEITRSHTTALECKTLLPNEIAIRPMDKTVLFTDNYSDLEVTDSHTVFIDCQATEKILEENPKFGIGKGKNLGVSFPKDNSCVQEIAEKQALAVGNKIVLHTEQKQQLFAATNRTTNEIIKFHSAAMDEKVIGKVVDQACTLEKAQVESCQLNNRDRRNVDFTSSHATAVCGSSDNYSCLPNVISCTDNLEGSAMLLCDKDEEKANYCPVQNDLAYANDFASEYYLESEGQPLSAPCPLLEKEEVIQTSTKGQLDCVITLHKDQDLIKDPRNLLANQTLVYSQDLGEMTKLNSKRVSFKLPKDQMKVYVDDIYVIPQPHFSTDQPPLPKKGQSSINKEEVILSKAGNKSLNIIENSSAPICENKPKILNSEEWFAAACKKELKENIQTTNYNTALDFHSNSDVTKQVIQTHVNAGEAPDPVITSNVPCFHSIKPNLNNLNGKTGEFLAFQTVHLPPLPEQLLELGNKAHNDMHIVQATEIHNINIISSNAKDSRDEENKKSHNGAETTSLPPKTVFKDKVRRCSLGIFLPRLPNKRNCSVTGIDDLEQIPADTTDINHLETQPVSSKDSGIGSVAGKLNLSPSQYINEENLPVYPDEINSSDSINIETEEKALIETYQKEISPYENKMGKTCNSQKRTWVQEEEDIHKEKKIRKNEIKFSDTTQDREIFDHHTEEDIDKSANSVLIKNLSRTPSSCSSSLDSIKADGTSLDFSTYRSSQMESQFLRDTICEESLREKLQDGRITIREFFILLQVHILIQKPRQSNLPGNFTVNTPPTPEDLMLSQYVYRPKIQIYREDCEARRQKIEELKLSASNQDKLLVDINKNLWEKMRHCSDKELKAFGIYLNKIKSCFTKMTKVFTHQGKVALYGKLVQSAQNEREKLQIKIDEMDKILKKIDNCLTEMETETKNLEDEEKNNPVEEWDSEMRAAEKELEQLKTEEEELQRNLLELEVQKEQTLAQIDFMQKQRNRTEELLDQLSLSEWDVVEWSDDQAVFTFVYDTIQLTITFEESVVGFPFLDKRYRKIVDVNFQSLLDEDQAPPSSLLVHKLIFQYVEEKESWKKTCTTQHQLPKMLEEFSLVVHHCRLLGEEIEYLKRWGPNYNLMNIDINNNELRLLFSSSAAFAKFEITLFLSAYYPSVPLPSTIQNHVGNTSQDDIATILSKVPLENNYLKNVVKQIYQDLFQDCHFYH

SEQ ID NO: 12075 - protein, 1746 aa, Homo sapiens
MDGVSSEANEENDNIERPVRRRHSSILKPPRSPLQDLRGGNERVQESNALRNKKNSRRVSFADTIKVFQTESHMKIVRKSEMEETETGENLLLIQNKKLEDNYCEITGMNTLLSAPIHTQMQQKEFSIIEHTRERKHANDQTVIFSDENQMDLTSSHTVMITKGLLDNPISEKSTKIDTTSFLANLKLHTEDSRMKKEVNFSVDQNTSSENKIDFNDFIKRLKTGKCSAFPDVPDKENFEIPIYSKEPNSASSTHQMHVSLKEDENNSNITRLFREKDDGMNFTQCHTANIQTLIPTSSETNSRESKGNDITIYGNDFMDLTFNHTLQILPATGNFSEIENQTQNAMDVTTGYGTKASGNKTVFKSKQNTAFQDLSINSADKIHITRSHIMGAETHIVSQTCNQDARILAMTPESIYSNPSIQGCKTVFYSSCNDAMEMTKCLSNMREEKNLLKHDSNYAKMYCNPDAMSSLTEKTIYSGEENMDITKSHTVAIDNQIFKQDQSNVQIAAAPTPEKEMMLQNLMTTSEDGKMNVNCNSVPHVSKERIQQSLSNPLSISLTDRKTELLSGENMDLTESHTSNLGSQVPLAAYNLAPESTSESHSQSKSSSDECEEITKSRNEPFQRSDIIAKNSLTDTWNKDKDWVLKILPYLDKDSPQSADCNQEIATSHNIVYCGGVLDKQITNRNTVSWEQSLFSTTKPLFSSGQFSMKNHDTAISSHTVKSVLGQNSKLAEPLRKSLSNPTPDYCHDKMIICSEEEQNMDLTKSHTVVIGFGPSELQELGKTNLEHTTGQLTTMNRQIAVKVEKCGKSPIEKSGVLKSNCIMDVLEDESVQKPKFPKEKQNVKIWGRKSVGGPKIDKTIVFSEDDKNDMDITKSYTIEINHRPLLEKRDCHLVPLAGTSETILYTCRQDDMEITRSHTTALECKTVSPDEITTRPMDKTVVFVDNHVELEMTESHTVFIDYQEKERTDRPNFELSQRKSLGTPTVICTPTEESVFFPGNGESDRLVANDSQLTPLEEWSNNRGPVEVADNMELSKSATCKNIKDVQSPGFLNEPLSSKSQRRKSLKLKNDKTIVFSENHKNDMDITQSCMVEIDNESALEDKEDFHLAGASKTILYSCGQDDMEITRSHTTALECKTLLPNEIAIRPMDKTVLFTDNYSDLEVTDSHTVFIDCQATEKILEENPKFGIGKGKNLGVSFPKDNSCVQEIAEKQALAVGNKIVLHTEQKQQLFAATNRTTNEIIKFHSAAMDEKVIGKVVDQACTLEKAQVESCQLNNRDRRNVDFTSSHATAVCGSSDNYSCLPNVISCTDNLEGSAMLLCDKDEEKANYCPVQNDLAYANDFASEYYLESEGQPLSAPCPLLEKEEVIQTSTKGQLDCVITLHKDQDLIKDPRNLLANQTLVYSQDLGEMTKLNSKRVSFKLPKDQMKVYVDDIYVIPQPHFSTDQPPLPKKGQSSINKEEVILSKAGNKSLNIIENSSAPICENKPKILNSEEWFAAACKKELKENIQTTNYNTALDFHSNSDVTKQVIQTHVNAGEAPDPVITSNVPCFHSIKPNLNNLNGKTGEFLAFQTVHLPPLPEQLLELGNKAHNDMHIVQATEIHNINIISSNAKDSRDEENKKSHNGAETTSLPPKTVFKDKVRRCSLGIFLPRLPNKRNCSVTGIDDLEQIPADTTDINHLETQPVSSKDSGIGSVAGKLNLSPSQYINEENLPVYPDEINSSDSINIETEEKAVGTRRRRYS

SEQ ID NO: 12076 - protein, 1833 aa, Homo sapiens
MDGVSSEANEENDNIERPVRRRHSSILKPPRSPLQDLRGGNERVQESNALRNKKNSRRVSFADTIKVFQTESHMKIVRKSEMEETETGENLLLIQNKKLEDNYCEITGMNTLLSAPIHTQMQQKEFSIIEHTRERKHANDQTVIFSDENQMDLTSSHTVMITKGLLDNPISEKSTKIDTTSFLANLKLHTEDSRMKKEVNFSVDQNTSSENKIDFNDFIKRLKTGKCSAFPDVPDKENFEIPIYSKEPNSASSTHQMHVSLKEDENNSNITRLFREKDDGMNFTQCHTANIQTLIPTSSETNSRESKGNDITIYGNDFMDLTFNHTLQILPATGNFSEIENQTQNAMDVTTGYGTKASGNKTVFKSKQNTAFQDLSINSADKIHITRSHIMGAETHIVSQTCNQDARILAMTPESIYSNPSIQGCKTVFYSSCNDAMEMTKCLSNMREEKNLLKHDSNYAKMYCNPDAMSSLTEKTIYSGEENMDITKSHTVAIDNQIFKQDQSNVQIAAAPTPEKEMMLQNLMTTSEDGKMNVNCNSVPHVSKERIQQSLSNPLSISLTDRKTELLSGENMDLTESHTSNLGSQVPLAAYNLAPESTSESHSQSKSSSDECEEITKSRNEPFQRSDIIAKNSLTDTWNKDKDWVLKILPYLDKDSPQSADCNQEIATSHNIVYCGGVLDKQITNRNTVSWEQSLFSTTKPLFSSGQFSMKNHDTAISSHTVKSVLGQNSKLAEPLRKSLSNPTPDYCHDKMIICSEEEQNMDLTKSHTVVIGFGPSELQELGKTNLEHTTGQLTTMNRQIAVKVEKCGKSPIEKSGVLKSNCIMDVLEDESVQKPKFPKEKQNVKIWGRKSVGGPKIDKTIVFSEDDKNDMDITKSYTIEINHRPLLEKRDCHLVPLAGTSETILYTCRQDDMEITRSHTTALECKTVSPDEITTRPMDKTVVFVDNHVELEMTESHTVFIDYQEKERTDRPNFELSQRKSLGTPTVICTPTEESVFFPGNGESDRLVANDSQLTPLEEWSNNRGPVEVADNMELSKSATCKNIKDVQSPGFLNEPLSSKSQRRKSLKLKNDKTIVFSENHKNDMDITQSCMVEIDNESALEDKEDFHLAGASKTILYSCGQDDMEITRSHTTALECKTLLPNEIAIRPMDKTVLFTDNYSDLEVTDSHTVFIDCQATEKILEENPKFGIGKGKNLGVSFPKDNSCVQEIAEKQALAVGNKIVLHTEQKQQLFAATNRTTNEIIKFHSAAMDEKVIGKVVDQACTLEKAQVESCQLNNRDRRNVDFTSSHATAVCGSSDNYSCLPNVISCTDNLEGSAMLLCDKDEEKANYCPVQNDLAYANDFASEYYLESEGQPLSAPCPLLEKEEVIQTSTKGQLDCVITLHKDQDLIKDPRNLLANQTLVYSQDLGEMTKLNSKRVSFKLPKDQMKVYVDDIYVIPQPHFSTDQPPLPKKGQSSINKEEVILSKAGNKSLNIIENSSAPICENKPKILNSEEWFAAACKKELKENIQTTNYNTALDFHSNSDVTKQVIQTHVNAGEAPDPVITSNVPCFHSIKPNLNNLNGKTGEFLAFQTVHLPPLPEQLLELGNKAHNDMHIVQATEIHNINIISSNAKDSRDEENKKSHNGAETTSLPPKTVFKDKVRRCSLGIFLPRLPNKRNCSVTGIDDLEQIPADTTDINHLETQPVSSKDSGIGSVAGKLNLSPSQYINEENLPVYPDEINSSDSINIETEEKALIETYQKEISPYENKMGKTCNSQKRTWVQEEEDIHKEKKIRKNEIKFSDTTQDREVSSVLNQRMFLNFGFCFVFLNCGYSQILILVSGRQKIIIST

SEQ ID NO: 12077 - protein, 533 aa, Homo sapiens
MLLSGMRESQGTEVSLRTISTQDLRLLVSFAYSGVVRARWPGLLRAAQAALQYQSSSCLDLCQKGLARGLSPARCLALFPMAEAPGLERLWSKARHYLLTHLPAVALCPAFPSLPAACLAELLDSDELHVQEEFEAFVAARCWLAANPETQESEAKALLRCVRFGRMSTRELRRVRAAGLLPPLTPDLLHQLMVEADVPGQERRREPDRALVVIGGDGLRPDMALRQPSRAVWWARAFRCGVGLVRTVEWGQLPALPAPGRFRHGAASLAGSELYVCGGQDFYSHSNTLASTLRWEPSQEDWEEMAPLSQARSLFSLVALDGKLYALGGRHNDVALDSVETYNPELNVWRPAPALPAPCFAHAAAILEGQLYVSGGCGGTGQYLASLMHYDPKLEKPGTFLSPMGVPRAGHVMAALGGRLYVAGGLGETEDLLSFEAYELRTDSWTHLAPLPSPHVGAASAVLQGELLVLGGYSHRTYALSHLIHAYCPGLGRWLCLGTLPRPRAEMPACILTLPAVQHIALVPTPHQTKPAG

SEQ ID NO: 12078 - protein, 137 aa, Homo sapiens
MGMYLLHIGNAAVTFNGPTPCPRSPYASTHVNVSWESASGIATLWANGKLVGRKGVWKGYSVGEEAKIILGQEQDSFGGHFDENQSFVGVIWDVFLWDHVLPPKEMCDSCYSGSLLNRHTLTYEDNGYVVTKPKVWA

SEQ ID NO: 12079 - protein, 505 aa, Homo sapiens
MSAEEMVQIRLEDRCYPVSKRKLIEQSDYFRALYRSGMREALSQEAGGPEVQQLRGLSAPGLRLVLDFINAGGAREGWLLGPRGEKGGGVDEDEEMDEVSLLSELVEAASFLQVTSLLQLLLSQVRLNNCLEMYRLAQVYGLPDLQEACLRFMVVHFHEVLCKPQFHLLGSPPQAPGDVSLKQRLREARMTGTPVLVALGDFLGGPLAPHPYQGEPPSMLRYEEMTERWFPLANNLPPDLVNVRGYGSAILDNYLFIVGGYRITSQEISAAHSYNPSTNEWLQVASMNQKRSNFKLVAVNSKLYAIGGQAVSNVECYNPEQDAWNFVAPLPNPLAEFSACECKGKIYVIGGYTTRDRNMNILQYCPSSDMWTLFETCDVHIRKQQMVSVEETIYIVGGCLHELGPNRRSSQSEDMLTVQSYNTVTRQWLYLKENTSKSGLNLTCALHNDGIYIMSRDVTLSTSLEHRVFLKYNIFSDSWEAFRRFPAFGHNLLVSSLYLPNKAET

SEQ ID NO: 12080 - protein, 424 aa, Homo sapiens
MGCGTSKVLPEPPKDVQLDLVKKVEPFSGTKSDVYKHFITEVDSVGPVKAGFPAASQYAHPCPGPPTAGHTEPPSEPPRRARVAKYRAKFDPRVTAKYDIKALIGRGSFSRVVRVEHRATRQPYAIKMIETKYREGREVCESELRVLRRVRHANIIQLVEVFETQERVYMVMELATGGELFDRIIAKGSFTERDATRVLQMVLDGVRYLHALGITHRDLKPENLLYYHPGTDSKIIITDFGLASARKKGDDCLMKTTCGTPEYIAPEVLVRKPYTNSVDMWALGVIAYILLSGTMPFEDDNRTRLYRQILRGKYSYSGEPWPSVSNLAKDFIDRLLTVDPGARMTALQALRHPWVVSMAASSSMKNLHRSISQNLLKRASSRCQSTKSAQSTRSSRSTRSNKSRRVRERELRELNLRYQQQYNG

SEQ ID NO: 12081 - protein, 615 aa, Homo sapiens
MAESGGSSGGAGGGGAFGAGPGPERPNSTADKNGALKCTFSAPSHSTSLLQGLATLRAQGQLLDVVLTINREAFPAHKVVLAACSDYFRAMFTGGMREASQDVIELKGVSARGLRHIIDFAYSAEVTLDLDCVQDVLGAAVFLQMLPVVELCEEFLKAAMSVETCLNIGQMATTFSLASLRESVDAFTFRHFLQIAEEEDFLRLPLERLVFFLQSNRLQSCAEIDLFRAAVRWLQHDPARRPRASHVLCHIRFPLMQSSELVDSVQTLDIMVEDVLCRQYLLEAFNYQVLPFRQHEMQSPRTAVRSDVPSLVTFGGTPYTDSDRSVSSKVYQLPEPGARHFRELTEMEVGCSHTCVAVLDNFVYVAGGQHLQYRSGEGAVDACYRYDPHLNRWLRLQAMQESRIQFQLNVLCGMVYATGGRNRAGSLASVERYCPRRNEWGYACSLKRRTWGHAGAASGGRLYISGGYGISVEDKKALHCYDPVADQWEFKAPMSEPRVLHAMVGAGGRIYALGGRMDHVDRCFDVLAVEYYVPETDQWTSVSPMRAGQSEAGCCLLERKIYIVGGYNWRLNNVTGIVQVYNTDTDEWERDLHFPESFAGIACAPVLLPRAGTRR

SEQ ID NO: 12082 - protein, 621 aa, Homo sapiens
MALGLEQAEEQRLYQQTLLQDGLKDMLDHGKFLDCVVRAGEREFPCHRLVLAACSPYFRARFLAEPERAGELHLEEVSPDVVAQVLHYLYTSEIALDEASVQDLFAAAHRFQIPSIFTICVSFLQKRLCLSNCLAVFRLGLLLDCARLAVAARDFICAHFTLVARDADFLGLSADELIAIISSDGLNVEKEEAVFEAVMRWAGSGDAEAQAERQRALPTVFESVRCRLLPRAFLESRVERHPLVRAQPELLRKVQMVKDAHEGRITTLRKKKKGKDGAGAKEADKGTSKAKAEEDEEAERILPGILNDTLRFGMFLQDLIFMISEEGAVAYDPAANECYCASLSNQVPKNHVSLVTKENQVFVAGGLFYNEDNKEDPMSAYFLQFDHLDSEWLGMPPLPSPRCLFGLGEALNSIYVVGGREIKDGERCLDSVMCYDRLSFKWGESDPLPYVVYGHTVLSHMDLVYVIGGKGSDRKCLNKMCVYDPKKFEWKELAPMQTARSLFGATVHDGRIIVAAGVTDTGLTSSAEVYSITDNKWAPFEAFPQERSSLSLVSLVGTLYAIGGFATLETESGELVPTELNDIWRYNEEEKKWEGVLREIAYAAGATFLPVRLNVLCLTKM

SEQ ID NO: 12083 - protein, 472 aa, Homo sapiens
MALGLEQAEEQRLYQQTLLQDGLKDMLDHGKFLDCVVRAGEREFPCHRLVLAACSPYFRARFLAEPERAGELHLEEVSPDVVAQVLHYLYTSEIALDEASVQDLFAAAHRFQIPSIFTICVSFLQKRLCLSNCLAVFRLGLLLDCARLAVAARDFICAHFTLVARDADFLGLSADELIAIISSDGLNVEKEEAVFEAVMRWAGSGDAEAQAERQRALPTVFESVRCRLLPRAFLESRVERHPLVRAQPELLRKVQMVKDAHEGRITTLRKKKKGKDGAGAKEADKGTSKAKAEEDEEAERILPGILNDTLRFGMFLQDLIFMISEEGAVAYDPAANECYCASLSNQVPKNHVSLVTKENQVFVAGGLFYNEDNKEDPMSAYFLQFDHLDSEWLGMPPLPSPRCLFGLGEALNSIYVVGGREIKDGERCLDSVMCYDRLSFKWGHRHRADQFCRSVQHHRQQVGTLRGLPTGA

SEQ ID NO: 12084 - protein, 617 aa, Homo sapiens
MKVSLGNGEMGVSAHLQPCKAGTTRFFTSNTHSSVVLQGFDQLRIEGLLCDVTLVPGDGDEIFPVHRAMMASASDYFKAMFTGGMKEQDLMCIKLHGVNKVGLKKIIDFIYTAKLSLNMDNLQDTLEAASFLQILPVLDFCKVFLISGVSLDNCVEVGRIANTYNLIEVDKYVNNFILKNFPALLSTGEFLKLPFERLAFVLSSNSLKHCTELELFKAACRWLRLEDPRMDYAAKLMKNIRFPLMTPQDLINYVQTVDFMRTDNTCVNLLLEASNYQMMPYMQPVMQSDRTAIRSDSTHLVTLGGVLRQQLVVSKELRMYDERAQEWRSLAPMDAPRYQHGIAVIGNFLYVVGGQSNYDTKGKTAVDTVFRFDPRYNKWMQVASLNEKRTFFHLSALKGHLYAVGGRSAAGELATVECYNPRMNEWSYVAKMSEPHYGHAGTVYGGLMYISGGITHDTFQNELMCFDPDTDKWMQKAPMTTVRGLHCMCTVGDKLYVIGGNHFRGTSDYDDVLSCEYYSPTLDQWTPIAAMLRGQSDVGVAVFENKIYVVGGYSWNNRCMVEIVQKYDPEKDEWHKVFDLPESLGGIRACTLTVFPPEENPGSPSRESPLSAPSDHS

SEQ ID NO: 12085 - protein, 495 aa, Homo sapiens
MTVMSGENVDEASAAPGHPQDGSYPRQADHDDHECCERVVINISGLRFETQLKTLAQFPNTLLGNPKKRMRYFDPLRNEYFFDRNRPSFDAILYYYQSGGRLRRPVNVPLDMFSEEIKFYELGEEAMEKFREDEGFIKEEERPLPEKEYQRQVWLLFEYPESSGPARVIAIVSVMVILISIVIFCLETLPELKDDKDFTGTVHRIDNTTVIYNSNIFTDPFFIVETLCIIWFSFELVVRFFACPSKTDFFKNIMNFIDIVAIIPYFITLGTEIAEQEGNQKGEQATSLAILRVIRLVRVFRIFKLSRHSKGLQILGQTLKASMRELGLLIFFLFIGVILFSSAVYFAEAEEAESHFSSIPDAFWWAVVSMTTVGYGDMYPVTIGGKIVGSLCAIAGVLTIALPVPVIVSNFNYFYHRETEGEEQAQLLHVSSPNLASDSDLSRRSSSTMSKSEYMEIEEDMNNSIAHYRQVNIRTANCTTANQNCVNKSKLLTDV

SEQ ID NO: 12086 - protein, 1083 aa, Homo sapiens
MPAMRGLLAPQNTFLDTIATRFDGTHSNFVLGNAQVAGLFPVVYCSDGFCDLTGFSRAEVMQRGCACSFLYGPDTSELVRQQIRKALDEHKEFKAELILYRKSGLPFWCLLDVIPIKNEKGEVALFLVSHKDISETKNRGGPDRWKETGGGRRRYGRARSKGFNANRRRSRAVLYHLSGHLQKQPKGKHKLNKGVFGEKPNLPEYKVAAIRKSPFILLHCGALRATWDGFILLATLYVAVTVPYSVCVSTAREPSAARGPPSVCDLAVEVLFILDIVLNFRTTFVSKSGQVVFAPKSICLHYVTTWFLLDVIAALPFDLLHAFKVNVYFGAHLLKTVRLLRLLRLLPRLDRYSQYSAVVLTLLMAVFALLAHWVACVWFYIGQREIESSESELPEIGWLQELARRLETPYYLVGRRPAGGNSSGQSDNCSSSSEANGTGLELLGGPSLRSAYITSLYFALSSLTSVGFGNVSANTDTEKIFSICTMLIGALMHAVVFGNVTAIIQRMYARRFLYHSRTRDLRDYIRIHRIPKPLKQRMLEYFQATWAVNNGIDTTELLQSLPDELRADIAMHLHKEVLQLPLFEAASRGCLRALSLALRPAFCTPGEYLIHQGDALQALYFVCSGSMEVLKGGTVLAILGKGDLIGCELPRREQVVKANADVKGLTYCVLQCLQLAGLHDSLALYPEFAPRFSRGLRGELSYNLGAGGGSAEVDTSSLSGDNTLMSTLEEKETDGEQGPTVSPAPADEPSSPLLSPGCTSSSSAAKLLSPRRTAPRPRLGGRGRPGRAGALKAEAGPSAPPRALEGLRLPPMPWNVPPDLSPRVVDGIEDGCGSDQPKFSFRVGQSGPECSSSPSPGPESGLLTVPHGPSEARNTDTLDKLRQAVTELSEQVLQMREGLQSLRQAVQLVLAPHREGPCPRASGEGPCPASTSGLLQPLCVDTGASSYCLQPPAGSVLSGTWPHPRPGPPPLMAPWPWGPPASQSSPWPRATAFWTSTSDSEPPASGDLCSEPSTPASPPPSEEGARTGPAEPVSQAEATSTGEPPPGSGGLALPWDPHSLEMVLIGCHGSGTVQWTQEEGTGV

SEQ ID NO: 12087 - protein, 458 aa, Homo sapiens
MAAQGAAAAVAAGTSGVAGEGEPGPGENAAAEGTAPSPGRVSPPTPARGEPEVTVEIGETYLCRRPDSTWHSAEVIQSRVNDQEGREEFYVHYVGFNRRLDEWVDKNRLALTKTVKDAVQKNSEKYLSELAEQPERKITRNQKRKHDEINHVQKTYAEMDPTTAALEKEHEAITKVKYVDKIHIGNYEIDAWYFSPFPEDYGKQPKLWLCEYCLKYMKYEKSYRFHLGQCQWRQPPGKEIYRKSNISVYEVDGKDHKIYCQNLCLLAKLFLDHKTLYFDVEPFVFYILTEVDRQGAHIVGYFSKEKESPDGNNVACILTLPPYQRRGYGKFLIAFSYELSKLESTVGSPEKPLSDLGKLSYRSYWSWVLLEILRDFRGTLSIKDLSQMTSITQNDIISTLQSLNMVKYWKGQHVICVTPKLVEEHLKSAQYKKPPITVDSVCLKWAPPKHKQVKLSKK

SEQ ID NO: 12088 - protein, 467 aa, Homo sapiens
MAAQGAAAAVAAGTSGVAGEGEPGPGENAAAEGTAPSPGRVSPPTPARGEPEVTVEIGETYLCRRPDSTWHSAEVIQSRVNDQEGREEFYVHYVGFNRRLDEWVDKNRLALTKTVKDAVQKNSEKYLSELAEQPERKITRNQKRKHDEINHVQKTYAEMDPTTAALEKEHEAITKVKYVDKIHIGNYEIDAWYFSPFPEDYGKQPKLWLCEYCLKYMKYEKSYRFHLGQCQWRQPPGKEIYRKSNISVYEVDGKDHKIYCQNLCLLAKLFLDHKTLYFDVEPFVFYILTEVDRQGAHIVGYFSKEKESPDGNNVACILTLPPYQRRGYGKFLIAFSYELSKLESTVGSPEKPLSDLGKLSYRSYWSWVLLEILRDFRGTLSIKDLSQMTSITQNDIISTLQSLNMVKYWKGQHVICVTPKLVEEHLKSAQYKKPPITGGWGAAVCRGRWGSVSIWTGRSQGLLIAVT

SEQ ID NO: 12089 - protein, 307 aa, Homo sapiens
MGGLRPWSRYGLLVVAHLLALGLGAVVFQALEGPPACRLQAELRAELAAFQAEHRACLPPGALEELLGTALATQAHGVSTLGNSSEGRTWDLPSALLFAASILTTTGYGHMAPLSPGGKAFCMVYAALGLPASLALVATLRHCLLPVLSRPRAWVAVHWQLSPARAALLQAVALGLLVASSFVLLPALVLWGLQGDCSLLGAVYFCFSSLSTIGLEDLLPGRGRSLHPVIYHLGQLALLGYLLLGLLAMLLAVETFSELPQVRAMGKFFRPSGPVTAEDQGGILGQDELALSTLPPAAPASGQAPAC

SEQ ID NO: 12090 - protein, 252 aa, Homo sapiens
MGGLRPWSRYGLLVVAHLLALGLGAVVFQALEGPPACRLQAELRAELAAFQAEHRACLPPGALEELLGTALATQAHGVSTLGNSSEGRTWDLPSALLFAASILTTTGYGHMAPLSPGGKAFCMVYAALGLPASLALVATLRHCLLPVLSRPRAWVAVHWQLSPARAALLQAVALGLLVASSFVLLPALVLWGLQGDCSLLGAVYFCFSSLSTIGLEDLLPGRGRSLHPVIYHLGQLALLGGGTSLQGTAWEG

SEQ ID NO: 12091 - protein, 257 aa, Homo sapiens
MGGLRPWSRYGLLVVAHLLALGLGAVVFQALEGPPACRLQAELRAELAAFQAEHRACLPPGALEELLGTALATQAHGVSTLGNSSEGRTWDLPSALLFAASILTTTGYGHMAPLSPGGKAFCMVYAALGLPASLALVATLRHCLLPVLSRPRAWVAVHWQLSPARAALLQAVALGLLVASSFVLLPALVLWGLQGDCSLLGAVYFCFSSLSTIGLEDLLPGRGRSLHPVIYHLGQLALLGKSSHLTACGGRGKRSLD

SEQ ID NO: 12092 - protein, 179 aa, Homo sapiens
MAVFKTTLWRLISGTLGIICLSLMSTLGILLKNSFTKLSIEPAFTPGPNIELQKDSDCCSCQEKWVGYRCNCYFISSEQKTWNESRHLCASQKSSLLQLQNTDELDFMSSSQQFYWIGLSYSEEHTAWLWENGSALSQYLFPSFETFNTKNCIAYNPNGNALDESCEDKNRYICKQQLI

SEQ ID NO: 12093 - protein, 180 aa, Homo sapiens
MAVFKTTLWRLISGTLGIICLSLMSTLGILLKNSFTKLSIEPAFTPGPNIELQKDSDCCSCQEKWVGYRCNCYFISSEQKTWNESRHLCASQKSSLLQLQNTDELQDFMSSSQQFYWIGLSYSEEHTAWLWENGSALSQYLFPSFETFNTKNCIAYNPNGNALDESCEDKNRYICKQQLI

SEQ ID NO: 12094 - protein, 148 aa, Homo sapiens
MAAFTKLSIEPAFTPGPNIELQKDSDCCSCQEKWVGYRCNCYFISSEQKTWNESRHLCASQKSSLLQLQNTDELDFMSSSQQFYWIGLSYSEEHTAWLWENGSALSQYLFPSFETFNTKNCIAYNPNGNALDESCEDKNRYICKQQLI

SEQ ID NO: 12095 - protein, 1826 aa, Homo sapiens
MGDSKVKVAVRIRPMNRRETDLHTKCVVDVDANKVILNPVNTNLSKGDARGQPKVFAYDHCFWSMDESVKEKYAGQDIVFKCLGENILQNAFDGYNACIFAYGQTGSGKSYTMMGTADQPGLIPRLCSGLFERTQKEENEEQSFKVEVSYMEIYNEKVRDLLDPKGSRQTLKVREHSVLGPYVDGLSKLAVTSYKDIESLMSEGNKSRTVAATNMNEESSRSHAVFKITLTHTLYDVKSGTSGEKVGKLSLVDLAGSERATKTGAAGDRLKEGSNINKSLTTLGLVISALADQSAGKNKNKFVPYRDSVLTWLLKDSLGGNSKTAMVATVSPAADNYDETLSTLRYADRAKHIVNHAVVNEDPNARIIRDLREEVEKLREQLTKAEAMKSPELKDRLEESEKLIQEMTVTWEEKLRKTEEIAQERQKQLESLGISLQSSGIKVGDDKCFLVNLNADPALNELLVYYLKEHTLIGSANSQDIQLCGMGILPEHCIIDITSEGQVMLTPQKNTRTFVNGSSVSSPIQLHHGDRILWGNNHFFRLNLPKKKKKAEREDEDQDPSMKNENSSEQLDVDGDSSSEVSSEVNFNYEYAQMEVTMKALGSNDPMQSILNSLEQQHEEEKRSALERQRLMYEHELEQLRRRLSPEKQNCRSMDRFSFHSPSAQQRLRQWAEEREATLNNSLMRLREQIVKANLLVREANYIAEELDKRTEYKVTLQIPASSLDANRKRGSLLSEPAIQVRRKGKGKQIWSLEKLDNRLLDMRDLYQEWKECEEDNPVIRSYFKRADPFYDEQENHSLIGVANVFLESLFYDVKLQYAVPIINQKGEVAGRLHVEVMRLSGDVGERIAGGDEVAEVSFEKETQENKLVCMVKILQATGLPQHLSHFVFCKYSFWDQQEPVIVAPEVDTSSSSVSKEPHCMVVFDHCNEFSVNITEDFIEHLSEGALAIEVYGHKINDPRKNPALWDLGIIQAKTRSLRDRWSEVTRKLEFWVQILEQNENGEYCPVEVISAKDVPTGGIFQLRQGQSRRVQVEVKSVQESGTLPLMEECILSVGIGCVKVRPLRAPRTHETFHEEEEDMDSYQDRDLERLRRKWLNALTKRQEYLDQQLQKLVSKRDKTEDDADREAQLLEMRLTLTEERNAVMVPSAGSGIPGAPAEWTPVPGMETHIPVIFLDLNADDFSSQDNLDDPEAGGWDATLTGEEEEEFFELQIVKQHDGEVKAEASWDSAVHGCPQLSRGTPVDERLFLIVRVTVQLSHPADMQLVLRKRICVNVHGRQGFAQSLLKKMSHRSSIPGCGVTFEIVSNIPEDAQGVEEREALARMAANVENPASADSEAYIEKYLRSVLAVENLLTLDRLRQEVAVKEQLTGKGKLSRRSISSPNVNRLSGSRQDLIPSYSLGSNKGRWESQQDVSQTTVSRGIAPAPALSVSPQNNHSPDPGLSNLAASYLNPVKSFVPQMPKLLKSLFPVRDEKRGKRPSPLAHQPVPRIMVQSASPDIRVTRMEEAQPEMGPDVLVQTMGAPALKICDKPAKVPSPPPVIAVTAVTPAPEAQDGPPSPLSEASSGYFSHSVSTATLSDALGPGLDAAAPPGSMPTAPEAEPEAPISHPPPPTAVPAEEPPGPQQLVSPGRERPDLEAPAPGSPFRVRRVRASELRSFSRMLAGDPGCSPGAEGNAPAPGAGGQALASDSEEADEVPEWLREGEFVTVGAHKTGVVRYVGPADFQEGTWVGVELDLPSGKNDGSIGGKQYFRCNPGYGLLVRPSRVRRATGPVRRRSTGLRLGAPEARRSATLSGSATNLASLTAALAKADRSHKNPENRKSWAS

SEQ ID NO: 12096 - protein, 345 aa, Homo sapiens
MPKLLKSLFPVRDEKRGKRPSPLAHQAQPEMGPDVLVQTMGAPALKICDKPAKVPSPPPVIAVTAVTPAPEAQDGPPSPLSEASSGYFSHSVSTATLSDALGPGLDAAAPPGSMPTAPEAEPEAPISHPPPPTAVPAEEPPGPQQLVSPGRERPDLEAPAPGSPFRVRRVRASELRSFSRMLAGDPGCSPGAEGNAPAPGAGGQALASDSEEADEVPEWLREGEFVTVGAHKTGVVRYVGPADFQEGTWVGVELDLPSGKNDGSIGGKQYFRCNPGYGLLVRPSRVRRATGPVRRRSTGLRLGAPEARRSATLSGSATNLASLTAALAKADRSHKNPENRKSWAS

SEQ ID NO: 12097 - protein, 321 aa, Homo sapiens
MQTPRPAMRMEAGEAAPPAGAGGRAAGGWGKWVRLNVGGTVFLTTRQTLCREQKSFLSRLCQGEELQSDRDETGAYLIDRDPTYFGPILNFLRHGKLVLDKDMAEEGVLEEAEFYNIGPLIRIIKDRMEEKDYTVTQVPPKHVYRVLQCQEEELTQMVSTMSDGWRFEQLVNIGSSYNYGSEDQAEFLCVVSKELHSTPNGLSSESSRKTKSTEEQLEEQQQQEEEVEEVEVEQVQVEADAQEKAQSSQDPANLFSLPPLPPPPLPAGGSRPHPLRPEAELAVRASPRPLARPQSCHPCCYKPEAPGCEAPDHLQGLGVPI

SEQ ID NO: 12098 - protein, 297 aa, Homo sapiens
MQTPRPAMRMEAGEAAPPAGAGGRAAGGWGKWVRLNVGGTVFLTTRQTLCREQKSFLSRLCQGEELQSDRDETGAYLIDRDPTYFGPILNFLRHGKLVLDKDMAEEGVLEEAEFYNIGPLIRIIKDRMEEKDYTVTQVPPKHVYRVLQCQEEELTQMVSTMSDGWRFEQLVNIGSSYNYGSEDQAEFLCVVSKELHSTPNGLSSESSRKTKSTEEQLEEQQQQEEEVEEVEVEQVQVEADAQEKGSRPHPLRPEAELAVRASPRPLARPQSCHPCCYKPEAPGCEAPDHLQGLGVPI

SEQ ID NO: 12099 - protein, 872 aa, Homo sapiens
MGLKARRAAGAAGGGGDGGGGGGGAANPAGGDAAAAGDEERKVGLAPGDVEQVTLALGAGADKDGTLLLEGGGRDEGQRRTPQGIGLLAKTPLSRPVKRNNAKYRRIQTLIYDALERPRGWALLYHALVFLIVLGCLILAVLTTFKEYETVSGDWLLLLETFAIFIFGAEFALRIWAAGCCCRYKGWRGRLKFARKPLCMLDIFVLIASVPVVAVGNQGNVLATSLRSLRFLQILRMLRMDRRGGTWKLLGSAICAHSKELITAWYIGFLTLILSSFLVYLVEKDVPEVDAQGEEMKEEFETYADALWWGLITLATIGYGDKTPKTWEGRLIAATFSLIGVSFFALPAGILGSGLALKVQEQHRQKHFEKRRKPAAELIQAAWRYYATNPNRIDLVATWRFYESVVSFPFFRKEQLEAASSQKLGLLDRVRLSNPRGSNTKGKLFTPLNVDAIEESPSKEPKPVGLNNKERFRTAFRMKAYAFWQSSEDAGTGDPMAEDRGYGNDFPIEDMIPTLKAAIRAVRILQFRLYKKKFKETLRPYDVKDVIEQYSAGHLDMLSRIKYLQTRIDMIFTPGPPSTPKHKKSQKGSAFTFPSQQSPRNEPYVARPSTSEIEDQSMMGKFVKVERQVQDMGKKLDFLVDMHMQHMERLQVQVTEYYPTKGTSSPAEAEKKEDNRYSDLKTIICNYSETGPPEPPYSFHQVTIDKVSPYGFFAHDPVNLPRGGPSSGKVQATPPSSATTYVERPTVLPILTLLDSRVSCHSQADLQGPYSDRISPRQRRSITRDSDTPLSLMSVNHEELERSPSGFSISQDRDDYVFGPNGGSSWMREKRYLAEGETDTDTDPFTPSGSMPLSSTGDGISDSVWTPSNKPI

SEQ ID NO: 12100 - protein, 752 aa, Homo sapiens
MKPAEHATMFLIVLGCLILAVLTTFKEYETVSGDWLLLLETFAIFIFGAEFALRIWAAGCCCRYKGWRGRLKFARKPLCMLDIFVLIASVPVVAVGNQGNVLATSLRSLRFLQILRMLRMDRRGGTWKLLGSAICAHSKELITAWYIGFLTLILSSFLVYLVEKDVPEVDAQGEEMKEEFETYADALWWGLITLATIGYGDKTPKTWEGRLIAATFSLIGVSFFALPAGILGSGLALKVQEQHRQKHFEKRRKPAAELIQAAWRYYATNPNRIDLVATWRFYESVVSFPFFRKEQLEAASSQKLGLLDRVRLSNPRGSNTKGKLFTPLNVDAIEESPSKEPKPVGLNNKERFRTAFRMKAYAFWQSSEDAGTGDPMAEDRGYGNDFPIEDMIPTLKAAIRAVRILQFRLYKKKFKETLRPYDVKDVIEQYSAGHLDMLSRIKYLQTRIDMIFTPGPPSTPKHKKSQKGSAFTFPSQQSPRNEPYVARPSTSEIEDQSMMGKFVKVERQVQDMGKKLDFLVDMHMQHMERLQVQVTEYYPTKGTSSPAEAEKKEDNRYSDLKTIICNYSETGPPEPPYSFHQVTIDKVSPYGFFAHDPVNLPRGGPSSGKVQATPPSSATTYVERPTVLPILTLLDSRVSCHSQADLQGPYSDRISPRQRRSITRDSDTPLSLMSVNHEELERSPSGFSISQDRDDYVFGPNGGSSWMREKRYLAEGETDTDTDPFTPSGSMPLSSTGDGISDSVWTPSNKPI

SEQ ID NO: 12101 - protein, 418 aa, Homo sapiens
MSYYGSSYHIINADAKYPGYPPEHIIAEKRRARRRLLHKDGSCNVYFKHIFGEWGSYVVDIFTTLVDTKWRHMFVIFSLSYILSWLIFGSVFWLIAFHHGDLLNDPDITPCVDNVHSFTGAFLFSLETQTTIGYGYRCVTEECSVAVLMVILQSILSCIINTFIIGAALAKMATARKRAQTIRFSYFALIGMRDGKLCLMWRIGDFRPNHVVEGTVRAQLLRYTEDSEGRMTMAFKDLKLVNDQIILVTPVTIVHEIDHESPLYALDRKAVAKDNFEILVTFIYTGDSTGTSHQSRSSYVPREILWGHRFNDVLEVKRKYYKVNCLQFEGSVEVYAPFCSAKQLDWKDQQLHIEKAPPVRESCTSDTKARRRSFSAVAIVSSCENPEETTTSATHEYRETPYQKALLTLNRISVESQM

SEQ ID NO: 12102 - protein, 680 aa, Homo sapiens
MVPGVPGAVLTLCLWLAASSGCLAAGPGAAAARRLDESLSAGSVQRARCASRCLSLQITRISAFFQHFQNNGSLVWCQNHKQCSKCLEPCKESGDLRKHQCQSFCEPLFPKKSYECLTSCEFLKYILLVKQGDCPAPEKASGFAAACVESCEVDNECSGVKKCCSNGCGHTCQVPKTLYKGVPLKPRKELRFTELQSGQLEVKWSSKFNISIEPVIYVVQRRWNYGIHPSEDDATHWQTVAQTTDERVQLTDIRPSRWYQFRVAAVNVHGTRGFTAPSKHFRSSKDPSAPPAPANLRLANSTVNSDGSVTVTIVWDLPEEPDIPVHHYKVFWSWMVSSKSLVPTKKKRRKTTDGFQNSVILEKLQPDCDYVVELQAITYWGQTRLKSAKVSLHFTSTHATNNKEQLVKTRKGGIQTQLPFQRRRPTRPLEVGAPFYQDGQLQVKVYWKKTEDPTVNRYHVRWFPEACAHNRTTGSEASSGMTHENYIILQDLSFSCKYKVTVQPIRPKSHSKAEAVFFTTPPCSALKGKSHKPVGCLGEAGHVLSKVLAKPENLSASFIVQDVNITGHFSWKMAKANLYQPMTGFQVTWAEVTTESRQNSLPNSIISQSQILPSDHYVLTVPNLRPSTLYRLEVQVLTPGGEGPATIKTFRTPELPPSSAHRSHLKHRHPHHYKPSPERY

SEQ ID NO: 12103 - protein, 117 aa, Homo sapiens
MDMRVPAQLLGLLLLWLRGARCDIQMTQSPSSLSASVGDRVTITCRASQSISSYLNWYQQKPGKAPKLLIYAASSLQSGVPSRFSGSGSGTDFTLTISSLQPEDFATYYCQQSYSTP

SEQ ID NO: 12104 - protein, 115 aa, Homo sapiens
MEAPAQLLFLLLLWLPDTTGEIVLTQSPATLSLSPGERATLSCRASQSVSSYLAWYQQKPGQAPRLLIYDASNRATGIPARFSGSGSGTDFTLTISSLEPEDFAVYYCQQRSNWP

SEQ ID NO: 12105 - protein, 115 aa, Homo sapiens
MGSQVHLLSFLLLWISDTRAETTLTQSPAFMSATPGDKVNISCKASQDIDDDMNWYQQKPGEAAIFIIQEATTLVPGIPPRFSGSGYGTDFTLTINNIESEDAAYYFCLQHDNFP

SEQ ID NO: 12106 - protein, 117 aa, Homo sapiens
MDMRVPAQLLGLLLLWLPGARCAIWMTQSPSLLSASTGDRVTISCRMSQGISSYLAWYQQKPGKAPELLIYAASTLQSGVPSRFSGSGSGTDFTLTISCLQSEDFATYYCQQYYSFP

SEQ ID NO: 12107 - protein, 120 aa, Homo sapiens
MRLLAQLLGLLMLWVPGSSGDIVMTQTPLSSPVTLGQPASISFRSSQSLVHSDGNTYLSWLQQRPGQPPRLLIYKVSNRFSGVPDRFSGSGAGTDFTLKISRVEAEDVGVYYCTQATQFP

SEQ ID NO: 12108 - protein, 3122 aa, Homo sapiens
MPGAAGVLLLLLLSGGLGGVQAQRPQQQRQSQAHQQRGLFPAVLNLASNALITTNATCGEKGPEMYCKLVEHVPGQPVRNPQCRICNQNSSNPNQRHPITNAIDGKNTWWQSPSIKNGIEYHYVTITLDLQQVFQIAYVIVKAANSPRPGNWILERSLDDVEYKPWQYHAVTDTECLTLYNIYPRTGPPSYAKDDEVICTSFYSKIHPLENGEIHISLINGRPSADDPSPELLEFTSARYIRLRFQRIRTLNADLMMFAHKDPREIDPIVTRRYYYSVKDISVGGMCICYGHARACPLDPATNKSRCECEHNTCGDSCDQCCPGFHQKPWRAGTFLTKTECEACNCHGKAEECYYDENVARRNLSLNIRGKYIGGGVCINCTQNTAGINCETCTDGFFRPKGVSPNYPRPCQPCHCDPIGSLNEVCVKDEKHARRGLAPGSCHCKTGFGGVSCDRCARGYTGYPDCKACNCSGLGSKNEDPCFGPCICKENVEGGDCSRCKSGFFNLQEDNWKGCDECFCSGVSNRCQSSYWTYGKIQDMSGWYLTDLPGRIRVAPQQDDLDSPQQISISNAEARQALPHSYYWSAPAPYLGNKLPAVGGQLTFTISYDLEEEEEDTERVLQLMIILEGNDLSISTAQDEVYLHPSEEHTNVLLLKEESFTIHGTHFPVRRKEFMTVLANLKRVLLQITYSFGMDAIFRLSSVNLESAVSYPTDGSIAAAVEVCQCPPGYTGSSCESCWPRHRRVNGTIFGGICEPCQCFGHAESCDDVTGECLNCKDHTGGPYCDKCLPGFYGEPTKGTSEDCQPCACPLNIPSNNFSPTCHLDRSLGLICDGCPVGYTGPRCERCAEGYFGQPSVPGGSCQPCQCNDNLDFSIPGSCDSLSGSCLICKPGTTGRYCELCADGYFGDAVDAKNCQPCRCNAGGSFSEVCHSQTGQCECRANVQGQRCDKCKAGTFGLQSARGCVPCNCNSFGSKSFDCEESGQCWCQPGVTGKKCDRCAHGYFNFQEGGCTACECSHLGNNCDPKTGRCICPPNTIGEKCSKCAPNTWGHSITTGCKACNCSTVGSLDFQCNVNTGQCNCHPKFSGAKCTECSRGHWNYPRCNLCDCFLPGTDATTCDSETKKCSCSDQTGQCTCKVNVEGIHCDRCRPGKFGLDAKNPLGCSSCYCFGTTTQCSEAKGLIRTWVTLKAEQTILPLVDEALQHTTTKGIVFQHPEIVAHMDLMREDLHLEPFYWKLPEQFEGKKLMAYGGKLKYAIYFEAREETGFSTYNPQVIIRGGTPTHARIIVRHMAAPLIGQLTRHEIEMTEKEWKYYGDDPRVHRTVTREDFLDILYDIHYILIKATYGNFMRQSRISEISMEVAEQGRGTTMTPPADLIEKCDCPLGYSGLSCEACLPGFYRLRSQPGGRTPGPTLGTCVPCQCNGHSSLCDPETSICQNCQHHTAGDFCERCALGYYGIVKGLPNDCQQCACPLISSSNNFSPSCVAEGLDDYRCTACPRGYEGQYCERCAPGYTGSPGNPGGSCQECECDPYGSLPVPCDPVTGFCTCRPGATGRKCDGCKHWHAREGWECVFCGDECTGLLLGDLARLEQMVMSINLTGPLPAPYKMLYGLENMTQELKHLLSPQRAPERLIQLAEGNLNTLVTEMNELLTRATKVTADGEQTGQDAERTNTRAKSLGEFIKELARDAEAVNEKAIKLNETLGTRDEAFERNLEGLQKEIDQMIKELRRKNLETQKEIAEDELVAAEALLKKVKKLFGESRGENEEMEKDLREKLADYKNKVDDAWDLLREATDKIREANRLFAVNQKNMTALEKKKEAVESGKRQIENTLKEGNDILDEANRLADEINSIIDYVEDIQTKLPPMSEELNDKIDDLSQEIKDRKLAEKVSQAESHAAQLNDSSAVLDGILDEAKNISFNATAAFKAYSNIKDYIDEAEKVAKEAKDLAHEATKLATGPRGLLKEDAKGCLQKSFRILNEAKKLANDVKENEDHLNGLKTRIENADARNGDLLRTLNDTLGKLSAIPNDTAAKLQAVKDKARQANDTAKDVLAQITELHQNLDGLKKNYNKLADSVAKTNAVVKDPSKNKIIADADATVKNLEQEADRLIDKLKPIKELEDNLKKNISEIKELINQARKQANSIKVSVSSGGDCIRTYKPEIKKGSYNNIVVNVKTAVADNLLFYLGSAKFIDFLAIEMRKGKVSFLWDVGSGVGRVEYPDLTIDDSYWYRIVASRTGRNGTISVRALDGPKASIVPSTHHSTSPPGYTILDVDANAMLFVGGLTGKLKKADAVRVITFTGCMGETYFDNKPIGLWNFREKEGDCKGCTVSPQVEDSEGTIQFDGEGYALVSRPIRWYPNISTVMFKFRTFSSSALLMYLATRDLRDFMSVELTDGHIKVSYDLGSGMASVVSNQNHNDGKWKSFTLSRIQKQANISIVDIDTNQEENIATSSSGNNFGLDLKADDKIYFGGLPTLRNLSMKARPEVNLKKYSGCLKDIEISRTPYNILSSPDYVGVTKGCSLENVYTVSFPKPGFVELSPVPIDVGTEINLSFSTKNESGIILLGSGGTPAPPRRKRRQTGQAYYAILLNRGRLEVHLSTGARTMRKIVIRPEPNLFHDGREHSVHVERTRGIFTVQVDENRRYMQNLTVEQPIEVKKLFVGGAPPEFQPSPLRNIPPFEGCIWNLVINSVPMDFARPVSFKNADIGRCAHQKLREDEDGAAPAEIVIQPEPVPTPAFPTPTPVLTHGPCAAESEPALLIGSKQFGLSRNSHIAIAFDDTKVKNRLTIELEVRTEAESGLLFYMARINHADFATVQLRNGLPYFSYDLGSGDTHTMIPTKINDGQWHKIKIMRSKQEGILYVDGASNRTISPKKADILDVVGMLYVGGLPINYTTRRIGPVTYSIDGCVRNLHMAEAPADLEQPTSSFHVGTCFANAQRGTYFDGTGFAKAVGGFKVGLDLLVEFEFRTTTTTGVLLGISSQKMDGMGIEMIDEKLMFHVDNGAGRFTAVYDAGVPGHLCDGQWHKVTANKIKHRIELTVDGNQVEAQSPNPASTSADTNDPVFVGGFPDDLKQFGLTTSIPFRGCIRSLKLTKGTGKPLEVNFAKALELRGVQPVSCPAN

SEQ ID NO: 12109 - protein, 392 aa, Homo sapiens
MSAQAQMRAMLDQLMGTSRDGDTTRQRIKFSDDRVCKSHLLNCCPHDVLSGTRMDLGECLKVHDLALRADYEIASKEQDFFFELDAMDHLQSFIADCDRRTEVAKKRLAETQEEISAEVAAKAERVHELNEEIGKLLAKVEQLGAEGNVEESQKVMDEVEKARAKKREAEEVYRNSMPASSFQQQKLRVCEVCSAYLGLHDNDRRLADHFGGKLHLGFIEIREKLEELKRVVAEKQEKRNQERLKRREEREREEREKLRRSRSHSKNPKRSRSREHRRHRSRSMSRERKRRTRSKSREKRHRHRSRSSSRSRSRSHQRSRHSSRDRSRERSKRRSSKERFRDQDLASCDRDRSSRDRSPRDRDRKDKKRSYESANGRSEDRRSSEEREAGEI

SEQ ID NO: 12110 - protein, 391 aa, Homo sapiens
MPAYLNLQGSVRKAPHSPSRDTTRQRIKFSDDRVCKSHLLNCCPHDVLSGTRMDLGECLKVHDLALRADYEIASKEQDFFFELDAMDHLQSFIADCDRRTEVAKKRLAETQEEISAEVAAKAERVHELNEEIGKLLAKVEQLGAEGNVEESQKVMDEVEKARAKKREAEEVYRNSMPASSFQQQKLRVCEVCSAYLGLHDNDRRLADHFGGKLHLGFIEIREKLEELKRVVAEKQEKRNQERLKRREEREREEREKLRRSRSHSKNPKRSRSREHRRHRSRSMSRERKRRTRSKSREKRHRHRSRSSSRSRSRSHQRSRHSSRDRSRERSKRRSSKERFRDQDLASCDRDRSSRDRSPRDRDRKDKKRSYESANGRSEDRRSSEEREAGEI

SEQ ID NO: 12111 - protein, 389 aa, Homo sapiens
MVIHSQLKKIQGASERMGDTTRQRIKFSDDRVCKSHLLNCCPHDVLSGTRMDLGECLKVHDLALRADYEIASKEQDFFFELDAMDHLQSFIADCDRRTEVAKKRLAETQEEISAEVAAKAERVHELNEEIGKLLAKVEQLGAEGNVEESQKVMDEVEKARAKKREAEEVYRNSMPASSFQQQKLRVCEVCSAYLGLHDNDRRLADHFGGKLHLGFIEIREKLEELKRVVAEKQEKRNQERLKRREEREREEREKLRRSRSHSKNPKRSRSREHRRHRSRSMSRERKRRTRSKSREKRHRHRSRSSSRSRSRSHQRSRHSSRDRSRERSKRRSSKERFRDQDLASCDRDRSSRDRSPRDRDRKDKKRSYESANGRSEDRRSSEEREAGEI

SEQ ID NO: 12112 - protein, 117 aa, Homo sapiens
MDMMVPAQLLGLLLLWFPGSRCDIQMTQSPSSVSASVGDRVTITCRASQGISSWLAWYQQKPGKAPKLLIYAASSLQSGVPSRFSGSGSGTDFTLTISSLQPEDFATYYCQQANSFP

SEQ ID NO: 12113 - protein, 116 aa, Homo sapiens
MEAPAQLLFLLLLWLPDTTREIVMTQSPPTLSLSPGERVTLSCRASQSVSSSYLTWYQQKPGQAPRLLIYGASTRATSIPARFSGSGSGTDFTLTISSLQPEDFAVYYCQQDYNLP

SEQ ID NO: 12114 - protein, 440 aa, Homo sapiens
MGPPGSPWQWVTLLLGLLLPPAAPFWLLNVLFPPHTTPKAELSNHTRPVILVPGCLGNQLEAKLDKPDVVNWMCYRKTEDFFTIWLDLNMFLPLGVDCWIDNTRVVYNRSSGLVSNAPGVQIRVPGFGKTYSVEYLDSSKLAGYLHTLVQNLVNNGYVRDETVRAAPYDWRLEPGQQEEYYRKLAGLVEEMHAAYGKPVFLIGHSLGCLHLLYFLLRQPQAWKDRFIDGFISLGAPWGGSIKPMLVLASGDNQGIPIMSSIKLKEEQRITTTSPWMFPSRMAWPEDHVFISTPSFNYTGRDFQRFFADLHFEEGWYMWLQSRDLLAGLPAPGVEVYCLYGVGLPTPRTYIYDHGFPYTDPVGVLYEDGDDTVATRSTELCGLWQGRQPQPVHLLPLHGIQHLNMVFSNLTLEHINAILLGAYRQGPPASPTASPEPPPPE

SEQ ID NO: 12115 - protein, 456 aa, Homo sapiens
MTSSYSSSSCPLGCTMAPGARNVSVSPIDIGCQPGAEANIAPMCLLANVAHANRVRVGSTPLGRPSLCLPPTCHTACPLPGTCHIPGNIGICGAYGENTLNGHEKETMQFLNDRLANYLEKVRQLEQENAELEATLLERSKCHESTVCPDYQSYFHTIEELQQKILCSKAENARLIVQIDNAKLAADDFRIKLESERSLRQLVEADKCGTQKLLDDATLAKADLEAQQESLKEEQLSLKSNHEQEVKILRSQLGEKLRIELDIEPTIDLNRVLGEMRAQYEAMLETNRQDVEQWFQAQSEGISLQDMSCSEELQCCQSEILELRCTVNALEVERQAQHTLKDCLQNSLCEAEDRFGTELAQMQSLISNVEEQLSEIRADLERQNQEYQVLLDVKTRLENEIATYRNLLESEDCKLPCNPCSTSPSCVTAPCAPRPSCGPCTTCGPTCGASTTGSRF

SEQ ID NO: 12116 - protein, 600 aa, Homo sapiens
MSCRSYRVSSGHRVGNFSSCSAMTPQNLNRFRANSVSCWSGPGFRGLGSFGSRSVITFGSYSPRIAAVGSRPIHCGVRFGAGCGMGFGDGRGVGLGPRADSCVGLGFGAGSGIGYGFGGPGFGYRVGGVGVPAAPSITAVTVNKSLLTPLNLEIDPNAQRVKKDEKEQIKTLNNKFASFIDKVRFLEQQNKLLETKWSFLQEQKCIRSNLEPLFESYITNLRRQLEVLVSDQARLQAERNHLQDVLEGFKKKYEEEVVCRANAENEFVALKKDVDAAFMNKSDLEANVDTLTQEIDFLKTLYMEEIQLLQSHISETSVIVKMDNSRDLNLDGIIAEVKAQYEEVARRSRADAEAWYQTKYEEMQVTAGQHCDNLRNIRNEINELTRLIQRLKAEIEHAKAQRAKLEAAVAEAEQQGEATLSDAKCKLADLECALQQAKQDMARQLCEYQELMNAKLGLDIEIATYRRLLEGEESRLCEGVGPVNISVSSSRGGLVCGPEPLVAGSTLSRGGVTFSGSSSVCATSGVLASCGPSLGGARVAPATGDLLSTGTRSGSMLISEACVPSVPCPLPTQGGFSSCSGGRSSSVRFVSTTTSCRTKY

SEQ ID NO: 12117 - protein, 525 aa, Homo sapiens
MRRRRRRDGFYPAPDFRDREAEDMAGVFDIDLDQPEDAGSEDELEEGGQLNESMDHGGVGPYELGMEHCEKFEISETSVNRGPEKIRPECFELLRVLGKGGYGKVFQVRKVTGANTGKIFAMKVLKKAMIVRNAKDTAHTKAERNILEEVKHPFIVDLIYAFQTGGKLYLILEYLSGGELFMQLEREGIFMEDTACFYLAEISMALGHLHQKGIIYRDLKPENIMLNHQGHVKLTDFGLCKESIHDGTVTHTFCGTIEYMAPEILMRSGHNRAVDWWSLGALMYDMLTGAPPFTGENRKKTIDKILKCKLNLPPYLTQEARDLLKKLLKRNAASRLGAGPGDAGEVQAHPFFRHINWEELLARKVEPPFKPLLQSEEDVSQFDSKFTRQTPVDSPDDSTLSESANQVFLGFTYVAPSVLESVKEKFSFEPKIRSPRRFIGSPRTPVSPVKFSPGDFWGRGASASTANPQTPVEYPMETSGIEQMDVTMSGEASAPLPIRQPNSGPYKKQAFPMISKRPEHLRMNL

SEQ ID NO: 12118 - protein, 502 aa, Homo sapiens
MAGVFDIDLDQPEDAGSEDELEEGGQLNESMDHGGVGPYELGMEHCEKFEISETSVNRGPEKIRPECFELLRVLGKGGYGKVFQVRKVTGANTGKIFAMKVLKKAMIVRNAKDTAHTKAERNILEEVKHPFIVDLIYAFQTGGKLYLILEYLSGGELFMQLEREGIFMEDTACFYLAEISMALGHLHQKGIIYRDLKPENIMLNHQGHVKLTDFGLCKESIHDGTVTHTFCGTIEYMAPEILMRSGHNRAVDWWSLGALMYDMLTGAPPFTGENRKKTIDKILKCKLNLPPYLTQEARDLLKKLLKRNAASRLGAGPGDAGEVQAHPFFRHINWEELLARKVEPPFKPLLQSEEDVSQFDSKFTRQTPVDSPDDSTLSESANQVFLGFTYVAPSVLESVKEKFSFEPKIRSPRRFIGSPRTPVSPVKFSPGDFWGRGASASTANPQTPVEYPMETSGIEQMDVTMSGEASAPLPIRQPNSGPYKKQAFPMISKRPEHLRMNL

SEQ ID NO: 12119 - protein, 472 aa, Homo sapiens
MDHGGVGPYELGMEHCEKFEISETSVNRGPEKIRPECFELLRVLGKGGYGKVFQVRKVTGANTGKIFAMKVLKKAMIVRNAKDTAHTKAERNILEEVKHPFIVDLIYAFQTGGKLYLILEYLSGGELFMQLEREGIFMEDTACFYLAEISMALGHLHQKGIIYRDLKPENIMLNHQGHVKLTDFGLCKESIHDGTVTHTFCGTIEYMAPEILMRSGHNRAVDWWSLGALMYDMLTGAPPFTGENRKKTIDKILKCKLNLPPYLTQEARDLLKKLLKRNAASRLGAGPGDAGEVQAHPFFRHINWEELLARKVEPPFKPLLQSEEDVSQFDSKFTRQTPVDSPDDSTLSESANQVFLGFTYVAPSVLESVKEKFSFEPKIRSPRRFIGSPRTPVSPVKFSPGDFWGRGASASTANPQTPVEYPMETSGIEQMDVTMSGEASAPLPIRQPNSGPYKKQAFPMISKRPEHLRMNL

SEQ ID NO: 12120 - protein, 502 aa, Homo sapiens
MRRRRRRDGFYPAPDFRDREAEDMAGVFDIDLDQPEDAGSEDELEEGGQLNESMDHGGVGPYELGMEHCEKFEISETSVNRGPEKIRPECFELLRVLGKGGYGKAMIVRNAKDTAHTKAERNILEEVKHPFIVDLIYAFQTGGKLYLILEYLSGGELFMQLEREGIFMEDTACFYLAEISMALGHLHQKGIIYRDLKPENIMLNHQGHVKLTDFGLCKESIHDGTVTHTFCGTIEYMAPEILMRSGHNRAVDWWSLGALMYDMLTGAPPFTGENRKKTIDKILKCKLNLPPYLTQEARDLLKKLLKRNAASRLGAGPGDAGEVQAHPFFRHINWEELLARKVEPPFKPLLQSEEDVSQFDSKFTRQTPVDSPDDSTLSESANQVFLGFTYVAPSVLESVKEKFSFEPKIRSPRRFIGSPRTPVSPVKFSPGDFWGRGASASTANPQTPVEYPMETSGIEQMDVTMSGEASAPLPIRQPNSGPYKKQAFPMISKRPEHLRMNL

SEQ ID NO: 12121 - protein, 451 aa, Homo sapiens
MRRRRRRDGFYPAPDFRDREAEDMAGVFDIDLDQPEDAGSEDELEEGGQLNESMDHGGVGPYELGMEHCEKFEISETSVNRGPEKIRPECFELLRVLGKGGYGKVFQVRKVTGANTGKIFAMKVLKKAMIVRNAKDTAHTKAERNILEEVKHPFIVDLIYAFQTGGKLYLILEYLSGGELFMQLEREGIFMEDTACFYLAEISMALGHLHQKGIIYRDLKPENIMLNHQGHVKLTDFGLCKESIHDGTVTHTFCGTIEYMAPEILMRSGHNRAVDWWSLGALMYDMLTGAPPFTGENRKKTIDKILKCKLNLPPYLTQEARDLLKKLLKRNAASRLGAGPGDAGEVQAHPFFRHINWEELLARKVEPPFKPLLQSEEDVSQFDSKFTRQTPVDSPDDSTLSESANQVFLGFTYVAPSVLESVKEKFSFEPKIRSPRRFIGSPRTPVSTAMC

SEQ ID NO: 12122 - protein, 410 aa, Homo sapiens
MGAVSCRQGQHTQQGEHTRVAVPHKQGGNIRGPWARGWKSLWTGLGTIRSDLEELWELRGHHYLHQESLKPAPVLVEKPLPEWPVPQFINLFLPEFPIRPIRGQQQLKILGLVAKGSFGTVLKVLDCTQKAVFAVKVVPKVKVLQRDTVRQCKEEVSIQRQINHPFVHSLGDSWQGKRHLFIMCSYCSTDLYSLWSAVGCFPEASIRLFAAELVLVLCYLHDLGIMHRDVKVENILLDERGHLKLTDFGLSRHVPQGAQAYTICGTLQYMAPEVLSGGPYNHAADWWSLGVLLFSLATGKFPVAAERDHVAMLASVTHSDSEIPASLNQGLSLLLHELLCQNPLHRLRYLHHFQVHPFFRGVAFDPELLQKQPVNFVTETQATQPSSAETMPFDDFDCDLESFLLYPIPA

SEQ ID NO: 12123 - protein, 171 aa, Homo sapiens
MGAVSCRQGQHTQQGEHTRVAVPHKQGGNIRGPWARGWKSLWTGLGTIRSDLEELWELRGHHYLHQESLKPAPVLVEKPLPEWPVPQFINLFLPEFPIRPIRGQQQLKILGLVAKGSFGTVLKVLDCTQKAVFAVKVVPKVKVLQRDTVRQCKEEVSIQVISMTWASCIEM

SEQ ID NO: 12124 - protein, 274 aa, Homo sapiens
MGAVSCRQGQHTQQGEHTRVAVPHKQGGNIRGPWARGWKSLWTGLGTIRSDLEELWELRGHHYLHQESLKPAPVLVEKPLPEWPVPQFINLFLPEFPIRPIRGQQQLKILGLVAKGSFGTVLKVLDCTQKAVFAVKVVPKVKVLQRDTVRQCKEEVSIQRQINHPFVHSLGDSWQGKRHLFIMCSYCSTDLYSLWSAVGCFPEASIRLFAAELVLVLCYLHDLGIMHRDVKVENILLDERGHLKLTDFGLSRHVPQGAQAYTICGTLQYMGERG

SEQ ID NO: 12125 - protein, 655 aa, Homo sapiens
MATPVVTKTAWKLQEIVAHASNVSSLVLGKASGRLLATGGDDCRVNLWSINKPNCIMSLTGHTSPVESVRLNTPEELIVAGSQSGSIRVWDLEAAKILRTLMGHKANICSLDFHPYGEFVASGSQDTNIKLWDIRRKGCVFRYRGHSQAVRCLRFSPDGKWLASAADDHTVKLWDLTAGKMMSEFPGHTGPVNVVEFHPNEYLLASGSSDRTIRFWDLEKFQVVSCIEGEPGPVRSVLFNPDGCCLYSGCQDSLRVYGWEPERCFDVVLVNWGKVADLAICNDQLIGVAFSQSNVSSYVVDLTRVTRTGTVARDPVQDHRPLAQPLPNPSAPLRRIYERPSTTCSKPQRVKQNSESERRSPSSEDDRDERESRAEIQNAEDYNEIFQPKNSISRTPPRRSEPFPAPPEDDAATAKEAAKPSPAMDVQFPVPNLEVLPRPPVVASTPAPKAEPAIIPATRNEPIGLKASDFLPAVKIPQQAELVDEDAMSQIRKGHDTMCVVLTSRHKNLDTVRAVWTMGDIKTSVDSAVAINDLSVVVDLLNIVNQKASLWKLDLCTTVLPQIEKLLQSKYESYVQTGCTSLKLILQRFLPLITDMLAAPPSVGVDISREERLHKCRLCYKQLKSISGLVKSKSGLSGRHGSTFRELHLLMASLD

SEQ ID NO: 12126 - protein, 594 aa, Homo sapiens
MAANMYRVGDYVYFENSSSNPYLIRRIEELNKTASGNVEAKVVCFYRRRDISNTLIMLADKHAKEIEEESETTVEADLTDKQKHQLKHRELFLSRQYESLPATHIRGKCSVALLNETESVLSYLDKEDTFFYSLVYDPSLKTLLADKGEIRVGPRYQADIPEMLLEGESDEREQSKLEVKVWDPNSPLTDRQIDQFLVVARAVGTFARALDCSSSVRQPSLHMSAAAASRDITLFHAMDTLYRHSYDLSSAISVLVPLGGPVLCRDEMEEWSASEASLFEEALEKYGKDFNDIRQDFLPWKSLTSIIEYYYMWKTTDRYVQQKRLKAAEAESKLKQVYIPTYSKPNPNQISTSNGKPGAVNGAVGTTFQPQNPLLGRACESCYATQSHQWYSWGPPNMQCRLCAICWLYWKKYGGLKMPTQSEEEKLSPSPTTEDPRVRSHVSRQAMQGMPVRNTGSPKSAVKTRQAFFLHTTYFTKFARQVCKNTLRLRQAARRPFVAINYAAIRAEYADRHAELSGSPLKSKSTRKPLACIIGYLEIHPAKKPNVIRSTPSLQTPTTKRMLTTPNHTSLSILGKRNYSHHNGLDELTCCVSD

SEQ ID NO: 12127 - protein, 515 aa, Homo sapiens
MAANMYRVGDYVYFENSSSNPYLIRRIEELNKTASGNVEAKVVCFYRRRDISNTLIMLADKHAKEIEEESETTVEADLTDKQKHQLKHRELFLSRQYESLPATHIRGKCSVALLNETESVLSYLDKEDTFFYSLVYDPSLKTLLADKGEIRVGPRYQADIPEMLLEGESDEREQSKLEVKVWDPNSPLTDRQIDQFLVVARAVGTFARALDCSSSVRQPSLHMSAAAASRDITLFHAMDTLYRHSYDLSSAISVLVPLGGPVLCRDEMEEWSASEASLFEEALEKYGKDFNDIRQDFLPWKSLTSIIEYYYMWKTTDRYVQQKRLKAAEAESKLKQVYIPTYSKPNPNQISTSNGKPGAVNGAVGTTFQPQNPLLGRACESCYATQSHQWYSWGPPNMQCRLCAICWLYWKKYGGLKMPTQSEEEKLSPSPTTEDPRVRSHVSRQAMQGMPVRNTGSPKSAVKTRQAFFLHTTYFTKFARQVCKNTLRLRQAARRPFVAINYAAIRAECKMLLNS

SEQ ID NO: 12128 - protein, 745 aa, Homo sapiens
MLPFAPQDEPWDREMEVFSGGGASSGEVNGLKMVDEPMEEGEADSCHDEGVVKEIPITHHVKEGYEKADPAQFELLKVLGQGSFGKVFLVRKKTGPDAGQLYAMKVLKKASLKVRDRVRTKMERDILVEVNHPFIVKLHYAFQTEGKLYLILDFLRGGDVFTRLSKEVLFTEEDVKFYLAELALALDHLHQLGIVYRDLKPENILLDEIGHIKLTDFGLSKESVDQEKKAYSFCGTVEYMAPEVVNRRGHSQSADWWSYGVLMFEMLTGTLPFQGKDRNETMNMILKAKLGMPQFLSAEAQSLLRMLFKRNPANRLGSEGVEEIKRHLFFANIDWDKLYKREVQPPFKPASGKPDDTFCFDPEFTAKTPKDSPGLPASANAHQLFKGFSFVATSIAEEYKITPITSANVLPIVQINGNAAQFGEVYELKEDIGVGSYSVCKRCIHATTNMEFAVKIIDKSKRDPSEEIEILMRYGQHPNIITLKDVFDDGRYVYLVTDLMKGGELLDRILKQKCFSEREASDILYVISKTVDYLHCQGVVHRDLKPSNILYMDESASADSIRICDFGFAKQLRGENGLLLTPCYTANFVAPEVLMQQGYDAACDIWSLGVLFYTMLAGYTPFANGPNDTPEEILLRIGNGKFSLSGGNWDNISDGAKDLLSHMLHMDPHQRYTAEQILKHSWITHRDQLPNDQPKRNDVSHVVKGAMVATYSALTHKTFQPVLEPVAASSLAQRRSMKKRTSTGL

SEQ ID NO: 12129 - protein, 745 aa, Homo sapiens
MGLSTSAIWKNTRVEIVNPYEVKRKVKVNGLKMVDEPMEEGEADSCHDEGVVKEIPITHHVKEGYEKADPAQFELLKVLGQGSFGKVFLVRKKTGPDAGQLYAMKVLKKASLKVRDRVRTKMERDILVEVNHPFIVKLHYAFQTEGKLYLILDFLRGGDVFTRLSKEVLFTEEDVKFYLAELALALDHLHQLGIVYRDLKPENILLDEIGHIKLTDFGLSKESVDQEKKAYSFCGTVEYMAPEVVNRRGHSQSADWWSYGVLMFEMLTGTLPFQGKDRNETMNMILKAKLGMPQFLSAEAQSLLRMLFKRNPANRLGSEGVEEIKRHLFFANIDWDKLYKREVQPPFKPASGKPDDTFCFDPEFTAKTPKDSPGLPASANAHQLFKGFSFVATSIAEEYKITPITSANVLPIVQINGNAAQFGEVYELKEDIGVGSYSVCKRCIHATTNMEFAVKIIDKSKRDPSEEIEILMRYGQHPNIITLKDVFDDGRYVYLVTDLMKGGELLDRILKQKCFSEREASDILYVISKTVDYLHCQGVVHRDLKPSNILYMDESASADSIRICDFGFAKQLRGENGLLLTPCYTANFVAPEVLMQQGYDAACDIWSLGVLFYTMLAGYTPFANGPNDTPEEILLRIGNGKFSLSGGNWDNISDGAKDLLSHMLHMDPHQRYTAEQILKHSWITHRDQLPNDQPKRNDVSHVVKGAMVATYSALTHKTFQPVLEPVAASSLAQRRSMKKRTSTGL

SEQ ID NO: 12130 - protein, 1137 aa, Homo sapiens
MSRRKPASGGLAASSSAPARQAVLSRFFQSTGSLKSTSSSTGAADQVDPGAAAAAAAAAAAAPPAPPAPAFPPQLPPHIATEIDRRKKRPLENDGPVKKKVKKVQQKEGGSDLGMSGNSEPKKCLRTRNVSKSLEKLKEFCCDSALPQSRVQTESLQERFAVLPKCTDFDDISLLHAKNAVSSEDSKRQINQKDTTLFDLSQFGSSNTSHENLQKTASKSANKRSKSIYTPLELQYIEMKQQHKDAVLCVECGYKYRFFGEDAEIAARELNIYCHLDHNFMTASIPTHRLFVHVRRLVAKGYKVGVVKQTETAALKAIGDNRSSLFSRKLTALYTKSTLIGEDVNPLIKLDDAVNVDEIMTDTSTSYLLCISENKENVRDKKKGNIFIGIVGVQPATGEVVFDSFQDSASRSELETRMSSLQPVELLLPSALSEQTEALIHRATSVSVQDDRIRVERMDNIYFEYSHAFQAVTEFYAKDTVDIKGSQIISGIVNLEKPVICSLAAIIKYLKEFNLEKMLSKPENFKQLSSKMEFMTINGTTLRNLEILQNQTDMKTKGSLLWVLDHTKTSFGRRKLKKWVTQPLLKLREINARLDAVSEVLHSESSVFGQIENHLRKLPDIERGLCSIYHKKCSTQEFFLIVKTLYHLKSEFQAIIPAVNSHIQSDLLRTVILEIPELLSPVEHYLKILNEQAAKVGDKTELFKDLSDFPLIKKRKDEIQGVIDEIRMHLQEIRKILKNPSAQYVTVSGQEFMIEIKNSAVSCIPTDWVKVGSTKAVSRFHSPFIVENYRHLNQLREQLVLDCSAEWLDFLEKFSEHYHSLCKAVHHLATVDCIFSLAKVAKQGDYCRPTVQEERKIVIKNGRHPVIDVLLGEQDQYVPNNTDLSEDSERVMIITGPNMGGKSSYIKQVALITIMAQIGSYVPAEEATIGIVDGIFTRMGAADNIYKGQSTFMEELTDTAEIIRKATSQSLVILDELGRGTSTHDGIAIAYATLEYFIRDVKSLTLFVTHYPPVCELEKNYSHQVGNYHMGFLVSEDESKLDPGAAEQVPDFVTFLYQITRGIAARSYGLNVAKLADVPGEILKKAAHKSKELEGLINTKRKRLKYFAKLWTMHNAQDLQKWTEEFNMEETQTSLLH

SEQ ID NO: 12131 - protein, 894 aa, Homo sapiens
MILLAVLFLCFISSYSASVKGHTTGLSLNNDRLYKLTYSTEVLLDRGKGKLQDSVGYRISSNVDVALLWRNPDGDDDQLIQITMKDVNVENVNQQRGEKSIFKGKSPSKIMGKENLEALQRPTLLHLIHGKVKEFYSYQNEAVAIENIKRGLASLFQTQLSSGTTNEVDISGNCKVTYQAHQDKVIKIKALDSCKIARSGFTTPNQVLGVSSKATSVTTYKIEDSFVIAVLAEETHNFGLNFLQTIKGKIVSKQKLELKTTEAGPRLMSGKQAAAIIKAVDSKYTAIPIVGQVFQSHCKGCPSLSELWRSTRKYLQPDNLSKAEAVRNFLAFIQHLRTAKKEEILQILKMENKEVLPQLVDAVTSAQTSDSLEAILDFLDFKSDSSIILQERFLYACGFASHPNEELLRALISKFKGSIGSSDIRETVMIITGTLVRKLCQNEGCKLKAVVEAKKLILGGLEKAEKKEDTRMYLLALKNALLPEGIPSLLKYAEAGEGPISHLATTALQRYDLPFITDEVKKTLNRIYHQNRKVHEKTVRTAAAAIILNNNPSYMDVKNILLSIGELPQEMNKYMLAIVQDILRFEMPASKIVRRVLKEMVAHNYDRFSRSGSSSAYTGYIERSPRSASTYSLDILYSGSGILRRSNLNIFQYIGKAGLHGSQVVIEAQGLEALIAATPDEGEENLDSYAGMSAILFDVQLRPVTFFNGYSDLMSKMLSASGDPISVVKGLILLIDHSQELQLQSGLKANIEVQGGLAIDISGAMEFSLWYRESKTRVKNRVTVVITTDITVDSSFVKAGLETSTETEAGLEFISTVQFSQYPFLVCMQMDKDEAPFRQFEKKYERLSTGRGYVSQKRKESVLAGCEFPLHQENSEMCKVVFAPQPDSTSSGWF

SEQ ID NO: 12132 - protein, 151 aa, Homo sapiens
MILLAVLFLCFISSYSASVKGHTTGLSLNNDRLYKLTYSTEVLLDRGKGKLQDSVGYRISSNVDVALLWRNPDGDDDQLIQITMKDVNVENVNQQRGEKSIFKGKSPSKIMGKENLEALQRPTLLHLIHGKVKGRLDSTTFSPTSYFSSLQ

SEQ ID NO: 12133 - protein, 526 aa, Homo sapiens
MPAVSGPGPLFCLLLLLLDPHSPETGCPPLRRFEYKLSFKGPRLALPGAGIPFWSHHGDAILGLEEVRLTPSMRNRSGAVWSRASVPFSAWEVEVQMRVTGLGRRGAQGMAVWYTRGRGHVGSVLGGLASWDGIGIFFDSPAEDTQDSPAIRVLASDGHIPSEQPGDGASQGLGSCHWDFRNRPHPFRARITYWGQRLRMSLNSGLTPSDPGEFCVDVGPLLLVPGGFFGVSAATGTLADDHDVLSFLTFSLSEPSPEVPPQPFLEMQQLRLARQLEGLWARLGLGTREDVTPKSDSEAQGEGERLFDLEETLGRHRRILQALRGLSKQLAQAERQWKKQLGPPGQARPDGGWALDASCQIPSTPGRGGHLSMSLNKDSAKVGALLHGQWTLLQALQEMRDAAVRMAAEAQVSYLPVGIEHHFLELDHILGLLQEELRGPAKAAAKAPRPPGQPPRASSCLQPGIFLFYLLIQTVGFFGYVHFRQELNKSLQECLSTGSLPLGPAPHTPRALGILRRQPLPASMPA

SEQ ID NO: 12134 - protein, 514 aa, Homo sapiens
MPAVSGPGPLFCLLLLLLDPHSPETGCPPLRRFEYKLSFKGPRLALPGAGIPFWSHHGDAILGLEEVRLTPSMRNRSGAVWSRASVPFSAWEVEVQMRVTGLGRRGAQGMAVWYTRGRGHVGSVLGGLASWDGIGIFFDSPAEDTQDSPAIRVLASDGHIPSEQPGDGASQGLGSCHWDFRNRPHPFRARITYWGQRLRMSLNSGLTPSDPGEFCVDVGPLLLVPGGFFGVSAATGTLAGEDPTGQVPPQPFLEMQQLRLARQLEGLWARLGLGTREDVTPKSDSEAQGEGERLFDLEETLGRHRRILQALRGLSKQLAQAERQWKKQLGPPGQARPDGGWALDASCQIPSTPGRGGHLSMSLNKDSAKVGALLHGQWTLLQALQEMRDAAVRMAAEAQVSYLPVGIEHHFLELDHILGLLQEELRGPAKAAAKAPRPPGQPPRASSCLQPGIFLFYLLIQTVGFFGYVHFRQELNKSLQECLSTGSLPLGPAPHTPRALGILRRQPLPASMPA

SEQ ID NO: 12135 - protein, 959 aa, Homo sapiens
MAASTGYVRLWGAARCWVLRRPMLAAAGGRVPTAAGAWLLRGQRTCDASPPWALWGRGPAIGGQWRGFWEASSRGGGAFSGGEDASEGGAEEGAGGAGGSAGAGEGPVITALTPMTIPDVFPHLPLIAITRNPVFPRFIKIIEVKNKKLVELLRRKVRLAQPYVGVFLKRDDSNESDVVESLDEIYHTGTFAQIHEMQDLGDKLRMIVMGHRRVHISRQLEVEPEEPEAENKHKPRRKSKRGKKEAEDELSARHPAELAMEPTPELPAEVLMVEVENVVHEDFQVTEEVKALTAEIVKTIRDIIALNPLYRESVLQMMQAGQRVVDNPIYLSDMGAALTGAESHELQDVLEETNIPKRLYKALSLLKKEFELSKLQQRLGREVEEKIKQTHRKYLLQEQLKIIKKELGLEKDDKDAIEEKFRERLKELVVPKHVMDVVDEELSKLGLLDNHSSEFNVTRNYLDWLTSIPWGKYSNENLDLARAQAVLEEDHYGMEDVKKRILEFIAVSQLRGSTQGKILCFYGPPGVGKTSIARSIARALNREYFRFSVGGMTDVAEIKGHRRTYVGAMPGKIIQCLKKTKTENPLILIDEVDKIGRGYQGDPSSALLELLDPEQNANFLDHYLDVPVDLSKVLFICTANVTDTIPEPLRDRMEMINVSGYVAQEKLAIAERYLVPQARALCGLDESKAKLSSDVLTLLIKQYCRESGVRNLQKQVEKVLRKSAYKIVSGEAESVEVTPENLQDFVGKPVFTVERMYDVTPPGVVMGLAWTAMGGSTLFVETSLRRPQDKDAKGDKDGSLEVTGQLGEVMKESARIAYTFARAFLMQHAPANDYLVTSHIHLHVPEGATPKDGPSAGCTIVTALLSLAMGRPVRQNLAMTGEVSLTGKILPVGGIKEKTIAAKRAGVTCIVLPAENKKDFYDLAAFITEGLEVHFVEHYREIFDIAFPDEQAEALAVER

SEQ ID NO: 12136 - protein, 895 aa, Homo sapiens
MAASTGYVRLWGAARCWVLRRPMLAAAGGRVPTAAGAWLLRGPVITALTPMTIPDVFPHLPLIAITRNPVFPRFIKIIEVKNKKLVELLRRKVRLAQPYVGVFLKRDDSNESDVVESLDEIYHTGTFAQIHEMQDLGDKLRMIVMGHRRVHISRQLEVEPEEPEAENKHKPRRKSKRGKKEAEDELSARHPAELAMEPTPELPAEVLMVEVENVVHEDFQVTEEVKALTAEIVKTIRDIIALNPLYRESVLQMMQAGQRVVDNPIYLSDMGAALTGAESHELQDVLEETNIPKRLYKALSLLKKEFELSKLQQRLGREVEEKIKQTHRKYLLQEQLKIIKKELGLEKDDKDAIEEKFRERLKELVVPKHVMDVVDEELSKLGLLDNHSSEFNVTRNYLDWLTSIPWGKYSNENLDLARAQAVLEEDHYGMEDVKKRILEFIAVSQLRGSTQGKILCFYGPPGVGKTSIARSIARALNREYFRFSVGGMTDVAEIKGHRRTYVGAMPGKIIQCLKKTKTENPLILIDEVDKIGRGYQGDPSSALLELLDPEQNANFLDHYLDVPVDLSKVLFICTANVTDTIPEPLRDRMEMINVSGYVAQEKLAIAERYLVPQARALCGLDESKAKLSSDVLTLLIKQYCRESGVRNLQKQVEKVLRKSAYKIVSGEAESVEVTPENLQDFVGKPVFTVERMYDVTPPGVVMGLAWTAMGGSTLFVETSLRRPQDKDAKGDKDGSLEVTGQLGEVMKESARIAYTFARAFLMQHAPANDYLVTSHIHLHVPEGATPKDGPSAGCTIVTALLSLAMGRPVRQNLAMTGEVSLTGKILPVGGIKEKTIAAKRAGVTCIVLPAENKKDFYDLAAFITEGLEVHFVEHYREIFDIAFPDEQAEALAVER

SEQ ID NO: 12137 - protein, 763 aa, Homo sapiens
MQDLGDKLRMIVMGHRRVHISRQLEVEPEEPEAENKHKPRRKSKRGKKEAEDELSARHPAELAMEPTPELPAEVLMVEVENVVHEDFQVTEEVKALTAEIVKTIRDIIALNPLYRESVLQMMQAGQRVVDNPIYLSDMGAALTGAESHELQDVLEETNIPKRLYKALSLLKKEFELSKLQQRLGREVEEKIKQTHRKYLLQEQLKIIKKELGLEKDDKDAIEEKFRERLKELVVPKHVMDVVDEELSKLGLLDNHSSEFNVTRNYLDWLTSIPWGKYSNENLDLARAQAVLEEDHYGMEDVKKRILEFIAVSQLRGSTQGKILCFYGPPGVGKTSIARSIARALNREYFRFSVGGMTDVAEIKGHRRTYVGAMPGKIIQCLKKTKTENPLILIDEVDKIGRGYQGDPSSALLELLDPEQNANFLDHYLDVPVDLSKVLFICTANVTDTIPEPLRDRMEMINVSGYVAQEKLAIAERYLVPQARALCGLDESKAKLSSDVLTLLIKQYCRESGVRNLQKQVEKVLRKSAYKIVSGEAESVEVTPENLQDFVGKPVFTVERMYDVTPPGVVMGLAWTAMGGSTLFVETSLRRPQDKDAKGDKDGSLEVTGQLGEVMKESARIAYTFARAFLMQHAPANDYLVTSHIHLHVPEGATPKDGPSAGCTIVTALLSLAMGRPVRQNLAMTGEVSLTGKILPVGGIKEKTIAAKRAGVTCIVLPAENKKDFYDLAAFITEGLEVHFVEHYREIFDIAFPDEQAEALAVER

SEQ ID NO: 12138 - protein, 695 aa, Homo sapiens
MSGAALGLEIVFVFFLALFLLHRYGDFKKQHRLVIIGTLLAWYLCFLIVFILPLDVSTTIYNRCKHAAANSSPPENSNITGLYATANPVPSQHPCFKPWSYIPDGIMPIFWRVVYWTSQFLTWILLPFMQSYARSGGFSITGKIKTALIENAIYYGTYLLIFGAFLIYVAVNPHLHLEWNQLQTIGIAAANTWGLFLLVLLLGYGLVEIPRSYWNGAKRGYLLMKTYFKAAKLMTEKADAEENLEDAMEEVRKVNESIKYNHPLRKCVDTILKKCPTEYQEKMGRNMDDYEDFDEKHSIYPSEKSLVKLHKQVIYSVQRHRRTQVQWQILLEQAFYLEDVAKNETSATHQFVHTFQSPEPENRFIQYFYNPTFEWYWECLLRPWFYKILAVVLSIFSVIVVWSECTFFSTTPVLSLFAVFIQLAEKTYNYIYIEIACFLSIFFLSICVYSTVFRIRVFNYYYLASHHQTDAYSLLFSGMLFCRLTPPLCLNFLGLTHMDSSISHKNTQPTAYTSIMGSMKVLSFIADGFYIYYPMLVVILCIATYFSLGTRCLNLLGFQQFMGDDDMTSDLVNEGKELIRKEKRKRQRQEEGENRRREWKERYGHNREDSTRNRNIHTDPKESNFSDVNTNRSAFKYTRANNRTERDRIELLQDAEPLDFNAETFTDDPLESESGRYQPGGRYLSMSRSDIFNDV

SEQ ID NO: 12139 - protein, 840 aa, Homo sapiens
MHLVAGDSPGSGPHLPATAFIIPASSATLGLPSSALDVSCFPREPIHVGAPEQVAGCEPVSATVLPQLSAGPASSSTSTVRLLEWTEAAAPPPGGGLRFRISEYKPLNMAGVEQPPSPELRQEGVTEYEDGGAPAGDGEAGPQQAEDHPQNPPEDPNQDPPEDDSTCQCQACGPHQAAGPDLGSSNDGCPQLFQERSVIVENSSGSTSASELLKPMKKRKRREYQSPSEEESEPEAMEKQEEGKDPEGQPTASTPESEEWSSSQPATGEKKECWSWESYLEEQKAITAPVSLFQDSQAVTHNKNGFKLGMKLEGIDPQHPSMYFILTVAEVCGYRLRLHFDGYSECHDFWVNANSPDIHPAGWFEKTGHKLQPPKGYKEEEFSWSQYLRSTRAQAAPKHLFVSQSHSPPPLGFQVGMKLEAVDRMNPSLVCVASVTDVVDSRFLVHFDNWDDTYDYWCDPSSPYIHPVGWCQKQGKPLTPPQDYPDPDNFCWEKYLEETGASAVPTWAFKVRPPHSFLVNMKLEAVDRRNPALIRVASVEDVEDHRIKIHFDGWSHGYDFWIDADHPDIHPAGWCSKTGHPLQPPLGPREPSSASPGGCPPLSYRSLPHTRTSKYSFHHRKCPTPGCDGSGHVTGKFTAHHCLSGCPLAERNQSRLKAELSDSEASARKKNLSGFSPRKKPRHHGRIGRPPKYRKIPQEDFQTLTPDVVHQSLFMSALSAHPDRSLSVCWEQHCKLLPGVAGISASTVAKWTIDEVFGFVQTLTGCEDQARLFKDEARIVRVTHVSGKTLVWTVAQLGDLVCSDHLQEGKGILETGVHSLLCSLPTHLLAKLSFASDSQY

SEQ ID NO: 12140 - protein, 772 aa, Homo sapiens
MRRREGHGTDSEMGQGPVRESQSSDPPALQFRISEYKPLNMAGVEQPPSPELRQEGVTEYEDGGAPAGDGEAGPQQAEDHPQNPPEDPNQDPPEDDSTCQCQACGPHQAAGPDLGSSNDGCPQLFQERSVIVENSSGSTSASELLKPMKKRKRREYQSPSEEESEPEAMEKQEEGKDPEGQPTASTPESEEWSSSQPATGEKKECWSWESYLEEQKAITAPVSLFQDSQAVTHNKNGFKLGMKLEGIDPQHPSMYFILTVAEVCGYRLRLHFDGYSECHDFWVNANSPDIHPAGWFEKTGHKLQPPKGYKEEEFSWSQYLRSTRAQAAPKHLFVSQSHSPPPLGFQVGMKLEAVDRMNPSLVCVASVTDVVDSRFLVHFDNWDDTYDYWCDPSSPYIHPVGWCQKQGKPLTPPQDYPDPDNFCWEKYLEETGASAVPTWAFKVRPPHSFLVNMKLEAVDRRNPALIRVASVEDVEDHRIKIHFDGWSHGYDFWIDADHPDIHPAGWCSKTGHPLQPPLGPREPSSASPGGCPPLSYRSLPHTRTSKYSFHHRKCPTPGCDGSGHVTGKFTAHHCLSGCPLAERNQSRLKAELSDSEASARKKNLSGFSPRKKPRHHGRIGRPPKYRKIPQEDFQTLTPDVVHQSLFMSALSAHPDRSLSVCWEQHCKLLPGVAGISASTVAKWTIDEVFGFVQTLTGCEDQARLFKDEARIVRVTHVSGKTLVWTVAQLGDLVCSDHLQEGKGILETGVHSLLCSLPTHLLAKLSFASDSQY

SEQ ID NO: 12141 - protein, 738 aa, Homo sapiens
MRRREGHGTDSEMGQGPVRESQSSDPPALQFRISEYKPLNMAGVEQPPSPELRQEGVTEYEDGGAPAGDGEAGPQQAEDHPQNPPEDPNQDPPEDDSTCQCQACGPHQAAGPDLGSSNDGCPQLFQERSVIVENSSGSTSASELLKPMKKRKRREYQSPSEEESEPEAMEKQEEGKDPEGQPTASTPESEEWSSSQPATGEKKECWSWESYLEEQKAITAPVSLFQDSQAVTHNKNGFKLGMKLEGIDPQHPSMYFILTVAEVCGYRLRLHFDGYSECHDFWVNANSPDIHPAGWFEKTGHKLQPPKGYKEEEFSWSQYLRSTRAQAAPKHLFVSQSHSPPPLGFQVGMKLEAVDRMNPSLVCVASVTDVVDSRFLVHFDNWDDTYDYWCDPSSPYIHPVGWCQKQGKPLTPPQDYPDPDNFCWEKYLEETGASAVPTWAFKVRPPHSFLVNMKLEAVDRRNPALIRVASVEDVEDHRIKIHFDGWSHGYDFWIDADHPDIHPAGWCSKTGHPLQPPLGPREPSSASPGGCPPLSYRSLPHTRTSKYSFHHRKCPTPGCDGSGHVTGKFTAHHCLSGCPLAERNQSRLKAELSDSEASARKKNLSGFSPRKKPRHHGRIGRPPKYRKIPQEDFQTLTPDVVHQSLFMSALSAHPDRSLSVCWEQHCKLLPGVAGISASTVAKWTIDEVFGFVQTLTGCEDQARLFKDEVRCKCRVGDRAGVTVLKTAGSRCPPQRHFC

SEQ ID NO: 12142 - protein, 390 aa, Homo sapiens
MKLEAVDRMNPSLVCVASVTDVVDSRFLVHFDNWDDTYDYWCDPSSPYIHPVGWCQKQGKPLTPPQDYPDPDNFCWEKYLEETGASAVPTWAFKVRPPHSFLVNMKLEAVDRRNPALIRVASVEDVEDHRIKIHFDGWSHGYDFWIDADHPDIHPAGWCSKTGHPLQPPLGPREPSSASPGGCPPLSYRSLPHTRTSKYSFHHRKCPTPGCDGSGHVTGKFTAHHCLSGCPLAERNQSRLKAELSDSEASARKKNLSGFSPRKKPRHHGRIGRPPKYRKIPQEDFQTLTPDVVHQSLFMSALSAHPDRSLSVCWEQHCKLLPGVAGISASTVAKWTIDEVFGFVQTLTGCEDQARLFKDEVRCKCRVGDRAGVTVLKTAGSRCPPQRHFC

SEQ ID NO: 12143 - protein, 752 aa, Homo sapiens
MRRREGHGTDSEMGQGPVRESQSSDPPALQFRISEYKPLNMAGVEQPPSPELRQEGVTEYEDGGAPAGDGEAGPQQAEDHPQNPPEDPNQDPPEDDSTCQCQACGPHQAAGPDLGSSNDGCPQLFQERSVIVENSSGSTSASELLKPMKKRKRREYQSPSEEESEPEAMEKQEEGKDPEGQPTASTPESEEWSSSQPATGEKKECWSWESYLEEQKAITAPVSLFQDSQAVTHNKNGFKLGMKLEGIDPQHPSMYFILTVAEVCGYRLRLHFDGYSECHDFWVNANSPDIHPAGWFEKTGHKLQPPKGYKEEEFSWSQYLRSTRAQAAPKHLFVSQSHSPPPLGFQVGMKLEAVDRMNPSLVCVASVTDVVDSRFLVHFDNWDDTYDYWCDPSSPYIHPVGWCQKQGKPLTPPQDYPDPDNFCWEKYLEETGASAVPTWAFKVRPPHSFLVNMKLEAVDRRNPALIRVASVEDVEDHRIKIHFDGWSHGYDFWIDADHPDIHPAGWCSKTGHPLQPPLGPREPSSASPGGCPPLSYRSLPHTRTSKYSFHHRKCPTPGCDGSGHVTGKFTAHHCLSGCPLAERNQSRLKAELSDSEASARKKNLSGFSPRKKPRHHGRIGRPPKYRKIPQEDFQTLTPDVVHQSLFMSALSAHPDRSLSVCWEQHCKLLPGVAGISASTVAKWTIDEVFGFVQTLTGCEDQARLFKDEMIDGEAFLLLTQADIVKIMSVKLGPALKIYNAILMFKNADDTLK

SEQ ID NO: 12144 - protein, 490 aa, Homo sapiens
MEGQDEVSAREQHFHSQVRESTICFLLFAILYVVSYFIITRYKRKSDEQEDEDAIVNRISLFLSTFTLAVSAGAVLLLPFSIISNEILLSFPQNYYIQWLNGSLIHGLWNLASLFSNLCLFVLMPFAFFFLESEGFAGLKKGIRARILETLVMLLLLALLILGIVWVASALIDNDAASMESLYDLWEFYLPYLYSCISLMGCLLLLLCTPVGLSRMFTVMGQLLVKPTILEDLDEQIYIITLEEEALQRRLNGLSSSVEYNIMELEQELENVKTLKTKLERRKKASAWERNLVYPAVMVLLLIETSISVLLVACNILCLLVDETAMPKGTRGPGIGNASLSTFGFVGAALEIILIFYLMVSSVVGFYSLRFFGNFTPKKDDTTMTKIIGNCVSILVLSSALPVMSRTLGITRFDLLGDFGRFNWLGNFYIVLSYNLLFAIVTTLCLVRKFTSAVREELFKALGLHKLHLPNTSRDSETAKPSVNGHQKAL

SEQ ID NO: 12145 - protein, 228 aa, Homo sapiens
MEGQDEVSAREQHFHSQVRESTICFLLFAILYVVSYFIITRYKRKSDEQEDEDAIVNRISLFLSTFTLAVSAGAVLLLPFSIISNEILLSFPQNYYIQWLNGSLIHGLWNLASLFSNLCLFVLMPFAFFFLESEGFAGLKKGIRARILETLVMLLLLALLILGIVWVASALIDNDAASMESLYDLWEFYLPYLYSCISLMGCLLLHLPNTSRDSETAKPSVNGHQKAL

SEQ ID NO: 12146 - protein, 531 aa, Homo sapiens
MEGQDEVSAREQHFHSQVRESTICFLLFAILYVVSYFIITRYKRKSDEQEDEDAIVNRISLFLSTFTLAVSAGAVLLLPFSIISNEILLSFPQNYYIQWLNGSLIHGLWNLASLFSNLCLFVLMPFAFFFLESEGFAGLKKGIRARILETLVMLLLLALLILGIVWVASALIDNDAASMESLYDLWEFYLPYLYSCISLMGCLLLLLCTPVGLSRMFTVMGQLLVKPTILEDLDEQIYIITLEEEALQRRLNVGMLCAGNPEVATGRQVPEEQAGQLLLGKWIQEGGDMIANPRLSSSVEYNIMELEQELENVKTLKTKLERRKKASAWERNLVYPAVMVLLLIETSISVLLVACNILCLLVDETAMPKGTRGPGIGNASLSTFGFVGAALEIILIFYLMVSSVVGFYSLRFFGNFTPKKDDTTMTKIIGNCVSILVLSSALPVMSRTLGITRFDLLGDFGRFNWLGNFYIVLSYNLLFAIVTTLCLVRKFTSAVREELFKALGLHKLHLPNTSRDSETAKPSVNGHQKAL

SEQ ID NO: 12147 - protein, 127 aa, Homo sapiens
MFQAAGAAQATPSHDAKGGGSSTVQRSKSFSLRAQVKETCAACQKTVYPMERLVADKLIFHNSCFCCKHCHTKLSLGSYAALHGEFYCKPHFQQLFKSKGNYDEGFGRKQHKELWAHKEVDPGTKTA

SEQ ID NO: 12148 - protein, 223 aa, Homo sapiens
MYSSGWPAGAAEPRHGRGRELAQALGCMHGAPSQLASLSLAHCSSLKSRPELEHQASGTKDACPEPQGPSLLTLRALQELDLTACSKLTDASLAKVLQFLQLRQLSLSLLPELTDNGLVAVARGCPSLEHLALSHCSRLSDKGWAQAASSWPRLQHLNLSSCSQLIEQTLDAIGQACRQLRVLDVATCPGINMAAVRRFQAQLPQVSCVQSRFVGGADLTLTL

SEQ ID NO: 12149 - protein, 310 aa, Homo sapiens
MAAKNSSVTEFILEGLTHQPGLRIPLFFLFLGFYTVTVVGNLGLITLIGLNSHLHTPMYFFLFNLSLIDFCFSTTITPKMLMSFVSRKNIISFTGCMTQLFFFCFFVVSESFILSAMAYDRYVAICNPLLYTVTMSCQVCLLLLLGAYGMGFAGAMAHTGSIMNLTFCADNLVNHFMCDILPLLELSCNSSYMNELVVFIVVAVDVGMPIVTVFISYALILSSILHNSSTEGRSKAFSTCSSHIIVVSLFFGSGAFMYLKPLSILPLEQGKVSSLFYTIIVPVLNPLIYSLRNKDVKVALRRTLGRKIFS

SEQ ID NO: 12150 - protein, 487 aa, Homo sapiens
MLKREGKVQPYTKTLDGGWGWMIVIHFFLVNVFVMGMTKTFAIFFVVFQEEFEGTSEQIGWIGSIMSSLRFCAGPLVAIICDILGEKTTSILGAFVVTGGYLISSWATSIPFLCVTMGLLPGLGSAFLYQVAAVVTTKYFKKRLALSTAIARSGMGLTFLLAPFTKFLIDLYDWTGALILFGAIALNLVPSSMLLRPIHIKSENNSGIKDKGSSLSAHGPEAHATETHCHETEESTIKDSTTQKAGLPSKNLTVSQNQSEEFYNGPNRNRLLLKSDEESDKVISWSCKQLFDISLFRNPFFYIFTWSFLLSQLAYFIPTFHLVARAKTLGIDIMDASYLVSVAGILETVSQIISGWVADQNWIKKYHYHKSYLILCGITNLLAPLATTFPLLMTYTICFAIFAGGYLALILPVLVDLCRNSTVNRFLGLASFFAGMAVLSGPPIAGWLYDYTQTYNGSFYFSGICYLLSSVSFFFVPLAERWKNSLT

SEQ ID NO: 12151 - protein, 425 aa, Homo sapiens
MGMDDCDSFFPGPLVAIICDILGEKTTSILGAFVVTGGYLISSWATSIPFLCVTMGLLPGLGSAFLYQVAAVVTTKYFKKRLALSTAIARSGMGLTFLLAPFTKFLIDLYDWTGALILFGAIALNLVPSSMLLRPIHIKSENNSGIKDKGSSLSAHGPEAHATETHCHETEESTIKDSTTQKAGLPSKNLTVSQNQSEEFYNGPNRNRLLLKSDEESDKVISWSCKQLFDISLFRNPFFYIFTWSFLLSQLAYFIPTFHLVARAKTLGIDIMDASYLVSVAGILETVSQIISGWVADQNWIKKYHYHKSYLILCGITNLLAPLATTFPLLMTYTICFAIFAGGYLALILPVLVDLCRNSTVNRFLGLASFFAGMAVLSGPPIAGWLYDYTQTYNGSFYFSGICYLLSSVSFFFVPLAERWKNSLT

SEQ ID NO: 12152 - protein, 319 aa, Homo sapiens
MLKREGKVQPYTKTLDGGWGWMIVIHFFLVNVFVMGMTKTFAIFFVVFQEEFEGTSEQIGWIGSIMSSLRFCAGPLVAIICDILGEKTTSILGAFVVTGGYLISSWATSIPFLCVTMGLLPGLGSAFLYQVAAVVTTKYFKKRLALSTAIARSGMGLTFLLAPFTKFLIDLYDWTGILETVSQIISGWVADQNWIKKYHYHKSYLILCGITNLLAPLATTFPLLMTYTICFAIFAGGYLALILPVLVDLCRNSTVNRFLGLASFFAGMAVLSGPPIAGWLYDYTQTYNGSFYFSGICYLLSSVSFFFVPLAERWKNSLT

SEQ ID NO: 12153 - protein, 382 aa, Homo sapiens
MGMDDCDSFFPGLGSAFLYQVAAVVTTKYFKKRLALSTAIARSGMGLTFLLAPFTKFLIDLYDWTGALILFGAIALNLVPSSMLLRPIHIKSENNSGIKDKGSSLSAHGPEAHATETHCHETEESTIKDSTTQKAGLPSKNLTVSQNQSEEFYNGPNRNRLLLKSDEESDKVISWSCKQLFDISLFRNPFFYIFTWSFLLSQLAYFIPTFHLVARAKTLGIDIMDASYLVSVAGILETVSQIISGWVADQNWIKKYHYHKSYLILCGITNLLAPLATTFPLLMTYTICFAIFAGGYLALILPVLVDLCRNSTVNRFLGLASFFAGMAVLSGPPIAEIIPSFQAGYMIIPRHTMALSTSLAYAISSLQFPFFLYHWPKDGKTV

SEQ ID NO: 12154 - protein, 439 aa, Homo sapiens
MLKREGKVQPYTKTLDGGWGWMIVIHFFLVNVFVMGMTKTFAIFFVVFQEEFEGTSEQIGWIGSIMSSLRFCAGLGSAFLYQVAAVVTTKYFKKRLALSTAIARSGMGLTFLLAPFTKFLIDLYDWTGALILFGAIALNLVPSSMLLRPIHIKSENNSGIKDKGSSLSAHGPEAHATETHCHETEESTIKDSTTQKAGLPSKNLTVSQNQSEEFYNGPNRNRLLLKSDEESDKVISWSCKQLFDISLFRNPFFYIFTWSFLLSQLAYFIPTFHLVARAKTLGIDIMDASYLVSVAGILETVSQIISGWVADQNWIKKYHYHKSYLILCGITNLLAPLATTFPLLMTYTICFAIFAGGYLALILPVLVDLCRNSTVNRFLGLASFFAGMAVLSGPPIAGWLYDYTQTYNGSFYFSGICYLLSSVSFFFVPLAERWKNSLT

SEQ ID NO: 12155 - protein, 326 aa, Homo sapiens
MWRSRWDASVLKAEALALLPCGLGMAFSQSHVMAARRHQHSRLIIEVDEYSSNPTQAFTFYNINQGRFQPPHVQMVDPVPHDAPKPPGYTRFVCVSDTHSRTDPIQMPYGDVLIHAGDFTELGLPSEVKKFNEWLGSLPYEYKIVIAGNHELTFDQEFMADLIKQDFYYFPSVSKLKPENYENVQSLLTNCIYLQDSEVTVRGFRIYGSPWQPWFYGWGFNLPRGQALLEKWNLIPEGVDILITHGPPLGFLDWVPKKMQRVGCVELLNTVQRRVQPRLHVFGHIHEGYGVMADGTTTYVNASVCTVNYQPVNPPIVIDLPTPRNS

SEQ ID NO: 12156 - protein, 359 aa, Homo sapiens
MNGRETQSVSRSGGGPGCGGGSGGRCRGGRRRSMWRSRWDASVLKAEALALLPCGLGMAFSQSHVMAARRHQHSRLIIEVDEYSSNPTQAFTFYNINQGRFQPPHVQMVDPVPHDAPKPPGYTRFVCVSDTHSRTDPIQMPYGDVLIHAGDFTELGLPSEVKKFNEWLGSLPYEYKIVIAGNHELTFDQEFMADLIKQDFYYFPSVSKLKPENYENVQSLLTNCIYLQDSEVTVRGFRIYGSPWQPWFYGWGFNLPRGQALLEKWNLIPEGVDILITHGPPLGFLDWVPKKMQRVGCVELLNTVQRRVQPRLHVFGHIHEGYGVMADGTTTYVNASVCTVNYQPVNPPIVIDLPTPRNS

SEQ ID NO: 12157 - protein, 508 aa, Homo sapiens
MNCQQLWLGFLLPMTVSGRVLGLAEVAPVDYLSQYGYLQKPLEGSNNFKPEDITEALRAFQEASELPVSGQLDDATRARMRQPRCGLEDPFNQKTLKYLLLGRWRKKHLTFRILNLPSTLPPHTARAALRQAFQDWSNVAPLTFQEVQAGAADIRLSFHGRQSSYCSNTFDGPGRVLAHADIPELGSVHFDEDEFWTEGTYRGVNLRIIAAHEVGHALGLGHSRYSQALMAPVYEGYRPHFKLHPDDVAGIQALYGKKSPVIRDEEEEETELPTVPPVPTEPSPMPDPCSSELDAMMLGPRGKTYAFKGDYVWTVSDSGPGPLFRVSALWEGLPGNLDAAVYSPRTQWIHFFKGDKVWRYINFKMSPGFPKKLNRVEPNLDAALYWPLNQKVFLFKGSGYWQWDELARTDFSSYPKPIKGLFTGVPNQPSAAMSWQDGRVYFFKGKVYWRLNQQLRVEKGYPRNISHNWMHCRPRTIDTTPSGGNTTPSGTGITLDTTLSATETTFEY

SEQ ID NO: 12158 - protein, 222 aa, Homo sapiens
MGVTWDFSMSNGGPRGKTYAFKGDYVWTVSDSGPGPLFRVSALWEGLPGNLDAAVYSPRTQWIHFFKGDKVWRYINFKMSPGFPKKLNRVEPNLDAALYWPLNQKVFLFKGSGYWQWDELARTDFSSYPKPIKGLFTGVPNQPSAAMSWQDGRVYFFKGKVYWRLNQQLRVEKGYPRNISHNWMHCRPRTIDTTPSGGNTTPSGTGITLDTTLSATETTFEY

SEQ ID NO: 12159 - protein, 63 aa, Homo sapiens
MNCQQLWLGFLLPMTVSGRVLGLAEVAPVDYLSQYGYLQKPLEGSNNFKPEDITEALSLRSAG

SEQ ID NO: 12160 - protein, 305 aa, Homo sapiens
MNCQQLWLGFLLPMTVSGRVLGLAEVAPVDYLSQYGYLQKPLEGSNNFKPEDITEALRAFQEASELPVSGQLDDATRARMRQPRCGLEDPFNQKTLKYLLLGRWRKKHLTFRILNLPSTLPPHTARAALRQAFQDWSNVAPLTFQEVQAGAADIRLSFHGRQSSYCSNTFDGPGKKSPVIRDEEEEETELPTVPPVPTEPSPMPDPCSSELDAMMLGEAPPLQAVGRRWGQPADPEAWTNGSDMGLQHEQWRAPWEDLCFQGGLCVDCIRFRTGPLVPSVCPLGGAPRKPGCCCLLASNTMDSLL

SEQ ID NO: 12161 - protein, 476 aa, Homo sapiens
MMHLAFLVLLCLPVCSAYPLSGAAKEEDSNKDLAQQYLEKYYNLEKDVKQFRRKDSNLIVKKIQGMQKFLGLEVTGKLDTDTLEVMRKPRCGVPDVGHFSSFPGMPKWRKTHLTYRIVNYTPDLPRDAVDSAIEKALKVWEEVTPLTFSRLYEGEADIMISFAVKEHGDFYSFDGPGHSLAHAYPPGPGLYGDIHFDDDEKWTEDASGTNLFLVAAHELGHSLGLFHSANTEALMYPLYNSFTELAQFRLSQDDVNGIQSLYGPPPASTEEPLVPTKSVPSGSEMPAKCDPALSFDAISTLRGEYLFFKDRYFWRRSHWNPEPEFHLISAFWPSLPSYLDAAYEVNSRDTVFIFKGNEFWAIRGNEVQAGYPRGIHTLGFPPTIRKIDAAVSDKEKKKTYFFAADKYWRFDENSQSMEQGFPRLIADDFPGVEPKVDAVLQAFGFFYFFSGSSQFEFDPNARMVTHILKSNSWLHC

SEQ ID NO: 12162 - protein, 522 aa, Homo sapiens
MSGFNFGGTGAPTGGFTFGTAKTATTTPATGFSFSTSGTGGFNFGAPFQPATSTPSTGLFSLATQTPATQTTGFTFGTATLASGGTGFSLGIGASKLNLSNTAATPAMANPSGFGLGSSNLTNAISSTVTSSQGTAPTGFVFGPSTTSVAPATTSGGFSFTGGSTAQPSGFNIGSAGNSAQPTAPATLPFTPATPAATTAGATQPAAPTPTATITSTGPSLFASIATAPTSSATTGLSLCTPVTTAGAPTAGTQGFSLKAPGAASGTSTTTSTAATATATTTSSSSTTGFALNLKPLAPAGIPSNTAAAVTAPPGPGAAAGAAASSAMTYAQLESLINKWSLELEDQERHFLQQATQVNAWDRTLIENGEKITSLHREVEKVKLDQKRLDQELDFILSQQKELEDLLSPLEELVKEQSGTIYLQHADEEREKTYKLAENIDAQLKRMAQDLKDIIEHLNTSGAPADTSDPLQQICKILNAHMDSLQWIDQNSALLQRKVEEVTKVCEGRRKEQERSFRITFD

SEQ ID NO: 12163 - protein, 239 aa, Homo sapiens
MPKSKRDKKVSLTKTAKKGLELKQNLIEELRKCVDTYKYLFIFSVANMRNSKLKDIRNAWKHSRMFFGKNKVMMVALGRSPSDEYKDNLHQVSKRLRGEVGLLFTNRTKEEVNEWFTKYTEMDYARAGNKAAFTVSLDPGPLEQFPHSMEPQLRQLGLPTALKRGVVTLLSDYEVCKEGDVLTPEQARVLKLFGYEMAEFKVTIKYMWDSQSGRFQQMGDDLPESASESTEESDSEDDD

SEQ ID NO: 12164 - protein, 471 aa, Homo sapiens
MENLKHIITLGQVIHKRCEEMKYCKKQCRRLGHRVLGLIKPLEMLQDQGKRSVPSEKLTTAMNRFKAALEEANGEIEKFSNRSNICRFLTASQDKILFKDVNRKLSDVWKELSLLLQVEQRMPVSPISQGASWAQEDQQDADEDRRAFQMLRRDNEKIEASLRRLEINMKEIKETLRQYLPPKCMQEIPQEQIKEIKKEQLSGSPWILLRENEVSTLYKGEYHRAPVAIKVFKKLQAGSIAIVRQTFNKEIKTMKKFESPNILRIFGICIDETVTPPQFSIVMEYCELGTLRELLDREKDLTLGKRMVLVLGAARGLYRLHHSEAPELHGKIRSSNFLVTQGYQVKLAGFELRKTQTSMSLGTTREKTDRVKSTAYLSPQELEDVFYQYDVKSEIYSFGIVLWEIATGDIPFQGCNSEKIRKLVAVKRQQEPLGEDCPSELREIIDECRAHDPSVRPSVDEILKKLSTFSK

SEQ ID NO: 12165 - protein, 263 aa, Homo sapiens
MENLKHIITLGQVIHKRCEEMKYCKKQCRRLGHRVLGLIKPLEMLQDQGKRSVPSEKLTTAMNRFKAALEEANGEIEKFSNRSNICRFLTASQDKILFKDVNRKLSDVWKELSLLLQVEQRMPVSPISQGASWAQEDQQDADEDRRAFQMLRRDNEKIEASLRRLEINMKEIKETLRQSLESSSGKSPLEISRFKVKNVKTGSASGCNSEKIRKLVAVKRQQEPLGEDCPSELREIIDECRAHDPSVRPSVDEILKKLSTFSK

SEQ ID NO: 12166 - protein, 1382 aa, Homo sapiens
MTRKRTYWVPNSSGGLVNRGIDIGDDMVSGLIYKTYTLQDGPWSQQERNPEAPGRAAVPPWGKYDAALRTMIPFRPKPRFPAPQPLDNAGLFSYLTVSWLTPLMIQSLRSRLDENTIPPLSVHDASDKNVQRLHRLWEEEVSRRGIEKASVLLVMLRFQRTRLIFDALLGICFCIASVLGPILIIPKILEYSEEQLGNVVHGVGLCFALFLSECVKSLSFSSSWIINQRTAIRFRAAVSSFAFEKLIQFKSVIHITSGEAISFFTGDVNYLFEGVCYGPLVLITCASLVICSISSYFIIGYTAFIAILCYLLVFPLAVFMTRMAVKAQHHTSEVSDQRIRVTSEVLTCIKLIKMYTWEKPFAKIIEDLRRKERKLLEKCGLVQSLTSITLFIIPTVATAVWVLIHTSLKLKLTASMAFSMLASLNLLRLSVFFVPIAVKGLTNSKSAVMRFKKFFLQESPVFYVQTLQDPSKALVFEEATLSWQQTCPGIVNGALELERNGHASEGMTRPRDALGPEEEGNSLGPELHKINLVVSKGMMLGVCGNTGSGKSSLLSAILEEMHLLEGSVGVQGSLAYVPQQAWIVSGNIRENILMGGAYDKARYLQVLHCCSLNRDLELLPFGDMTEIGERGLNLSGGQKQRISLARAVYSDRQIYLLDDPLSAVDAHVGKHIFEECIKKTLRGKTVVLVTHQLQYLEFCGQIILLENGKICENGTHSELMQKKGKYAQLIQKMHKEATSDMLQDTAKIAEKPKVESQALATSLEESLNGNAVPEHQLTQEEEMEEGSLSWRVYHHYIQAAGGYMVSCIIFFFVVLIVFLTIFSFWWLSYWLEQGSGTNSSRESNGTMADLGNIADNPQLSFYQLVYGLNALLLICVGVCSSGIFTKVTRKASTALHNKLFNKVFRCPMSFFDTIPIGRLLNCFAGDLEQLDQLLPIFSEQFLVLSLMVIAVLLIVSVLSPYILLMGAIIMVICFIYYMMFKKAIGVFKRLENYSRSPLFSHILNSLQGLSSIHVYGKTEDFISQFKRLTDAQNNYLLLFLSSTRWMALRLEIMTNLVTLAVALFVAFGISSTPYSFKVMAVNIVLQLASSFQATARIGLETEAQFTAVERILQYMKMCVSEAPLHMEGTSCPQGWPQHGEIIFQDYHMKYRDNTPTVLHGINLTIRGHEVVGIVGRTGSGKSSLGMALFRLVEPMAGRILIDGVDICSIGLEDLRSKLSVIPQDPVLLSGTIRFNLDPFDRHTDQQIWDALERTFLTKAISKFPKKLHTDVVENGGNFSVGERQLLCIARAVLRNSKIILIDEATASIDMETDTLIQRTIREAFQGCTVLVIAHRVTTVLNCDHILVMGNGKVVEFDRPEVLRKKPGSLFAALMATATSSLR

SEQ ID NO: 12167 - protein, 1344 aa, Homo sapiens
MTRKRTYWVPNSSGGLVNRGIDIGDDMVSGLIYKTYTLQDGPWSQQERNPEAPGRAAVPPWGKYDAALRTMIPFRPKPRFPAPQPLDNAGLFSYLTVSWLTPLMIQSLRSRLDENTIPPLSVHDASDKNVQRLHRLWEEEVSRRGIEKASVLLVMLRFQRTRLIFDALLGICFCIASVLGPILIIPKILEYSEEQLGNVVHGVGLCFALFLSECVKSLSFSSSWIINQRTAIRFRAAVSSFAFEKLIQFKSVIHITSGEAISFFTGDVNYLFEGVCYGPLVLITCASLVICSISSYFIIGYTAFIAILCYLLVFPLAVFMTRMAVKAQHHTSEVSDQRIRVTSEVLTCIKLIKMYTWEKPFAKIIEDLRRKERKLLEKCGLVQSLTSITLFIIPTVATAVWVLIHTSLKLKLTASMAFSMLASLNLLRLSVFFVPIAVKGLTNSKSAVMRFKKFFLQESPVFYVQTLQDPSKALVFEEATLSWQQTCPGIVNGALELERNGHASEGMTRPRDALGPEEEGNSLGPELHKINLVVSKGMMLGVCGNTGSGKSSLLSAILEEMHLLEGSVGVQGSLAYVPQQAWIVSGNIRENILMGGAYDKARYLQVLHCCSLNRDLELLPFGDMTEIGERGLNLSGGQKQRISLARAVYSDRQIYLLDDPLSAVDAHVGKHIFEECIKKTLRGKTVVLVTHQLQYLEFCGQIILLENGKICENGTHSELMQKKGKYAQLIQKMHKEATSDMLQDTAKIAEKPKVESQALATSLEESLNGNAVPEHQLTQEEEMEEGSLSWRVYHHYIQAAGGYMVSCIIFFFVVLIVFLTIFSFWWLSYWLEQGSGTNSSRESNGTMADLGNIADNPQLSFYQLVYGLNALLLICVGVCSSGIFTKVTRKASTALHNKLFNKVFRCPMSFFDTIPIGRLLNCFAGDLEQLDQLLPIFSEQFLVLSLMVIAVLLIVSVLSPYILLMGAIIMVICFIYYMMFKKAIGVFKRLENYSRSPLFSHILNSLQGLSSIHVYGKTEDFISQFKRLTDAQNNYLLLFLSSTRWMALRLEIMTNLVTLAVALFVAFGISSTPYSFKVMAVNIVLQLASSFQATARIGLETEAQFTAVERILQYMKMCVSEAPLHMEGTSCPQGWPQHGEIIFQDYHMKYRDNTPTVLHGINLTIRGHEVVGIVGRTGSGKSSLGMALFRLVEPMAGRILIDGVDICSIGLEDLRSKLSVIPQDPVLLSGTIRFNLDPFDRHTDQQIWDALERTFLTKAIILIDEATASIDMETDTLIQRTIREAFQGCTVLVIAHRVTTVLNCDHILVMGNGKVVEFDRPEVLRKKPGSLFAALMATATSSLR

SEQ ID NO: 12168 - protein, 362 aa, Homo sapiens
MAEVPPGPSSLLPPPAPPAPAAVEPRCPFPAGAALACCSEDEEDDEEHEGGGSRSPAGGESATVAAKGHPCLRCPQPPQEQQQLNGLISPELRHLRAAASLKSKVLSVAEVAATTATPDGGPRATATKGAGVHSGERPPHSLSSNARTAVPSPVEAAAASDPAAARNGLAEGTEQEEEEEDEQVRLLSSSLTADCSLRSPSGREVEPGEDRTIRYVRYESELQMPDIMRLITKDLSEPYSIYTYRYFIHNWPQLCFLAMVGEECVGAIVCKLDMHKKMFRRGYIAMLAVDSKYRRNGIGTNLVKKAIYAMVEGDCDEVVLETEITNKSALKLYENLGFVRDKRLFRYYLNGVDALRLKLWLR

SEQ ID NO: 12169 - protein, 325 aa, Homo sapiens
MAEVPPGPSSLLPPPAPPAPAAVEPRCPFPAGAALACCSEDEEQQQLNGLISPELRHLRAAASLKSKVLSVAEVAATTATPDGGPRATATKGAGVHSGERPPHSLSSNARTAVPSPVEAAAASDPAAARNGLAEGTEQEEEEEDEQVRLLSSSLTADCSLRSPSGREVEPGEDRTIRYVRYESELQMPDIMRLITKDLSEPYSIYTYRYFIHNWPQLCFLAMVGEECVGAIVCKLDMHKKMFRRGYIAMLAVDSKYRRNGIGTNLVKKAIYAMVEGDCDEVVLETEITNKSALKLYENLGFVRDKRLFRYYLNGVDALRLKLWLR

SEQ ID NO: 12170 - protein, 2116 aa, Homo sapiens
MSGFRLGDHVWLEPPSTHKTGVAIGGIIKEAKPGKVLVEDDEGKEHWIRAEDFGVLSPMHPNSVQGVDDMIRLGDLNEAGMVHNLLIRYQQHKIYTYTGSILVAVNPFQVLPLYTLEQVQLYYSRHMGELPPHVFAIANNCYFSMKRNKRDQCCIISGESGAGKTETTKLILQFLATISGQHSWIEQQVLEANPILEAFGNAKTIRNDNSSRFGKYIDIYFNPSGVIEGARIEQFLLEKSRVCRQAPEERNYHIFYCMLMGVSAEDKQLLSLGTPSEYHYLTMGNCTSCEGLNDAKDYAHIRSAMKILQFSDSESWDVIKLLAAILHLGNVGFMASVFENLDASDVMETPAFPTVMKLLEVQHQELRDCLIKHTILIRGEFVTRSLNIAQAADRRDAFVKGIYGHLFLWIVKKINAAIFTPPAQDPKNVRRAIGLLDIFGFENFENNSFEQLCINFANEHLQQFFVQHVFTMEQEEYRSENISWDYIHYTDNRPTLDLLALKPMSIISLLDEESRFPQGTDLTMLQKLNSVHANNKAFLQPKNIHDARFGIAHFAGEVYYQAEGFLEKNRDVLSTDILTLVYSSKNKFLREIFNLELAETKLGHGTIRQAKAGNHLFKSADSNKRPSTLGSQFKQSLDQLMKILTNCQPYFIRCIKPNEYKKPLLFDRELCLRQLRYSGMMETVHIRKSGFPIRYTFEEFSQRFGVLLPNAMRMQLQGKLRQMTLGITDVWLRTDKDWKAGKTKIFLRDHQDTLLEVQRSQVLDRAALSIQKVLRGYRYRKEFLRQRRAAVTLQAWWRGYCNRRNFKLILVGFERLQAIARSQPLARQYQAMRQRTVQLQALCRGYLVRQQVQAKRRAVVVIQAHARGMAARRNFQQRKANAPLVIPAEGQKSQGALPAKKRRSIYDTVTDTEMVEKVFGFLPAMIGGQEGQASPHFEDLESKTQKLLEVDLDTVPMAEEPEEDVDGLAEYTFPKFAVTYFQKSASHTHIRRPLRYPLLYHEDDTDCLAALVIWNVILRFMGDLPEPVLYARSSQQGSSVMRQIHDTLGREHGAQVPQHSRSAQVASQLNIGEEALEPDGLGADRPMSNLEKVHFIVGYAILRPSLRDEIYCQICKQLSENFKTSSLARGWILLSLCLGCFPPSERFMKYLLNFIGQGPATYGPFCAERLRRTYANGVRAEPPTWLELQAVKSKKHIPIQVILATGESLTVPVDSASTSREMCMHIAHKQGLSDHLGFSLQVAVYDKFWSLGSGRDHMMDAIARCEQMAQERGESQRQSPWRIYFRKEFFTPWHDSREDPVSTELIYRQVLRGVWSGEYSFEKEEELVELLARHCYVQLGASAESKAVQELLPSCIPHKLYRTKPPDRWASLVTAACAKAPYTQKQVTPLAVREQVVDAARLQWPLLFSRLFEVITLSGPRLPKTQLILAVNWKGLCFLDQQEKMLLELSFPEVMGLATNREAQGGQRLLLSTMHEEYEFVSPSSVAIAELVALFLEGLKERSIFAMALQDRKATDDTTLLAFKKGDLLVLTKKQGLLASENWTLGQNDRTGKTGLVPMACLYTIPTVTKPSAQLLSLLAMSPEKRKLAAQEGQFTEPRPEEPPKEKLHTLEEFSYEFFRAPEKDMVSMAVLPLARARGHLWAYSCEPLRQPLLKRVHANVDLWDIACQIFVAILRYMGDYPSRQAWPTLELTDQIFTLALQHPALQDEVYCQILKQLTHNSNRHSEERGWQLLWLCTGLFPPSKGLLPHAQKFIDTRRGKLLAPDCSRRIQKVLRTGPRKQPPHQVEVEAAEQNVSRICHKIYFPNDTSEMLEVVANTRVRDVCDSIATRLQLASWEGCSLFIKISDKVISQKEGDFFFDSLREVSDWVKKNKPQKEGAPVTLPYQVYFMRKLWLNISPGKDVNADTILHYHQELPKYLRGFHKCSREDAIHLAGLIYKAQFNNDRSQLASVPKILRELVPENLTRLMSSEEWKKSILLAYDKHKDKTVEEAKVAFLKWICRWPTFGSAFFEVKQTSEPSYPDVILIAINRHGVLLIHPKTKDLLTTYPFTKISSWSSGSTYFHMALGSLGRGSRLLCETSLGYKMDDLLTSYVQQLLSAMNKQRGSKAPALAST

SEQ ID NO: 12171 - protein, 1957 aa, Homo sapiens
MSGFRLGDHVWLEPPSTHKTGVAIGGIIKEAKPGKVLVEDDEGKEHWIRAEDFGVLSPMHPNSVQGVDDMIRLGDLNEAGMVHNLLIRYQQHKIYTYTGSILVAVNPFQVLPLYTLEQVQLYYSRHMGELPPHVFAIANNCYFSMKRNKRDQCCIISGESGAGKTETTKLILQFLATISGQHSWIEQQVLEANPILEAFGNAKTIRNDNSSRFGKYIDIYFNPSGVIEGARIEQFLLEKSRVCRQAPEERNYHIFYCMLMGVSAEDKQLLSLGTPSEYHYLTMGNCTSCEGLNDAKDYAHIRSAMKILQFSDSESWDVIKLLAAILHLGNVGFMASVFENLDASDVMETPAFPTVMKLLEVQHQELRDCLIKHTILIRGEFVTRSLNIAQAADRRDAFVKGIYGHLFLWIVKKINAAIFTPPAQDPKNVRRAIGLLDIFGFENFENNSFEQLCINFANEHLQQFFVQHVFTMEQEEYRSENISWDYIHYTDNRPTLDLLALKPMSIISLLDEESRFPQGTDLTMLQKLNSVHANNKAFLQPKNIHDARFGIAHFAGEVYYQAEGFLEKNRDVLSTDILTLVYSSKNKFLREIFNLELAETKLGHGTIRQAKAGNHLFKSADSNKRPSTLGSQFKQSLDQLMKILTNCQPYFIRCIKPNEYKKPLLFDRELCLRQLRYSGMMETVHIRKSGFPIRYTFEEFSQRFGVLLPNAMRMQLQGKLRQMTLGITDVWLRTDKDWKAGKTKIFLRDHQDTLLEVQRSQVLDRAALSIQKVLRGYRYRKEFLRQRRAAVTLQAWWRGYCNRRNFKLILVGFERLQAIARSQPLARQYQAMRQRTVQLQALCRGYLVRQQVQAKRRAVVVIQAHARGMAARRNFQQRKANAPLVIPAEGQKSQGALPAKKRRSIYDTVTDTEMVEKVFGFLPAMIGGQEGQASPHFEDLESKTQKLLEVDLDTVPMAEEPEEDVDGLAEYTFPKFAVTYFQKSASHTHIRRPLRYPLLYHEDDTDCLAALVIWNVILRFMGDLPEPVLYARSSQQGSSVMRQIHDTLGREHGAQVPQHSRSAQVASQLNIGEEALEPDGLGADRPMSNLEKVHFIVGYAILRPSLRDEIYCQICKQLSENFKTSSLARGWILLSLCLGCFPPSERFMKYLLNFIGQGPATYGPFCAERLRRTYANGVRAEPPTWLELQAVKSKKHIPIQVILATGESLTVPVDSASTSREMCMHIAHKQGLSDHLGFSLQVAVYDKFWSLGSGRDHMMDAIARCEQMAQERGESQRQSPWRIYFRKEFFTPWHDSREDPVSTELIYRQVLRGVWSGEYSFEKEEELVELLARHCYVQLGASAESKAVQELLPSCIPHKLYRTKPPDRWASLVTAACAKAPYTQKQVTPLAVREQVVDAARLQWPLLFSRLFEVITLSGPRLPKTQLILAVNWKGLCFLDQQEKMLLELSFPEVMGLATNREAQGGQRLLLSTMHEEYEFVSPSSVAIAELVALFLEGLKERSIFAMALQDRKATDDTTLLAFKKGDLLVLTKKQGLLASENWTLGQNDRTGKTGLVPMACLYTIPTVTKPSAQLLSLLAMSPEKRKLAAQEGQFTEPRPEEPPKEKLHTLEEFSYEFFRAPEKDMVSMAVLPLARARGHLWAYSCEPLRQPLLKRVHANVDLWDIACQIFVAILRYMGDYPSRQAWPTLELTDQIFTLALQHPALQDEVYCQILKQLTHNSNRHSEERGWQLLWLCTGLFPPSKGLLPHAQKFIDTRRGKLLAPDCSRRIQKVLRTGPRKQPPHQVEVEAAEQNVSRICHKIYFPNDTSEMLEVVANTRVRDVCDSIATRLQLASWEGCSLFIKISDKVGRAGAGQTVGGRAVSEALGAACGGLSLPGAPMLDQAAGTEVGGVLEQSQLHTPIAHAQPTPAQHPGRRRPLDQNPAGSQEDSPRKPPNFPVPSPSPGHQPEGGRLLL

SEQ ID NO: 12172 - protein, 947 aa, Homo sapiens
MVPGGTMKSLKKDSRLRITPTRLLEASENVKEKKRAKGPEQPTPTIQEEPEPVSNVLQGDDILALAIKKEDLKEQHIPRLTEKEDKRVITQKFIIRKLKPMDPRRKVCHLVARPANPDEATKPLDYSGPGDSFDGSDQILPHHILGSLQDFKRIALARGNTQLAERIPTSPCLMTLISAEGESKQKAPKEEKRPPWAPPPQHNFLKNWQRNTALRKKQQEALSEHLKKPVSELLMHTGETYRRIQEERELIDCTLPTRRDRKSWENSGFWSRLEYLGDEMTGLVMTKTKTQRGLMEPITHIRKPHSIRVETGLPAQRDASYRYTWDRSLFLIYRRKELQRIMEELDFSQQDIDGLEVVGKGWPFSAVTVEDYTVFERSQGSSSEDTAYLGTLASSSDVSMPILGPSLLFCGKPACWIRGSNPQDKRQVGIAAHLTFETLEGEKTSSELTVVNNGTVAIWYDWRRQHQPDTFQDLKKNRMQRFYFDNREGVILPGEIKTFTFFFKSLTAGVFREFWEFRTHPTLLGGAILQVNLHAVSLTQDVFEDERKVLESKLTAHEAVTVVREVLQELLMGVLTPERTPSPVDAYLTEEDLFRHRNPPLHYEHQVVQSLHQLWRQYMTLPAKAEEARPGDKEHVSPIATEKASVNAELLPRFRSPISETQVPRPENEALRESGSQKARVGTKSPQRKSIMEEILVEESPDVDSTKSPWEPDGLPLLEWNLCLEDFRKAVMVLPDENHREDALMRLNKAALELCQKPRPLQSNLLHQMCLQLWRDVIDSLVGHSMWLRSVLGLPEKETIYLNVPEEQDQKSPPIMEVKVPVGKAGKEERKGAAQEKKQLGIKDKEDKKGAKLLGKEDRPNSKKHKAKDDKKVIKSASQDRFSLEDPTPDIILSSQEPIDPLVMGKYTQSLHSEVRGLLDTLVTDLMVLADELSPIKNVEEALRLCR

SEQ ID NO: 12173 - protein, 320 aa, Homo sapiens
MAFPKKKLQGLVAATITPMTENGEINFSVIGQYVDYLVKEQGVKNIFVNGTTGEGLSLSVSERRQVAEEWVTKGKDKLDQVIIHVGALSLKESQELAQHAAEIGADGIAVIAPFFLKPWTKDILINFLKEVAAAAPALPFYYYHIPALTGVKIRAEELLDGILDKIPTFQGLKFSDTDLLDFGQCVDQNRQQQFAFLFGVDEQLLSALVMGATGAVGSTYNYLGKKTNQMLEAFEQKDFSLALNYQFCIQRFINFVVKLGFGVSQTKAIMTLVSGIPMGPPRLPLQKASREFTDSAEAKLKSLDFLSFTDLKDGNLEAGS

SEQ ID NO: 12174 - protein, 301 aa, Homo sapiens
MSRAPGILASWRRAPSLSVQKGSQTARHTCHPEVPLGNCFLPVYKASPLTVTRLWAERLDQVIIHVGALSLKESQELAQHAAEIGADGIAVIAPFFLKPWTKDILINFLKEVAAAAPALPFYYYHIPALTGVKIRAEELLDGILDKIPTFQGLKFSDTDLLDFGQCVDQNRQQQFAFLFGVDEQLLSALVMGATGAVGSTYNYLGKKTNQMLEAFEQKDFSLALNYQFCIQRFINFVVKLGFGVSQTKAIMTLVSGIPMGPPRLPLQKASREFTDSAEAKLKSLDFLSFTDLKDGNLEAGS

SEQ ID NO: 12175 - protein, 284 aa, Homo sapiens
MAFPKKKLQGLVAATITPMTENGEINFSVIGQYVDYLVKEQGVKNIFVNGTTGEGLSLSVSERRQVAEEWVTKGKDKLDQVIIHVGALSLKESQELAQHAAEIGADGIAVIAPFFLKPWTKDILINFLKEVAAAAPALPFYYYHIPALTGVKIRAEELLDGILDKIPTFQGLKFSDTDLLDFGQCVDQNRQQQFAFLFGVDEQLLSALVMGATGAVGSTYNYLGKKTNQMLEAFEQKDFSLALNYQFCIQRFINFVVKLENSKLKVSKNQRTLPLGTTNFPFLH

SEQ ID NO: 12176 - protein, 240 aa, Homo sapiens
MAFPKKKLQGLVAATITPMTENGEINFSVIGQYVDYLVKEQGVKNIFVNGTTGEGLSLSVSERRQVAEEWVTKGKDKLDQVIIHVGALSLKESQELAQHAAEIGADGIAVIAPFFLKPWTKDILINFLKEVAAAAPALPFYYYHIPALTGVKIRAEELLDGILDKIPTFQGLKFSDTDLLDFGQCVDQNRQQQFAFLFGVDEFCIQRFINFVVKLENSKLKVSKNQRTLPLGTTNFPFLH

SEQ ID NO: 12177 - protein, 109 aa, Homo sapiens
MAFPKKKLQGLVAATITPMTENGEINFSVIGQYVDYLVKEQGVKNIFVNGTTGEGLSLSVSERRQVAEEWVTKGKDKSNHHKLGTIRTTQSRQSSFRRQLKAWHSGSHL

SEQ ID NO: 12178 - protein, 264 aa, Homo sapiens
MHNPDGSASPTADPGSELQTLGQAARRPPPPRAGHDAPRRTRPSARKPLSCFSRRPMPTREPPKTRGSRGHLHTHPPGPGPPLQGLAPRGLKTSAPRPPCQPQPGPHKAKTKKIVFEDELLSQALLGAKKPIGAIPKGHKPRPHPVPDYELKYPPVSSERERSRYVAVFQDQYGEFLELQHEVGCAQAKLRQLEALLSSLPPPQSQKEAQVAARVWREFEMKRMDPGFLDKQARCHYLKGKLRHLKTQIQKFDDQGDSEGSVYF

SEQ ID NO: 12179 - protein, 131 aa, Homo sapiens
MAGVKALVALSFSGAIGLTFLMLGCALEDYGVYWPLFVLIFHAISPIPHFIAKRVTYDSDATSSACRELAYFFTTGIVVSAFGFPVILARVAVIKWGACGLVLAGNAVIFLTIQGFFLIFGRGDDFSWEQW

SEQ ID NO: 12180 - protein, 313 aa, Homo sapiens
MANLSQPSEFVLLGFSSFGELQALLYGPFLMLYLLAFMGNTIIIVMVIADTHLHTPMYFFLGNFSLLEILVTMTAVPRMLSDLLVPHKVITFTGCMVQFYFHFSLGSTSFLILTDMALDRFVAICHPLRYGTLMSRAMCVQLAGAAWAAPFLAMVPTVLSRAHLDYCHGDVINHFFCDNEPLLQLSCSDTRLLEFWDFLMALTFVLSSFLVTLISYGYIVTTVLRIPSASSCQKAFSTCGSHLTLVFIGYSSTIFLYVRPGKAHSVQVRKVVALVTSVLTPFLNPFILTFCNQTVKTVLQGQMQRLKGLCKAQ

SEQ ID NO: 12181 - protein, 271 aa, Homo sapiens
MYYAVSQARVNAVPGTMLRPQRPGDLQLGASLYELVGYRQPPSSSSSSTSSTSSTSSSSTTAPLLPKAAREKPEAPAEPPGPGPGSGAHPGGSARPDAKEEQQQQLRRKINSRERKRMQDLNLAMDALREVILPYSAAHCQGAPGRKLSKIATLLLARNYILLLGSSLQELRRALGEGAGPAAPRLLLAGLPLLAAAPGSVLLAPGAVGPPDALRPAKYLSLALDEPPCGQFALPGGGAGGPGLCTCAVCKFPHLVPASLGLAAVQAQFSK

SEQ ID NO: 12182 - protein, 311 aa, Homo sapiens
MGPRNQTAVSEFLLMKVTEDPELKLIPFSLFLSMYLVTILGNLLILLAVISDSHLHTPMYFLLFNLSFTDICLTTTTVPKILVNIQAQNQSITYTGCLTQICLVLVFAGLESCFLAVMAYDRYVAICHPLRYTVLMNVHFWGLLILLSMFMSTMDALVQSLMVLQLSFCKNVEIPLFFCEVVQVIKLACSDTLINNILIYFASSVFGAIPLSGIIFSYSQIVTSVLRMPSARGKYKAFSTCGCHLSVFSLFYGTAFGVYISSAVAESSRITAVASVMYTVVPQMMNPFIYSLRNKEMKKALRKLIGRLFPF

SEQ ID NO: 12183 - protein, 325 aa, Homo sapiens
MDSPSNATVPCGFLLQGFSEFPHLRPVLFLLLLGVHLATLGGNLLILVAVASMPSRQPMLLFLCQLSAIELCYTLVVVPRSLVDLSTPGHRRGSPISFLSCAFQMQMFVALGGAECFLLAAMAYDRYVAICHPLRYAAVVTPGLCARLALACCLRGLAVSVGLTVAIFHLPFCGSRLLLHFFCDITALLHLACTRSYADELPLLGACLVLLLLPSVLILASYGAIAAALRRLRCPKGRGKAASTCALHLAVTFLHYGCATFMYVRPRASYSPRLDRTLALVYTNVTPLLCPLIYSLRNREITAALSRVLGRRRPGQAPGGDLREL

SEQ ID NO: 12184 - protein, 1044 aa, Homo sapiens
MGVALRKLTQWTAAGHGTGILEITPLNEAILKEIIVFVESFIYKHPQEAKFVFVEPLEWNTSLAPSAFESGYVVSETTVKSEEVDKNGQPLLFLSVPQIKIRSFGQLSRLLLIAKTGKLKEAQACVEANRDPIVKILGSDYNTMKENSIALNILGKITRDDDPESEIKMKIAMLLKQLDLHLLNHSLKHISLEISLSPMTVKKDIELLKRFSGKGNQTVLESIEYTSDYEFSNGCRAPPWRQIRGEICYVLVKPHDGETLCITCSAGGVFLNGGKTDDEGDVNYERKGSIYKNLVTFLREKSPKFSENMSKLGISFSEDQQKEKDQLGKAPKKEEAAALRKDISGSDKRSLEKNQINFWRNQMTKRWEPSLNWKTTVNYKGKGSAKEIQEDKHTGKLEKPRPSVSHGRAQLLRKSAEKIEETVSDSSSESEEDEEPPDHRQEASADLPSEYWQIQKLVKYLKGGNQTATVIALCSMRDFSLAQETCQLAIRDVGGLEVLINLLETDEVKCKIGSLKILKEISHNPQIRQNIVDLGGLPIMVNILDSPHKSLKCLAAETIANVAKFKRARRVVRQHGGITKLVALLDCAHDSTKPAQSSLYEARDVEVARCGALALWSCSKSHTNKEAIRKAGGIPLLARLLKTSHENMLIPVVGTLQECASEENYRAAIKAERIIENLVKNLNSENEQLQEHCAMAIYQCAEDKETRDLVRLHGGLKPLASLLNNTDNKERLAAVTGAIWKCSISKENVTKFREYKAIETLVGLLTDQPEEVLVNVVGALGECCQERENRVIVRKCGGIQPLVNLLVGINQALLVNVTKAVGACAVEPESMMIIDRLDGVRLLWSLLKNPHPDVKASAAWALCPCIKNAKDAGEMVRSFVGGLELIVNLLKSDNKEVLASVCAAITNIAKDQENLAVITDHGVVPLLSKLANTNNNKLRHHLAEAISRCCMWGRNRVAFGEHKAVAPLVRYLKSNDTNVHRATAQALYQLSEDADNCITMHENGAVKLLLDMVGSPDQDLQEAAAGCISNIRRLALATEKARYT

SEQ ID NO: 12185 - protein, 612 aa, Homo sapiens
MRDFSLAQETCQLAIRDVGGLEVLINLLETDEVKCKIGSLKILKEISHNPQIRQNIVDLGGLPIMVNILDSPHKSLKCLAAETIANVAKFKRARRVVRQHGGITKLVALLDCAHDSTKPAQSSLYEARDVEVARCGALALWSCSKSHTNKEAIRKAGGIPLLARLLKTSHENMLIPVVGTLQECASEENYRAAIKAERIIENLVKNLNSENEQLQEHCAMAIYQCAEDKETRDLVRLHGGLKPLASLLNNTDNKERLAAVTGAIWKCSISKENVTKFREYKAIETLVGLLTDQPEEVLVNVVGALGECCQERENRVIVRKCGGIQPLVNLLVGINQALLVNVTKAVGACAVEPESMMIIDRLDGVRLLWSLLKNPHPDVKASAAWALCPCIKNAKDAGEMVRSFVGGLELIVNLLKSDNKEVLASVCAAITNIAKDQENLAVITDHGVVPLLSKLANTNNNKLRHHLAEAISRCCMWGRNRVAFGEHKAVAPLVRYLKSNDTNVHRATAQALYQLSEDADNCITMHENGAVKTESRHVARLECSDNDLGSLQPPPPGFKRFSCLSLLSSWDYSFYWIWLGPLTRISRKLQLVVYPISAGWLLLQRRQDTLEI

SEQ ID NO: 12186 - protein, 350 aa, Homo sapiens
MFCCLGYEWLSGGCKTWHSAWVINTLADHRHRGTDFGGSPWLLIITVFLRSYKFAISLCTSYLCVSFLKTIFPSQNGHDGSTDVQQRARRSNRRRQEGIKIVLEDIFTLWRQVETKVRAKIRKMKVTTKVNRHDKINGKRKTAKEHLRKLSMKEREHGEKERQVSEAEENGKLDMKEIHTYMEMFQRAQALRRRAEDYYRCKITPSARKPLCNRVRMAAVEHRHSSGLPYWPYLTAETLKNRMGHQPPPPTQQHSIIDNSLSLKTPSECLLTPLPPSALPSADDNLKTPAECLLYPLPPSADDNLKTPPECLLTPLPPSAPPSVDDNLKTPPECVCSLPFHPQRMIISRN

SEQ ID NO: 12187 - protein, 231 aa, Homo sapiens
MEREKFQQKALKQTKQKKSKSAEFLMVKEDREATEGTGNPAFNMSSPDLSACQTAEKKVIRHDMPDRTLAAHQQKFRLPASAEPKGNEYGRNYFDPLMDEEINPRQCATEVSREDDDRIFYNRLTKLFDESRQGEPQDESGREETLNSEAPGSSNKSHEIHKEASEATTAHLEEFQRSQKTIILLGSSPLEQEIRSTSLHCMEDEMSHPWILLLKVTAVIRSRRYYREQRF

SEQ ID NO: 12188 - protein, 276 aa, Homo sapiens
MWITSLITMKDEDIFDLAGDPQDSLIPGPSPTPKQNPVCNEAFFGHQTFSLRETGLKSVHCQGQEAENMEREKFQQKALKQTKQKKSKSAEFLMVKEDREATEGTGNPAFNMSSPDLSACQTAEKKVIRHDMPDRTLAAHQQKFRLPASAEPKGNEYGRNYFDPLMDEEINPRQCATEVSREDESGREETLNSEAPGSSNKSHEIHKEASEATTAHLEEFQRSQKTIILLGSSPLEQEIRSTSLHCMEDEMSHPWILLLKVTAVIRSRRYYREQRF

SEQ ID NO: 12189 - protein, 183 aa, Homo sapiens
MEREKFQQKALKQTKQKKSKSAEFLMVKEDREATEGTGNPAFNMSSPDLSACQTAEKKVIRHDMPDRTLAAHQQKFRLPASAEPKGNEYGRNYFDPLMDEEINPRQCATEVSREGSIPKKIGPCSMDYDPNLLEEDDELHSQGDSLTDHSVKGKSTVWRIGEAEDYSQDISYLEELEEHRFSV

SEQ ID NO: 12190 - protein, 116 aa, Homo sapiens
MEREKFQQKALKQTKQKKSKSAEFLMVKEDREATEGTGNPAFNMSSPDLSACQTAEKKVIRHDMPDRTLAAHQQKFRLPASAEPKGNEYGRNYFDPLMDEEINPRQCATEVSREAF

SEQ ID NO: 12191 - protein, 135 aa, Homo sapiens
MEREKFQQKALKQTKQKKSKSAEFLMVKEDREATEGTGNPAFNMSSPDLSACQTAEKKVIRHDMPDRTLAAHQQKFRLPASAEPKGNEYGRNYFDPLMDEEINPRQCATEVSREGFEIRRGRPQRIHSYVTFKDW

SEQ ID NO: 12192 - protein, 312 aa, Homo sapiens
MSISNITVYMPSVLTLVGIPGLESVQCWIGIPFCAIYLIAMIGNSLLLSIIKSERSLHEPLYIFLGMLGATDIALASSIMPKMLGIFWFNVPEIYFDSCLLQMWFIHTLQGIESGILVAMALDRYVAICYPLRHANIFTHQLVIQIGTMVVLRAAILVAPCLVLIKCRFQFYHTTVISHSYCEHMAIVKLAAANVQVNKIYGLFVAFTVAGFDLTFITLSYIQIFITVFRLPQKEARFKAFNTCIAHICVFLQFYLLAFFSFFTHRFGSHISPYIHILFSSIYLLVPPFLNPLVYGAKTTQIRIHVVKMFCS

SEQ ID NO: 12193 - protein, 348 aa, Homo sapiens
MDLGNSGNDSVVTKFVLLGLTETAALQPILFVIFLLAYVTTIGGTLSILAAILMETKLHSPMYFFLGNLSLPDVGCVSVTVPAMLSHFISNDRSIPYKACLSELFFFHLLAGADCFLLTIMAYDRYLAICQSLTYSSRMSWGIQQALVGMSCVFSFTNALTQTVALSPLNFCGPNVINHFYCDLPQPFQLSCSSVHLNGQLLFVAAAFMGVAPLVLITVSYAHVAAAVLRIRSAEGRKKAFSTCSSHLTVVGIFYGTGVFSYTRLGSVESSDKDKGIGILNTVISPMLNPLIYWTSLLDVGCISHCSSDAGVSPGPPVQSSLCCLQFTALLSPPPGWGGLSPLNSHGL

SEQ ID NO: 12194 - protein, 701 aa, Homo sapiens
MAQAGVVGEVTQVLCAAGGALELPELRRRLRMGLSADALERLLRQRGRFVVAVRAGGAAAAPERVVLAASPLRLCRAHQGSKPGCVGLCAQLHLCRFMVYGACKFLRAGKNCRNSHSLTTEHNLSVLRTHGVDHLSYNELCQLLFQNDPWLLPEICQHYNKGDGPHGSCAFQKQCIKLHICQYFLQGECKFGTSCKRSHDFSNSENLEKLEKLGMSSDLVSRLPTIYRNAHDIKNKSSAPSRVPPLFVPQGTSERKDSSGSVSPNTLSQEEGDQICLYHIRKSCSFQDKCHRVHFHLPYRWQFLDRGKWEDLDNMELIEEAYCNPKIERILCSESASTFHSHCLNFNAMTYGATQARRLSTASSVTKPPHFILTTDWIWYWSDEFGSWQEYGRQGTVHPVTTVSSSDVEKAYLAYCTPGSDGQAATLKFQAGKHNYELDFKAFVQKNLVYGTTKKVCRRPKYVSPQDVTTMQTCNTKFPGPKSIPDYWDSSALPDPGFQKITLSSSSEEYQKVWNLFNRTLPFYFVQKIERVQNLALWEVYQWQKGQMQKQNGGKAVDERQLFHGTSAIFVDAICQQNFDWRVCGVHGTSYGKGSYFARDAAYSHHYSKSDTQTHTMFLARVLVGEFVRGNASFVRPPAKEGWSNAFYDSCVNSVSDPSIFVIFEKHQVYPEYVIQYTTSSKPSVTPSILLALGSLFSSRQ

SEQ ID NO: 12195 - protein, 312 aa, Homo sapiens
MARENSTFNSDFILLGIFNHSPTHTFLFFLVLAIFSVAFMGNSVMVLLIYLDTQLHTPMYLLLSQLSLMDLMLICTTVPKMAFNYLSGSKSISMAGCATQIFFYTSLLGSECFLLAVMAYDRYTAICHPLRYTNLMSPKICGLMTAFSWILGSTDGIIDVVATFSFSYCGSREIAHFFCDFPSLLILSCSDTSIFEKILFICCIVMIVFPVAIIIASYARVILAVIHMGSGEGRRKAFTTCSSHLLVVGMYYGAALFMYIRPTSDRSPTQDKMVSVFYTILTPMLNPLIYSLRNKEVTRAFMKILGKGKSGE

SEQ ID NO: 12196 - protein, 312 aa, Homo sapiens
MWPNITAAPFLLTGFPGLEAAHHWISIPFFAVYVCILLGNGMLLYLIKHDHSLHEPMYYFLTMLAGTDLMVTLTTMPTVMGILWVNHREISSVGCFLQAYFIHSLSVVESGSLLAMAYDCFIAIRNPLRYASILTNTRVIALGVGVFLRGFVSILPVILRLFSFSYCKSHVITRAFCLHQEIMRLACADITFNRLYPVILISLTIFLDCLIILFSYILILNTVIGIASGEERAKALNTCISHISCVLIFYVTVMGLTFIYRFGKNVPEVVHIIMSYIYFLFPPLMNPVIYSIKTKQIQYGIIRLLSKHRFSS

SEQ ID NO: 12197 - protein, 158 aa, Homo sapiens
MALEVLMLLAVLIWTGAENLHVKISCSLDWLMVSVIPVAESRNLYIFADELHLGMGCPANRIHTYVYEFIYLVRDCGIRTRVVSEETLLFQTELYFTPRNIDHDPQEIHLECSTSRKSVWLTPVSTENEIKLDPSPFIADFQTTAEELGLLSSSPNLL

SEQ ID NO: 12198 - protein, 317 aa, Homo sapiens
MEQSNYSVYADFILLGLFSNARFPWLLFALILLVFLTSIASNVVKIILIHIDSRLHTPMYFLLSQLSLRDILYISTIVPKMLVDQVMSQRAISFAGCTAQHFLYLTLAGAEFFLLGLMSYDRYVAICNPLHYPVLMSRKICWLIVAAAWLGGSIDGFLLTPVTMQFPFCASREINHFFCEVPALLKLSCTDTSAYETAMYVCCIMMLLIPFSVISGSYTRILITVYRMSEAEGRGKAVATCSSHMVVVSLFYGAAMYTYVLPHSYHTPEQDKAVSAFYTILTPMLNPLIYSLRNKDVTGALQKVVGRCVSSGKVTTF

SEQ ID NO: 12199 - protein, 321 aa, Homo sapiens
MLTLNKTDLIPASFILNGVPGLEDTQLWISFPFCSMYVVAMVGNCGLLYLIHYEDALHKPMYYFLAMLSFTDLVMCSSTIPKALCIFWFHLKDIGFDECLVQMFFTHTFTGMESGVLMLMALDRYVAICYPLRYSTILTNPVIAKVGTATFLRGVLLIIPFTFLTKLLPYCRGNILPHTYCDHMSVAKLSCGNVKVNAIYGLMVALLIWGFDILCITNSYTMILRAVVSLSSADARQKAFNTCTAHICAIVFSYTPAFFSFFSHRFGEHIIPPSCHIIVANIYLLLPPTMNPIVYGVKTKQIRDCVIRILSGSKDTKSYSM

SEQ ID NO: 12200 - protein, 479 aa, Homo sapiens
MTTLAGAVPRMMRPGPGQNYPRSGFPLEVSTPLGQGRVNQLGGVFINGRPLPNHIRHKIVEMAHHGIRPCVISRQLRVSHGCVSKILCRYQETGSIRPGAIGGSKPKQVTTPDVEKKIEEYKRENPGMFSWEIRDKLLKDAVCDRNTVPSVSSISRILRSKFGKGEEEEADLERKEAEESEKKAKHSIDGILSERASAPQSDEGSDIDSEPDLPLKRKQRRSRTTFTAEQLEELERAFERTHYPDIYTREELAQRAKLTEARVQVWFSNRRARWRKQAGANQLMAFNHLIPGGFPPTAMPTLPTYQLSETSYQPTSIPQAVSDPSSTVHRPQPLPPSTVHQSTIPSNPDSSSAYCLPSTRHGFSSYTDSFVPPSGPSNPMNPTIGNGLSPQVMGLLTNHGGVPHQPQTDYALSPLTGGLEPTTTVSASCSQRLDHMKSLDSLPTSQSYCPPTYSTTGYSMDPVTGYQYGQYGQSKPWTF

SEQ ID NO: 12201 - protein, 215 aa, Homo sapiens
MTTLAGAVPRMMRPGPGQNYPRSGFPLEVSTPLGQGRVNQLGGVFINGRPLPNHIRHKIVEMAHHGIRPCVISRQLRVSHGCVSKILCRYQETGSIRPGAIGGSKPKQVTTPDVEKKIEEYKRENPGMFSWEIRDKLLKDAVCDRNTVPSVSSISRILRSKFGKGEEEEADLERKEAEESEKKAKHSIDGILSERGKRWRLGRRTCWVTWRASAS

SEQ ID NO: 12202 - protein, 206 aa, Homo sapiens
MTTLAGAVPRMMRPGPGQNYPRSGFPLEVSTPLGQGRVNQLGGVFINGRPLPNHIRHKIVEMAHHGIRPCVISRQLRVSHGCVSKILCRYQETGSIRPGAIGGSKPKQVTTPDVEKKIEEYKRENPGMFSWEIRDKLLKDAVCDRNTVPSVSSISRILRSKFGKGEEEEADLERKEAEESEKKAKHSIDGILSERGKALVSGVSSH

SEQ ID NO: 12203 - protein, 403 aa, Homo sapiens
MTTLAGAVPRMMRPGPGQNYPRSGFPLEVSTPLGQGRVNQLGGVFINGRPLPNHIRHKIVEMAHHGIRPCVISRQLRVSHGCVSKILCRYQETGSIRPGAIGGSKPKQVTTPDVEKKIEEYKRENPGMFSWEIRDKLLKDAVCDRNTVPSVSSISRILRSKFGKGEEEEADLERKEAEESEKKAKHSIDGILSERASAPQSDEGSDIDSEPDLPLKRKQRRSRTTFTAEQLEELERAFERTHYPDIYTREELAQRAKLTEARVQVWFSNRRARWRKQAGANQLMAFNHLIPGGFPPTAMPTLPTYQLSETSYQPTSIPQAVSDPSSTVHRPQPLPPSTVHQSTIPSNPDSSSAYCLPSTRHGFSSYTDSFVPPSGPSNPMNPTIGNGLSPQVPFIISSQISRK

SEQ ID NO: 12204 - protein, 407 aa, Homo sapiens
MTTLAGAVPRMMRPGPGQNYPRSGFPLEVSTPLGQGRVNQLGGVFINGRPLPNHIRHKIVEMAHHGIRPCVISRQLRVSHGCVSKILCRYQETGSIRPGAIGGSKPKQVTTPDVEKKIEEYKRENPGMFSWEIRDKLLKDAVCDRNTVPSVSSISRILRSKFGKGEEEEADLERKEAEESEKKAKHSIDGILSERASAPQSDEGSDIDSEPDLPLKRKQRRSRTTFTAEQLEELERAFERTHYPDIYTREELAQRAKLTEARVQVWFSNRRARWRKQAGANQLMAFNHLIPGGFPPTAMPTLPTYQLSETSYQPTSIPQAVSDPSSTVHRPQPLPPSTVHQSTIPSNPDSSSAYCLPSTRHGFSSYTDSFVPPSGPSNPMNPTIGNGLSPQVPFIISSQISLGFKSF

SEQ ID NO: 12205 - protein, 483 aa, Homo sapiens
MTTLAGAVPRMMRPGPGQNYPRSGFPLEVSTPLGQGRVNQLGGVFINGRPLPNHIRHKIVEMAHHGIRPCVISRQLRVSHGCVSKILCRYQETGSIRPGAIGGSKPKVTTPDVEKKIEEYKRENPGMFSWEIRDKLLKDAVCDRNTVPSVSSISRILRSKFGKGEEEEADLERKEAEESEKKAKHSIDGILSERASAPQSDEGSDIDSEPDLPLKRKQRRSRTTFTAEQLEELERAFERTHYPDIYTREELAQRAKLTEARVQVWFSNRRARWRKQAGANQLMAFNHLIPGGFPPTAMPTLPTYQLSETSYQPTSIPQAVSDPSSTVHRPQPLPPSTVHQSTIPSNPDSSSAYCLPSTRHGFSSYTDSFVPPSGPSNPMNPTIGNGLSPQVMGLLTNHGGVPHQPQTDYALSPLTGGLEPTTTVSASCSQRLDHMKSLDSLPTSQSYCPPTYSTTGYSMDPVTGYQYGQYGQSAFHYLKPDIA

SEQ ID NO: 12206 - protein, 484 aa, Homo sapiens
MTTLAGAVPRMMRPGPGQNYPRSGFPLEVSTPLGQGRVNQLGGVFINGRPLPNHIRHKIVEMAHHGIRPCVISRQLRVSHGCVSKILCRYQETGSIRPGAIGGSKPKQVTTPDVEKKIEEYKRENPGMFSWEIRDKLLKDAVCDRNTVPSVSSISRILRSKFGKGEEEEADLERKEAEESEKKAKHSIDGILSERASAPQSDEGSDIDSEPDLPLKRKQRRSRTTFTAEQLEELERAFERTHYPDIYTREELAQRAKLTEARVQVWFSNRRARWRKQAGANQLMAFNHLIPGGFPPTAMPTLPTYQLSETSYQPTSIPQAVSDPSSTVHRPQPLPPSTVHQSTIPSNPDSSSAYCLPSTRHGFSSYTDSFVPPSGPSNPMNPTIGNGLSPQVMGLLTNHGGVPHQPQTDYALSPLTGGLEPTTTVSASCSQRLDHMKSLDSLPTSQSYCPPTYSTTGYSMDPVTGYQYGQYGQSAFHYLKPDIA

SEQ ID NO: 12207 - protein, 505 aa, Homo sapiens
MTTLAGAVPRMMRPGPGQNYPRSGFPLEVSTPLGQGRVNQLGGVFINGRPLPNHIRHKIVEMAHHGIRPCVISRQLRVSHGCVSKILCRYQETGSIRPGAIGGSKPKQVTTPDVEKKIEEYKRENPGMFSWEIRDKLLKDAVCDRNTVPSVSSISRILRSKFGKGEEEEADLERKEAEESEKKAKHSIDGILSERASAPQSDEGSDIDSEPDLPLKRKQRRSRTTFTAEQLEELERAFERTHYPDIYTREELAQRAKLTEARVQVWFSNRRARWRKQAGANQLMAFNHLIPGGFPPTAMPTLPTYQLSETSYQPTSIPQAVSDPSSTVHRPQPLPPSTVHQSTIPSNPDSSSAYCLPSTRHGFSSYTDSFVPPSGPSNPMNPTIGNGLSPQVMGLLTNHGGVPHQPQTDYALSPLTGGLEPTTTVSASCSQRLDHMKSLDSLPTSQSYCPPTYSTTGYSMDPVTGYQYGQYGQSAFHYLKPDIAWFQILLNTFDKSSGEEEDLEQ

SEQ ID NO: 12208 - protein, 314 aa, Homo sapiens
MSNEDMEQDNTTLLTEFVLTGLTYQPEWKMPLFLVFLVIYLITIVWNLGLIALIWNDPQLHIPMYFFLGSLAFVDAWISSTVTPKMLVNFLAKNRMISLSECMIQFFSFAFGGTTECFLLATMAYDRYVAICKPLLYPVIMNNSLCIRLLAFSFLGGFLHALIHEVLIFRLTFCNSNIIHHFYCDIIPLFMISCTDPSINFLMVFILSGSIQVFTIVTVLNSYTFALFTILKKKSVRGVRKAFSTCGAHLLSVSLYYGPLIFMYLRPASPQADDQDMIDSVFYTIIIPLLNPIIYSLRNKQVIDSFTKMVKRNV

SEQ ID NO: 12209 - protein, 338 aa, Homo sapiens
MWEANPEMFHKAEELFSKTTNNEVDDMDTSDTQWGWFYLAECGKWHMFQPDTNSQCSVSSEDIEKSFKTNPCGSISFTTSKFSYKIDFAEMKQMNLTTGKQRLIKRAPFSISAFSYICENEAIPMPPHWENVNTQVPYQLIPLHNQTHEYNEVANLFGKTMDRNRIKRIQRIQNLDLWEFFCRKKAQLKKKRGVPQINEQMLFHGTSSEFVEAICIHNFDWRINGIHGAVFGKGTYFARDAAYSSRFCKDDIKHGNTFQIHGVSLQQRHLFRTYKSMFLARVLIGDYINGDSKYMRPPSKDGSYVNLYDSCVDDTWNPKIFVVFDANQIYPEYLIDFH

SEQ ID NO: 12210 - protein, 257 aa, Homo sapiens
MWEVAHVSEMKQMNLTTGKQRLIKRAPFSISAFSYICENEAIPMPPHWENVNTQVPYQLIPLHNQTHEYNEVANLFGKTMDRNRIKRIQRIQNLDLWEFFCRKKAQLKKKRGVPQINEQMLFHGTSSEFVEAICIHNFDWRINGIHGAVFGKGTYFARDAAYSSRFCKDDIKHGNTFQIHGVSLQQRHLFRTYKSMFLARVLIGDYINGDSKYMRPPSKDGSYVNLYDSCVDDTWNPKIFVVFDANQIYPEYLIDFH

SEQ ID NO: 12211 - protein, 331 aa, Homo sapiens
MFHKAEELFSKTTNNEVDDMDTSDTQWGWFYLAECGKWHMFQPDTNSQCSVSSEDIEKSFKTNPCGSISFTTSKFSYKIDFAEMKQMNLTTGKQRLIKRAPFSISAFSYICENEAIPMPPHWENVNTQVPYQLIPLHNQTHEYNEVANLFGKTMDRNRIKRIQRIQNLDLWEFFCRKKAQLKKKRGVPQINEQMLFHGTSSEFVEAICIHNFDWRINGIHGAVFGKGTYFARDAAYSSRFCKDDIKHGNTFQIHGVSLQQRHLFRTYKSMFLARVLIGDYINGDSKYMRPPSKDGSYVNLYDSCVDDTWNPKIFVVFDANQIYPEYLIDFH

SEQ ID NO: 12212 - protein, 239 aa, Homo sapiens
MWEANPEMFHKAEELFSKTTNNEVDDMDTSDTQWGWFYLAECGKWHMFQPDTNSQCSVSSEDIEKSFKTNPCGSISFTTSKFSYKIDFAEMKQMNLTTGKQRLIKRAPFSISAFSYICENEAIPMPPHWENVNTQVPYQLIPLHNQTHEYNEVANLFGKTMDRNRIKRIQRIQNLDLWEFFCRKKAQLKKKRGVPQINEQMLFHGTSSEFVEAICIHNFDWRINGIHGAVFGKDNMWKL

SEQ ID NO: 12213 - protein, 271 aa, Homo sapiens
MAAEEPQQQKQEPLGSDSEGVNCLAYDEAIMAQQDRIQQEIAVQNPLVSERLELSVLYKEYAEDDNIYQQKIKDLHKKYSYIRKTRPDGNCFYRAFGFSHLEALLDDSKELQRFKAVSAKSKEDLVSQGFTEFTIEDFHNTFMDLIEQVEKQTSVADLLASFNDQSTSDYLVVYLRLLTSGYLQRESKFFEHFIEGGRTVKEFCQQEVEPMCKESDHIHIIALAQALSVSIQVEYMDRGEGGTTNPHIFPEGSEPKVYLLYRPGHYDILYK

SEQ ID NO: 12214 - protein, 315 aa, Homo sapiens
MMKPSWLSRTEFSKRLLCRTLWCQSGWSSRSYTRSMLKMTTSINRRSRTSTKSTRTSARPGLTATVSIGLSDSPTWRHCWMTARSCSGEKGGHWAPRQVGVYLLPGRVGCVSSRVSPSFPGDGLDSGLARRGSAVSALASGLVEEPMLGPPFHPTPRFKAVSAKSKEDLVSQGFTEFTIEDFHNTFMDLIEQVEKQTSVADLLASFNDQSTSDYLVVYLRLLTSGYLQRESKFFEHFIEGGRTVKEFCQQEVEPMCKESDHIHIIALAQALSVSIQVEYMDRGEGGTTNPHIFPEGSEPKVYLLYRPGHYDILYK

SEQ ID NO: 12215 - protein, 950 aa, Homo sapiens
MVFTPEDRLGKQCLLLPLLLLAAWKVGSGQLHYSVPEEAKHGTFVGRIAQDLGLELAELVPRLFRMASKDREDLLEVNLQNGILFVNSRIDREELCGRSAECSIHLEVIVDRPLQVFHVDVEVRDINDNPPLFPVEEQRVLIYESRLPDSVFPLEGASDADVGSNSILTYKLSSSEYFGLDVKINSDDNKQIGLLLKKSLDREEAPAHNLFLTATDGGKPELTGTVQLLVTVLDVNDNAPTFEQSEYEVRIFENADNGTTVIRLNASDRDEGANGAISYSFNSLVAAMVIDHFSIDRNTGEIVIRGNLDFEQENLYKILIDATDKGHPPMAGHCTVLVRILDKNDNVPEIALTSLSLPVREDAQFGTVIALISVNDLDSGANGQVNCSLTPHVPFKLVSTFKNYYSLVLDSALDRESVSAYELVVTARDGGSPSLWATASLSVEVADMNDNAPAFAQPEYTVFVKENNPPGCHIFTVSARDADAQENALVSYSLVERRVGERALSSYISVHAESGKVYALQPLDHEELELLQFQVSARDAGVPPLGSNVTLQVFVLDENDNAPALLAPRVGGTGGAVSELVPRSLGAGQVVAKVRAVDADSGYNAWLSYELQPPASSARFPFRVGLYTGEISTTRVLDEADSPRHRLLVLVKDHGEPALTATATVLVSLVESGQAPKASSRASVGAAGPEAALVDVNVYLIIAICAVSSLLVLTLLLYTALRCSAPPTEGACTADKPTLVCSSAVGSWSYSQQRRQRVCSGEGPPKMDLMAFSPSLSPCPIMMGKAENQDLNEDHDAKPRQPNPDWRYSASLRAGMHSSVHLEEAGILRAGPGGPDQQWPTVSSATPEPEAGEVSPPVGAGVNSNSWTFKYGPGNPKQSGPGELPDKFIIPGSPAIISIRQEPTNSQIDKSDFITFGKKEETKKKKKKKKGNKTQEKKEKGNSTTDNSDQ

SEQ ID NO: 12216 - protein, 686 aa, Homo sapiens
MVFTPEDRLGKQCLLLPLLLLAAWKVGSGQLHYSVPEEAKHGTFVGRIAQDLGLELAELVPRLFRMASKDREDLLEVNLQNGILFVNSRIDREELCGRSAECSIHLEVIVDRPLQVFHVDVEVRDINDNPPLFPVEEQRVLIYESRLPDSVFPLEGASDADVGSNSILTYKLSSSEYFGLDVKINSDDNKQIGLLLKKSLDREEAPAHNLFLTATDGGKPELTGTVQLLVTVLDVNDNAPTFEQSEYEVRIFENADNGTTVIRLNASDRDEGANGAISYSFNSLVAAMVIDHFSIDRNTGEIVIRGNLDFEQENLYKILIDATDKGHPPMAGHCTVLVRILDKNDNVPEIALTSLSLPVREDAQFGTVIALISVNDLDSGANGQVNCSLTPHVPFKLVSTFKNYYSLVLDSALDRESVSAYELVVTARDGGSPSLWATASLSVEVADMNDNAPAFAQPEYTVFVKENNPPGCHIFTVSARDADAQENALVSYSLVERRVGERALSSYISVHAESGKVYALQPLDHEELELLQFQPRQPNPDWRYSASLRAGMHSSVHLEEAGILRAGPGGPDQQWPTVSSATPEPEAGEVSPPVGAGVNSNSWTFKYGPGNPKQSGPGELPDKFIIPGSPAIISIRQEPTNSQIDKSDFITFGKKEETKKKKKKKKGNKTQEKKEKGNSTTDNSDQ

SEQ ID NO: 12217 - protein, 803 aa, Homo sapiens
MVFTPEDRLGKQCLLLPLLLLAAWKVGSGQLHYSVPEEAKHGTFVGRIAQDLGLELAELVPRLFRMASKDREDLLEVNLQNGILFVNSRIDREELCGRSAECSIHLEVIVDRPLQVFHVDVEVRDINDNPPLFPVEEQRVLIYESRLPDSVFPLEGASDADVGSNSILTYKLSSSEYFGLDVKINSDDNKQIGLLLKKSLDREEAPAHNLFLTATDGGKPELTGTVQLLVTVLDVNDNAPTFEQSEYEVRIFENADNGTTVIRLNASDRDEGANGAISYSFNSLVAAMVIDHFSIDRNTGEIVIRGNLDFEQENLYKILIDATDKGHPPMAGHCTVLVRILDKNDNVPEIALTSLSLPVREDAQFGTVIALISVNDLDSGANGQVNCSLTPHVPFKLVSTFKNYYSLVLDSALDRESVSAYELVVTARDGGSPSLWATASLSVEVADMNDNAPAFAQPEYTVFVKENNPPGCHIFTVSARDADAQENALVSYSLVERRVGERALSSYISVHAESGKVYALQPLDHEELELLQFQVSARDAGVPPLGSNVTLQVFVLDENDNAPALLAPRVGGTGGAVSELVPRSLGAGQVVAKVRAVDADSGYNAWLSYELQPPASSARFPFRVGLYTGEISTTRVLDEADSPRHRLLVLVKDHGEPALTATATVLVSLVESGQAPKASSRASVGAAGPEAALVDVNVYLIIAICAVSSLLVLTLLLYTALRCSAPPTEGACTADKPTLVCSSAVGSWSYSQQRRQRVCSGEGPPKMDLMAFSPSLSPCPIMMGKAENQDLNEDHDAKVSEFS

SEQ ID NO: 12218 - protein, 950 aa, Homo sapiens
MDYHWRGELGSWRLLLLLLLLAAWKVGSGQLHYSVPEEAKHGTFVGRIAQDLGLELAELVPRLFRVASKRHRDLLEVSLQNGILFVNSRIDREELCGRSAECSIHLEVIVDRPLQVFHVDVEVKDVNDNPPVFRVKDQKLFVSESRMPDSRFPLEGASDADVGANSVLTYRLSSHDYFMLDVNSKNDENKLVELVLRKSLDREDAPAHHLFLTATDGGKPELTGTVQLLVTVLDVNDNAPTFEQSEYEVRIFENADNGTTVIKLNASDPDEGANGAISYSFNSLVETMVIDHFSIDRNTGEIVIRGNLDFEQENLYKILIDATDKGHPPMAGHCTVLVRILDKNDNVPEIALTSLSLPVREDAQFGTVIALISVNDLDSGANGQVTCSLMPHVPFKLVSTFKNYYSLVLDSALDRERVSAYELVVTARDGGSPSLWATASLSVEVADVNDNAPAFAQPEYTVFVKENNPPGCHIFTVSARDADAQENALVSYSLVERRVGERSLSSYISVHTESGKVYALQPLDHEELELLQFQVSARDAGVPPLGSNVTLQVFVLDENDNAPALLEPRVGGTGGAASKLVPRSVGAGHVVAKVRAVDADSGYNAWLSYELQPAASSPRIPFRVGLYTGEISTTRVLDEADSPRHRLLVLVKDHGEPALTATATVLVSLVESGQAPKASSRQSAGVLGPEAALVDVNVYLIIAICAVSSLLVLTLLLYTALRCSALPTEGGCRAGKPTLVCSSAVGSWSYSQQQPQRVCSGEGPPKTDLMAFSPCLPPDLGSVDVGEEQDLNVDHGLKPRQPNPDWRYSASLRAGMHSSVHLEEAGILRAGPGGPDQQWPTVSSATPEPEAGEVSPPVGAGVNSNSWTFKYGPGNPKQSGPGELPDKFIIPGSPAIISIRQEPTNSQIDKSDFITFGKKEETKKKKKKKKGNKTQEKKEKGNSTTDNSDQ

SEQ ID NO: 12219 - protein, 814 aa, Homo sapiens
MDYHWRGELGSWRLLLLLLLLAAWKVGSGQLHYSVPEEAKHGTFVGRIAQDLGLELAELVPRLFRVASKRHRDLLEVSLQNGILFVNSRIDREELCGRSAECSIHLEVIVDRPLQVFHVDVEVKDVNDNPPVFRVKDQKLFVSESRMPDSRFPLEGASDADVGANSVLTYRLSSHDYFMLDVNSKNDENKLVELVLRKSLDREDAPAHHLFLTATDGGKPELTGTVQLLVTVLDVNDNAPTFEQSEYEVRIFENADNGTTVIKLNASDPDEGANGAISYSFNSLVETMVIDHFSIDRNTGEIVIRGNLDFEQENLYKILIDATDKGHPPMAGHCTVLVRILDKNDNVPEIALTSLSLPVREDAQFGTVIALISVNDLDSGANGQVTCSLMPHVPFKLVSTFKNYYSLVLDSALDRERVSAYELVVTARDGGSPSLWATASLSVEVADVNDNAPAFAQPEYTVFVKENNPPGCHIFTVSARDADAQENALVSYSLVERRVGERSLSSYISVHTESGKVYALQPLDHEELELLQFQVSARDAGVPPLGSNVTLQVFVLDENDNAPALLEPRVGGTGGAASKLVPRSVGAGHVVAKVRAVDADSGYNAWLSYELQPAASSPRIPFRVGLYTGEISTTRVLDEADSPRHRLLVLVKDHGEPALTATATVLVSLVESGQAPKASSRQSAGVLGPEAALVDVNVYLIIAICAVSSLLVLTLLLYTALRCSALPTEGGCRAGKPTLVCSSAVGSWSYSQQQPQRVCSGEGPPKTDLMAFSPCLPPDLGSVDVGEEQDLNVDHGLKVSPFKFRTHKFYLWKL

SEQ ID NO: 12220 - protein, 289 aa, Homo sapiens
MMSYLKQPPYAVNGLSLTTSGMDLLHPSVGYPATPRKQRRERTTFTRAQLDVLEALFAKTRYPDIFMREEVALKINLPESRVQVWFKNRRAKCRQQQQQQQNGGQNKVRPAKKKTSPAREVSSESGTSGQFTPPSSTSVPTIASSSAPVSIWSPASISPLSDPLSTSSSCMQRSYPMTYTQASGYSQGYAGSTSYFGGMDCGSYLTPMHHQLPGPGATLSPMGTNAVTSHLNQSPASLSTQGYGASSLGFNSTTDCLDYKDQTASWKLNFNADCLDYKDQTSSWKFQVL

SEQ ID NO: 12221 - protein, 297 aa, Homo sapiens
MMSYLKQPPYAVNGLSLTTSGMDLLHPSVGYPGPWASCPAATPRKQRRERTTFTRAQLDVLEALFAKTRYPDIFMREEVALKINLPESRVQVWFKNRRAKCRQQQQQQQNGGQNKVRPAKKKTSPAREVSSESGTSGQFTPPSSTSVPTIASSSAPVSIWSPASISPLSDPLSTSSSCMQRSYPMTYTQASGYSQGYAGSTSYFGGMDCGSYLTPMHHQLPGPGATLSPMGTNAVTSHLNQSPASLSTQGYGASSLGFNSTTDCLDYKDQTASWKLNFNADCLDYKDQTSSWKFQVL

SEQ ID NO: 12222 - protein, 662 aa, Homo sapiens
MVSQSTVRQDSPVEPWEGISDHSGIIDGSPRLLNTDHPPCQLDIRLMRHKAVWINPQDVQQQPQDLQSQVPAAGNSGTHFVTDAASPSGPSPSCLGDSLAETTLSEDTTDSVGSASPHGSSEKSSSFSLSSTEVHMVRPGYSHRVSLPTSPGILATSPYPETDSAFFEPSHLTSAADEGAVQVSRRTISSNSFSPEVFVLPVDVEKENAHFYVADMIISAMEKMKCNILSQQQTESWSKEVSGLLGSDQPDSEMTFDTNIKQESGSSTSSYSGYEGCAVLQVSPVTETRTYHDVKEICKCDVDEFVILELGDFNDITETCSCSCSSSKSVTYEPDFNSAELLAKELYRVFQKCWILSVVNSQLAGSLSAAGSIVVNEECVRKDFESSMNVVQEIKFKSRIRGTEDWAPPRFQIIFNIHPPLKRDLVVAAQNFFCAGCGTPVEPKFVKRLRYCEYLGKYFCDCCHSYAESCIPARILMMWDFKKYYVSNFSKQLLDSIWHQPIFNLLSIGQSLYAKAKELDRVKEIQEQLFHIKKLLKTCRFANSALKEFEQVPGHLTDELHLFSLEDLVRIKKGLLAPLLKDILKASLAHVAGCELCQGKGFICEFCQNTTVIFPFQTATCRRCSACRACFHKQCFQSSECPRCARITARRKLLESVASAAT

SEQ ID NO: 12223 - protein, 635 aa, Homo sapiens
MVSQSTVRQDSPVEPWEGISDHSGIIDGSPRLLNTDHPPCQLDIRLMRHKAVWINPQDVQQQPQDLQSQVPAAGNSGTHFVTDAASPSGPSPSCLGDSLAETTLSEDTTDSVGSASPHGSSEKSSSFSLSSTEVHMVRPGYSHRVSLPTSPGILATSPYPETDSAFFEPSHLTSAADEGAVQVSRRTISSNSFSPEVFVLPVDVEKENAHFYVADMIISAMEKMKCNILSQQQTESWSKEVSGLLGSDQPDSEMTFDTNIKQESGSSTSSYSGYEGCAVLQVSPVTETRTYHDVKEICKCDVDEFVILELGDFNDITETCSCSCSSSKSVTYEPDFNSAELLAKELYRVFQKCWILSVVNSQLAGSLSAAGSIVVNEECVRKDFESSMNVVQEIKFKSRIRGTEDWAPPRFQIIFNIHPPLKRDLVVAAQNFFCAGCGTPVEPKFVKRLRYCEYLGKYFCDCCHSYAESCIPARILMMWDFKKYYVSNFSKQLLDSIWHQPIFNLLSIGQSLYAKAKELDRVKEIQEQLFHIKKLLKTCRFANSCVKERALFVNFARIRLSSSHFRQQHVEDVQRAGLAFTNSASSPPSAPGVRGSQRGENFWKVWPLQQHDAPEYCEKDCSTCLMITPICVYYW

SEQ ID NO: 12224 - protein, 595 aa, Homo sapiens
MVSNHYFLLCVNLPLREIHTPGPSPSCLGDSLAETTLSEDTTDSVGSASPHGSSEKSSSFSLSSTEVHMVRPGYSHRVSLPTSPGILATSPYPETDSAFFEPSHLTSAADEGAVQVSRRTISSNSFSPEVFVLPVDVEKENAHFYVADMIISAMEKMKCNILSQQQTESWSKEVSGLLGSDQPDSEMTFDTNIKQESGSSTSSYSGYEGCAVLQVSPVTETRTYHDVKEICKCDVDEFVILELGDFNDITETCSCSCSSSKSVTYEPDFNSAELLAKELYRVFQKCWILSVVNSQLAGSLSAAGSIVVNEECVRKDFESSMNVVQEIKFKSRIRGTEDWAPPRFQIIFNIHPPLKRDLVVAAQNFFCAGCGTPVEPKFVKRLRYCEYLGKYFCDCCHSYAESCIPARILMMWDFKKYYVSNFSKQLLDSIWHQPIFNLLSIGQSLYAKAKELDRVKEIQEQLFHIKKLLKTCRFANSALKEFEQVPGHLTDELHLFSLEDLVRIKKGLLAPLLKDILKASLAHVAGCELCQGKGFICEFCQNTTVIFPFQTATCRRCSACRACFHKQCFQSSECPRCARITARRKLLESVASAAT

SEQ ID NO: 12225 - protein, 321 aa, Homo sapiens
MVSQSTVRQDSPVEPWEGISDHSGIIDGSPRLLNTDHPPCQLDIRLMRHKAVWINPQDVQQQPQDLQSQVPAAGNSGTHFVTDAASPSGPSPSCLGDSLAETTLSEDTTDSVGSASPHGSSEKSSSFSLSSTEVHMVRPGYSHRVSLPTSPGILATSPYPETDSAFFEPSHLTSAADEGAVQVSRRTISSNSFSPEVFVLPVDVEKENAHFYVADMIISAMEKMKCNILSQQQTESWSKEVSGLLGSDQPDSEMTFDTNIKQESGSSTSSYSGYEGCAVLQVSPVTETRTYHDVKEICKCDVDEFVILVSLMSQTSILQNY

SEQ ID NO: 12226 - protein, 147 aa, Homo sapiens
MVSQSTVRQDSPVEPWEGISDHSGIIDGSPRLLNTDHPPCQLDIRLMRHKAVWINPQDVQQQPQDLQSQVPAAGNSGTHFVTDAASPSGPSPSCLGDSLAETTLSEDTTDSVGSASPHGSSEKSSSFSLSSTEVHKACMRKPRSWTE

SEQ ID NO: 12227 - protein, 527 aa, Homo sapiens
MVRPGYSHRVSLPTSPGILATSPYPETDSAFFEPSHLTSAADEGAVQVSRRTISSNSFSPEVFVLPVDVEKENAHFYVADMIISAMEKMKCNILSQQQTESWSKEVSGLLGSDQPDSEMTFDTNIKQESGSSTSSYSGYEGCAVLQVSPVTETRTYHDVKEICKCDVDEFVILELGDFNDITETCSCSCSSSKSVTYEPDFNSAELLAKELYRVFQKCWILSVVNSQLAGSLSAAGSIVVNEECVRKDFESSMNVVQEIKFKSRIRGTEDWAPPRFQIIFNIHPPLKRDLVVAAQNFFCAGCGTPVEPKFVKRLRYCEYLGKYFCDCCHSYAESCIPARILMMWDFKKYYVSNFSKQLLDSIWHQPIFNLLSIGQSLYAKAKELDRVKEIQEQLFHIKKLLKTCRFANSALKEFEQVPGHLTDELHLFSLEDLVRIKKGLLAPLLKDILKASLAHVAGCELCQGKGFICEFCQNTTVIFPFQTATCRRCSACRACFHKQCFQSSECPRCARITARRKLLESVASAAT

SEQ ID NO: 12228 - protein, 950 aa, Homo sapiens
MLYSSRGDPEGQPLLLSLLILAMWVVGSGQLHYSVPEEAEHGTFVGRIAQDLGLELAELVPRLFQLDSKGRGDLLEVNLQNGILFVNSRIDREELCGRSAECSIHLEVIVDRPLQVFHVDVEVKDINDNPPVFPATQKNLFIAESRPLDSRFPLEGASDADIGENALLTYRLSPNEYFFLDVPTSNQQVKPLGLVLRKLLDREETPELHLLLTATDGGKPELTGTVQLLITVLDNNDNAPVFDRTLYTVKLPENVSIGTLVIHPNASDLDEGLNGDIIYSFSSDVSPDIKSKFHMDPLSGAITVIGHMDFEESRAHKIPVEAVDKGFPPLAGHCTLLVEVVDVNDNAPQLTIKTLSVPVKEDAQLGTVIALISVIDLDADANGQVTCSLTPHVPFKLVSTYKNYYSLVLDRALDRESVSAYELVVTARDGGSPSLWATARVSVEVADVNDNAPAFAQSEYTVFVKENNPPGCHIFTVSARDADAQENALVSYSLVERRLGERSLSSYVSVHAESGKVYALQPLDHEELELLQFQVSARDAGVPPLGSNVTLQVFVLDENDNAPALLTPRMRGTDGAVSEMVLRSVGAGVVVGKVRAVDADSGYNAWLSYELQPETASASIPFRVGLYTGEISTTRALDETDAPRQRLLVLVKDHGEPALTATATVLVSLVESGQAPKSSSRASVGATGPEVTLVDVNVYLIIAICAVSSLLVLTLLLYTVLRCSAMPTEGECAPGKPTLVCSSAVGSWSYSQQRRQRVCSGEGKQKTDLMAFSPGLSPCAGSTERTGEPSASSDSTGKPRQPNPDWRYSASLRAGMHSSVHLEEAGILRAGPGGPDQQWPTVSSATPEPEAGEVSPPVGAGVNSNSWTFKYGPGNPKQSGPGELPDKFIIPGSPAIISIRQEPTNSQIDKSDFITFGKKEETKKKKKKKKGNKTQEKKEKGNSTTDNSDQ

SEQ ID NO: 12229 - protein, 842 aa, Homo sapiens
MLYSSRGDPEGQPLLLSLLILAMWVVGSGQLHYSVPEEAEHGTFVGRIAQDLGLELAELVPRLFQLDSKGRGDLLEVNLQNGILFVNSRIDREELCGRSAECSIHLEVIVDRPLQVFHVDVEVKDINDNPPVFPATQKNLFIAESRPLDSRFPLEGASDADIGENALLTYRLSPNEYFFLDVPTSNQQVKPLGLVLRKLLDREETPELHLLLTATDGGKPELTGTVQLLITVLDNNDNAPVFDRTLYTVKLPENVSIGTLVIHPNASDLDEGLNGDIIYSFSSDVSPDIKSKFHMDPLSGAITVIGHMDFEESRAHKIPVEAVDKGFPPLAGHCTLLVEVVDVNDNAPQLTIKTLSVPVKEDAQLGTVIALISVIDLDADANGQVTCSLTPHVPFKLVSTYKNYYSLVLDRALDRESVSAYELVVTARDGGSPSLWATARVSVEVADVNDNAPAFAQSEYTVFVKENNPPGCHIFTVSARDADAQENALVSYSLVERRLGERSLSSYVSVHAESGKVYALQPLDHEELELLQFQVSARDAGVPPLGSNVTLQVFVLDENDNAPALLTPRMRGTDGAVSEMVLRSVGAGVVVGKVRAVDADSGYNAWLSYELQPETASASIPFRVGLYTGEISTTRALDETDAPRQRLLVLVKDHGEPALTATATVLVSLVESGQAPKSSSRASVGATGPEVTLVDVNVYLIIAICAVSSLLVLTLLLYTVLRCSAMPTEGECAPGKPTLVCSSAVGSWSYSQQRRQRVCSGEGKQKTDLMAFSPGLSPCAGSTERTGEPSASSDSTGKVGFSSILFIYIIFFLERYYRLLPGAVQIVLFIFLEIQQIFFLIK

SEQ ID NO: 12230 - protein, 342 aa, Homo sapiens
MQAVDNLTSAPGNTSLCTRDYKITQVLFPLLYTVLFFVGLITNGLAMRIFFQIRSKSNFIIFLKNTVISDLLMILTFPFKILSDAKLGTGPLRTFVCQVTSVIFYFTMYISISFLGLITIDRYQKTTRPFKTSNPKNLLGAKILSVVIWAFMFLLSLPNMILTNRQPRDKNVKKCSFLKSEFGLVWHEIVNYICQVIFWINFLIVIVCYTLITKELYRSYVRTRGVGKVPRKKVNVKVFIIIAVFFICFVPFHFARIPYTLSQTRDVFDCTAENTLFYVKESTLWLTSLNACLDPFIYFFLCKSFRNSLISMLKCPNSATSLSQDNRKKEQDGGDPNEETPM

SEQ ID NO: 12231 - protein, 941 aa, Homo sapiens
MVIIGPRGPGSQRLLLSLLLLAAWEVGSGQLHYSVYEEAKHGTFVGRIAQDLGLELAELVPRLFRVASKRHGDLLEVNLQNGILFVNSRIDREKLCGRSAECSIHLEVIVDRPLQVFHVDVEVKDINDNPPVFREREQKVPVSESAPLDSHFPLEGASDADIGVNSLLTYALSLNENFELKIKTKKDKSILPELVLRKLLDREQTPKLNLLLMVIDGGKPELTGSVQIQITVLDVNDNGPAFDKPSYKVVLSENVQNDTRVIQLNASDPDEGLNGEISYGIKMILPVSEKCMFSINPDTGEIRIYGELDFEENNAYEIQVNAIDKGIPSMAGHSMVLVEVLDVNDNVPEVMVTSLSLPVQEDAQVGTVIALISVSDRDSGANGQVICSLTPHVPFKLVSTYKNYYSLVLDSALDRESVSAYELVVTARDGGSPSLWATARVSVEVADVNDNAPAFAQPEYTVFVKENNPPGCHIFTVSAWDADAQKNALVSYSLVERRVGEHALSSYVSVHAESGKVYALQPLDHEELELLQFQVSARDAGVPPLGSNVTLQVFVLDENDNAPALLATPAGSAGGAVSELVPRSVGAGHVVAKVRAVDADSGYNAWLSYELQPAAVGAHIPFHVGLYTGEISTTRILDEADAPRHRLLVLVKDHGEPALTSTATVLVSLVENGQAPKTSSRASVGAVDPEAALVDINVYLIIAICAVSSLLVLTLLLYTALRCSAPPTVSRCAPGKPTLVCSSAVGSWSYSQQRRQRVCSAESPPKTDLMAFSPSLQLSREDCLNPPSEPRQPNPDWRYSASLRAGMHSSVHLEEAGILRAGPGGPDQQWPTVSSATPEPEAGEVSPPVGAGVNSNSWTFKYGPGNPKQSGPGELPDKFIIPGSPAIISIRQEPTNSQIDKSDFITFGKKEETKKKKKKKKGNKTQEKKEKGNSTTDNSDQ

SEQ ID NO: 12232 - protein, 792 aa, Homo sapiens
MVIIGPRGPGSQRLLLSLLLLAAWEVGSGQLHYSVYEEAKHGTFVGRIAQDLGLELAELVPRLFRVASKRHGDLLEVNLQNGILFVNSRIDREKLCGRSAECSIHLEVIVDRPLQVFHVDVEVKDINDNPPVFREREQKVPVSESAPLDSHFPLEGASDADIGVNSLLTYALSLNENFELKIKTKKDKSILPELVLRKLLDREQTPKLNLLLMVIDGGKPELTGSVQIQITVLDVNDNGPAFDKPSYKVVLSENVQNDTRVIQLNASDPDEGLNGEISYGIKMILPVSEKCMFSINPDTGEIRIYGELDFEENNAYEIQVNAIDKGIPSMAGHSMVLVEVLDVNDNVPEVMVTSLSLPVQEDAQVGTVIALISVSDRDSGANGQVICSLTPHVPFKLVSTYKNYYSLVLDSALDRESVSAYELVVTARDGGSPSLWATARVSVEVADVNDNAPAFAQPEYTVFVKENNPPGCHIFTVSAWDADAQKNALVSYSLVERRVGEHALSSYVSVHAESGKVYALQPLDHEELELLQFQVSARDAGVPPLGSNVTLQVFVLDENDNAPALLATPAGSAGGAVSELVPRSVGAGHVVAKVRAVDADSGYNAWLSYELQPAAVGAHIPFHVGLYTGEISTTRILDEADAPRHRLLVLVKDHGEPALTSTATVLVSLVENGQAPKTSSRASVGAVDPEAALVDINVYLIIAICAVSSLLVLTLLLYTALRCSAPPTVSRCAPGKPTLVCSSAVGSWSYSQQRRQRVCSAESPPKTDLMAFSPSLQLSREDCLNPPSEVSY

SEQ ID NO: 12233 - protein, 227 aa, Homo sapiens
MAAQRPLRVLCLAGFRQSERGFREKTGALRKALRGRAELVCLSGPHPVPDPPGPEGARSDFGSCPPEEQPRGWWFSEQEADVFSALEEPAVCRGLEESLGMVAQALNRLGPFDGLLGFSQGAALAALVCALGQAGDPRFPLPRFILLVSGFCPRGIGFKESILQRPLSLPSLHVFGDTDKVIPSQESVQLASQFPGAITLTHSGGHFIPAAAPQRQAYLKFLDQFAE

SEQ ID NO: 12234 - protein, 796 aa, Homo sapiens
MEAGGERFLRQRQVLLLFVFLGGSLAGSESRRYSVAEEKEKGFLIANLAKDLGLRVEELAARGAQVVSKGNKQHFQLSHQTGDLLLNEKLDREELCGPTEPCILHFQILLQNPLQFVTNELRIIDVNDHSPVFFENEMHLKILESTLPGTVIPLGNAEDLDVGRNSLQNYTITPNSHFHVLTRSRRDGRKYPELVLDKALDPEEQPELSLTLTALDGGSPPRSGTAQINIQVLDINDNAPEFAQPLYEVAVLENTPVNSVIVTVSASDLDTGSFGTISYAFFHASEEIRKTFQLNPITGDMQLVKYLNFEAINSYEVDIEAKDGGGLSGKSTVIVQVVDVNDNPPELTLSSVNSPIPENSGETVLAVFSVSDLDSGDNGRVMCSIENNLPFFLKPSVENFYTLVSEGALDRETRSEYNITITITDLGTPRLKTKYNITVLVSDVNDNAPAFTQISYTLFVRENNSPALHIGSVSATDRDSGTNAQVTYSLLPPQDPHLPLSSLVSINADNGHLFALRSLDYEALQAFEFRVGATDRGSPALSSEALVRVLVLDANDNSPFVLYPLQNGSAPCTELVPRAAEPGYLVTKVVAVDGDSGQNAWLSYQLLKATEPGLFGVWAHNGEVRTARLLSERDAAKHRLVVLVKDNGEPPRSATATLHVLLVDGFSQPYLPLPEAAPAQAQADLLTVYLVVALASVSSLFLFSVLLFVAVRLCRRSRAASVGRCSVPEGPFPGQMVDVSGTGTLSQSYQYEVCLTGGSGTNEFKFLKPIIPNFVAQGAERVSEANPSFRKSFEFS

SEQ ID NO: 12235 - protein, 338 aa, Homo sapiens
MINSTSTQPPDESCSQNLLITQQIIPVLYCMVFIAGILLNGVSGWIFFYVPSSKSFIIYLKNIVIADFVMSLTFPFKILGDSGLGPWQLNVFVCRVSAVLFYVNMYVSIVFFGLISFDRYYKIVKPLWTSFIQSVSYSKLLSVIVWMLMLLLAVPNIILTNQSVREVTQIKCIELKSELGRKWHKASNYIFVAIFWIVFLLLIVFYTAITKKIFKSHLKSSRNSTSVKKKSSRNIFSIVFVFFVCFVPYHIARIPYTKSQTEAHYSCQSKEILRYMKEFTLLLSAANVCLDPIIYFFLCQPFREILCKKLHIPLKAQNDLDISRIKRGNTTLESTDTL

SEQ ID NO: 12236 - protein, 424 aa, Homo sapiens [sequence omitted]

SEQ ID NO: 12237 - protein, 795 aa, Homo sapiens
MKKLGRIHPNRQVLAFILMVFLSQVRLEPIRYSVLEETESGSFVAHLAKDLGLGIGELASRSARVLSDDDKQRLQLDRQTGDLLLREKLDREELCGPIEPCVLHFQVFLEMPVQFFQGELLIQDINDHSPIFPEREVLLKILENSQPGTLFPLLIAEDLDVGSNGLQKYTISPNSHFHILTRNHSEGKKYPDLVQDKPLDREEQPEFSLTLVALDGGSPPRSGTVMVRILIMDINDNAPEFVHTPYGVQVLENSPLDSPIVRVLARDIDAGNFGSVSYGLFQASDEIKQTFSINEVTGEILLKKKLDFEKIKSYHVEIEATDGGGLSGKGTVVIEVVDVNDNPPELIISSLTSSIPENAPETVVSIFRIRDRDSGENGKMICSIPDNLPFILKPTLKNFYTLVTERPLDRETSAEYNITIAVTDLGTPRLKTQQNITVQVSDVNDNAPAFTQTSYTLFVRENNSPALHIGSVSATDRDSGTNAQVTYSLLPPQDPHLPLASLVSINADNGHLFALRSLDYEALQAFEFRVGASDRGSPALSSEALVRVLVLDTNDNSPFVLYPLQNGSAPCTELVPRAAEPGYLVTKVVAVDGDSGQNAWLSYQLLKATEPGLFGVWAHNGEVRTARLLSERDAAKHRLVVLVKDNGEPPRSATATLHVLLVDGFSQPYLPLPEAAPAQAQADSLTVYLVVALASVSSLFLFSVLLFVAVRLCRRSRAASVGRCSVPEGPFPGHLVDVSGTGTLSQSYQYEVCLTGDSGTGEFKFLKPIFPNLLVQDTGREVKENPKFRNSLVFS

SEQ ID NO: 12238 - protein, 415 aa, Homo sapiens; identical to SEQ ID NO: 271

SEQ ID NO: 12239 - protein, 387 aa, Homo sapiens
MPTTIEREFEELDTQRRWQPLYLEIRNESHDYPHRVAKFPENRNRNRYRDVSPYDHSRVKLQNAENDYINASLVDIEEAQRSYILTQGPLPNTCCHFWLMVWQQKTKAVVMLNRIVEKESVKCAQYWPTDDQEMLFKETGFSVKLLSEDVKSYYTVHLLQLENINSGETRTISHFHYTTWPDFGVPESPASFLNFLFKVRESGSLNPDHGPAVIHCSAGIGRSGTFSLVDTCLVLMEKGDDINIKQVLLNMRKYRMGLIQTPDQLRFSYMAIIEGAKCIKGDSSIQKRWKELSKEDLSPAFDHSPNKIMTEKYNGNRIGLEEEKLTGDRCTGLSSKMQDTMEENSESALRKRIREDRKATTAQKVQQMKQRLNENERKRKRPRLTDT

SEQ ID NO: 12240 - protein, 353 aa, Homo sapiens
MPTTIEREFEELDTQRRWQPLYLEIRNESHDYPHRVAKFPENRNRNRYRDVSPYDHSRVKLQNAENDYINASLVDIEEAQRSYILTQGPLPNTCCHFWLMVWQQKTKAVVMLNRIVEKESVKCAQYWPTDDQEMLFKETGFSVKLLSEDVKSYYTVHLLQLENINSGETRTISHFHYTTWPDFGVPESPASFLNFLFKVRESGSLNPDHGPAVIHCSAGIGRSGTFSLVDTCLVLMEKGDDINIKQVLLNMRKYRMGLIQTPDQLRFSYMAIIEGAKCIKGDSSIQKRWKELSKEDLSPAFDHSPNKIMTEKYNGNRIGLEEEKLTGDRCTGLSSKMQDTMEENSERPRLTDT

SEQ ID NO: 12241 - protein, 410 aa, Homo sapiens
MPTTIEREFEELDTQRRWQPLYLEIRNESHDYPHRVAKFPENRNRNRYRDVSPYDHSRVKLQNAENDYINASLVDIEEAQRSYILTQGPLPNTCCHFWLMVWQQKTKAVVMLNRIVEKESVKCAQYWPTDDQEMLFKETGFSVKLLSEDVKSYYTVHLLQLENINYIENLWITLYLKLLMLDVKRSLKSGETRTISHFHYTTWPDFGVPESPASFLNFLFKVRESGSLNPDHGPAVIHCSAGIGRSGTFSLVDTCLVLMEKGDDINIKQVLLNMRKYRMGLIQTPDQLRFSYMAIIEGAKCIKGDSSIQKRWKELSKEDLSPAFDHSPNKIMTEKYNGNRIGLEEEKLTGDRCTGLSSKMQDTMEENSESALRKRIREDRKATTAQKVQQMKQRLNENERKRKRPRLTDT

SEQ ID NO: 12242 - protein, 281 aa, Homo sapiens
MAGTWLLLLLALGCPALPTGVGGTPFPSLAPPIMLLVDGKQQMVVVCLVLDVAPPGLDSPIWFSAGNGSALDAFTYGPSPATDGTWTNLAHLSLPSEELASWEPLVCHTGPGAEGHSRSTQPMHLSGEASTARTCPQEPLRGTPGGALWLGVLRLLLFKLLLFDLLLTCSCLCDPAGPLPSPATTTRLRALGSHRLHPATETGGREATSSPRPQPRDRRWGDTPPGRKPGSPVWGEGSYLSSYPTCPAQAWCSRSALRAPSSSLGAFFAGDLPPPLQAGAA

SEQ ID NO: 12243 - protein, 174 aa, Homo sapiens
MAGTWLLLLLALGCPALPTGEASTARTCPQEPLRGTPGGALWLGVLRLLLFKLLLFDLLLTCSCLCDPAGPLPSPATTTRLRALGSHRLHPATETGGREATSSPRPQPRDRRWGDTPPGRKPGSPVWGEGSYLSSYPTCPAQAWCSRSALRAPSSSLGAFFAGDLPPPLQAGAA

SEQ ID NO: 12244 - protein, 256 aa, Homo sapiens
MAGTWLLLLLALGCPALPTGPVSFPSSPEAATTGPIWFSAGNGSALDAFTYGPSPATDGTWTNLAHLSLPSEELASWEPLVCHTGPGAEGHSRSTQPMHLSGEASTARTCPQEPLRGTPGGALWLGVLRLLLFKLLLFDLLLTCSCLCDPAGPLPSPATTTRLRALGSHRLHPATETGGREATSSPRPQPRDRRWGDTPPGRKPGSPVWGEGSYLSSYPTCPAQAWCSRSALRAPSSSLGAFFAGDLPPPLQAGAA

SEQ ID NO: 12245 - protein, 296 aa, Homo sapiens
MVAEKETLSLNKCPDKMPKRTKLLAQQPLPVHQPHSLVSEGFTVKAMMKNSVVRGPPAAGAFKERPTKPTAFRKFYERGDFPIALEHDSKGNKIAWKVEIEKLDYHHYLPLFFDGLCEMTFPYEFFARQGIHDMLEHGGNKILPVLPQLIIPIKNALNLRNRQVICVTLKVLQHLVVSAEMVGKALVPYYRQILPVLNIFKNMNGSYSLPRLECSGAIMARCNLDHLGSSDPPTSASQVAEIIVNSGDGIDYSQQKRENIGDLIQETLEAFERYGGENAFINIKYVVPTYESCLLN

SEQ ID NO: 12246 - protein, 257 aa, Homo sapiens
MVAEKETLSLNKCPDKMPKRTKLLAQQPLPVHQPHSLVSEGFTVKAMMKNSVVRGPPAAGAFKERPTKPTAFRKFYERGDFPIALEHDSKGNKIAWKVEIEKLDYHHYLPLFFDGLCEMTFPYEFFARQGIHDMLEHGGNKILPVLPQLIIPIKNALNLRNRQVICVTLKVLQHLVVSAEMVGKALVPYYRQILPVLNIFKNMNVNSGDGIDYSQQKRENIGDLIQETLEAFERYGGENAFINIKYVVPTYESCLLN

SEQ ID NO: 12247 - protein, 794 aa, Homo sapiens
MMQTKVQNKKRQVAFFILLMLWGEVGSESIQYSVLEETESGTFVANLTKDLGLRVGELASRGARVVFKGNRQHLQFDPQTHDLLLNEKLDREELCGSTEPCVLPFQVLLENPLQFFQASLRVRDINDHAPEFPAREMLLKISEITMPGKIFPLKMAHDLDTGSNGLQRYTISSNPHFHVLTRNRSEGRKFPELVLDKPLDREEQPQLRLTLIALDGGSPPRSGTSEIQIQVLDINDNVPEFAQELYEAQVPENNPLGSLVITVSARDLDAGSFGKVSYALFQVDDVNQPFEINAITGEIRLRKALDFEEIQSYDVDVEATDGGGLSGKCSLVVRVLDVNDNAPELTMSFFISLIPENLPEITVAVFSVSDADSGHNQQVICSIENNLPFLLRPSVENFYTLVTEGALDRESRAEYNITITVTDLGTPRLKTQQSITVQVSDVNDNVPAFTQTSYTLFVRENNSPALHIGSVSATDRDSGINAQVTYSLLPPQDPHLPLSSLVSINADNGHLFALRSLDYEALQSFEFRVGATDRGSPALSSEALVRLLVLDANDNSPFVLYPLQNGSAPCTELVPRAAEPGYLVTKVVAVDGDSGQNAWLSYQLLKATELGLFGVWAHNGEVRTARLLSERDAAKHRLVVLVKDNGEPPRSATATLHVLLVDGFSQPYLPLPEAAPAQAQADSLTVYLVVALASVSSLFLFSVLLFVAVRLCRRSRAASVGRYSVPEGPFPGHLVDVSGTGTLSQSYQYKVCLTGGSETNEFKFLKPIMPNFPPQGTEREMEETPTSRNSFPFS

SEQ ID NO: 12248 - protein, 214 aa, Homo sapiens
MPRAFLVRSRRPQPPNWGHLPDQLRGDAYIPGGPLTVPGGKGQERRSVTIWLFSSDCSSLGGPPAQQSSSVRDPWTAQPTQGNLTSAPRGPGTLGCPLCPKAFPLQRMLTRHLKCHSPVRRHLCRCCGKGFHDAFDLKRHMRTHTGIRPFRCSACGKAFTQRCSLEAHLAKVHGQPASYAYRERREKLHVCEDCGFTSSRPDTYAQHRALHRAA

SEQ ID NO: 12249 - protein, 579 aa, Homo sapiens
MAVFNQKSVSDMIKEFRKNWRALCNSERTTLCGADSMLLALQLSMAENNKQHSGEFTVSLSDVLLTWKYLLHEKLNLPVENMDVTDHYEDVRKIYDDFLKNSNMLDLIDVYQKCRALTSNCENYNTVSPSQLLDFLSGKQYAVGDETDLSIPTSPTSKYNRDNEKVQLLARKIIFSYLNLLVNSKNDLAVAYILNIPDRGLGREAFTDLKHAAREKQMSIFLVATSFIRTIELGGKGYAPPPSDPLRTHVKGLSNFINFIDKLDEILGEIPNPSIAGGQILSVIKMQLIKGQNSRDPFCKAIEEVAQDLDLRIKNIINSQEGVVALSTTDISPARPKSHAINHGTAYCGRDTVKALLVLLDEEAANAPTKNKAELLYDEENTIHHHGTSILTLFRSPTQVNNSIKPLRERICVSMQEKKIKMKQTLIRSQFACTYKDDYMISKDNWNNVNLASKPLCVLYMENDLSEGVNPSVGRSTIGTSFGNVHLDRSKNEKVSRKSTSQTGNKSSKRKQVDLDGENILCDNRNEPPQHKNAKIPKKSNDSQNRLYGKLAKVAKSNKCTAKDKLISGQAKLTQFFRL

SEQ ID NO: 12250 - protein, 498 aa, Homo sapiens
MDVTDHYEDVRKIYDDFLKNSNMLDLIDVYQKCRALTSNCENYNTVSPSQLLDFLSGKQYAVGDETDLSIPTSPTSKYNRDNEKVQLLARKIIFSYLNLLVNSKNDLAVAYILNIPDRGLGREAFTDLKHAAREKQMSIFLVATSFIRTIELGGKGYAPPPSDPLRTHVKGLSNFINFIDKLDEILGEIPNPSIAGGQILSVIKMQLIKGQNSRDPFCKAIEEVAQDLDLRIKNIINSQEGVVALSTTDISPARPKSHAINHGTAYCGRDTVKALLVLLDEEAANAPTKNKAELLYDEENTIHHHGTSILTLFRSPTQVNNSIKPLRERICVSMQEKKIKMKQTLIRSQFACTYKDDYMISKDNWNNVNLASKPLCVLYMENDLSEGVNPSVGRSTIGTSFGNVHLDRSKNEKVSRKSTSQTGNKSSKRKQVDLDGENILCDNRNEPPQHKNAKIPKKSNDSQNRLYGKLAKVAKSNKCTAKDKLISGQAKLTQFFRL

SEQ ID NO: 12251 - protein, 172 aa, Homo sapiens
MAVFNQKSVSDMIKEFRKNWRALCNSERTTLCGADSMLLALQLSMAENNKQHSGEFTVSLSDVLLTWKYLLHEKLNLPVENMDVTDHYEDVRKIYDDFLKNSNMLDLIDVYQKCRALTSNCENYNTVSPSQLLDFLSGKQYAVGDETDLSIPTSPTSKYNRDNEKALPVLKR

SEQ ID NO: 12252 - protein, 133 aa, Homo sapiens
MAVFNQKSVSDMIKEFRKNWRALCNSERTTLCGADSMLLALQLSMAENNKQHSGEFTVSLSDVLLTWKYLLHEKLNLPVENMDVTDHYEDVRKIYDDFLKNSNMLDLIDVYQKCRALTSNCENYNTVSPVSIF

SEQ ID NO: 12253 - protein, 294 aa, Homo sapiens
MQLIKGQNSRDPFCKAIEEVAQDLDLRIKNIINSQEGVVALSTTDISPARPKSHAINHGTAYCGRDTVKALLVLLDEEAANAPTKNKAELLYDEENTIHHHGTSILTLFRSPTQVNNSIKPLRERICVSMQEKKIKMKQTLIRSQFACTYKDDYMISKDNWNNVNLASKPLCVLYMENDLSEGVNPSVGRSTIGTSFGNVHLDRSKNEKVSRKSTSQTGNKSSKRKQVDLDGENILCDNRNEPPQHKNAKIPKKSNDSQNRLYGKLAKVAKSNKCTAKDKLISGQAKLTQFFRL

SEQ ID NO: 12254 - protein, 297 aa, Homo sapiens
MAVFNQKSVSDMIKEFRKNWRALCNSERTTLCGADSMLLALQLSMAENNKQHSGEFTVSLSDVLLTWKYLLHEKLNLPVENMDVTDHYEDVRKIYDDFLKNSNMLDLIDVYQKCRALTSNCENYNTVSPSQLLDFLSGKQYAVGDETDLSIPTSPTSKYNRDNEKVQLLARKIIFSYLNLLVNSKNDLAVAYILNIPDRGLGREAFTDLKHAAREKQMSIFLVATSFIRTIELGGKGYAPPPSDPLRTHVKGLSNFINFIDKLDEILGEIPNPRGCKSICWKINNWNEFWKCSSGQK

SEQ ID NO: 12255 - protein, 302 aa, Homo sapiens
MAVFNQKSVSDMIKEFRKNWRALCNSERTTLCGADSMLLALQLSMAENNKQHSGEFTVSLSDVLLTWKYLLHEKLNLPVENMDVTDHYEDVRKIYDDFLKNSNMLDLIDVYQKCRALTSNCENYNTVSPSQLLDFLSGKQYAVGDETDLSIPTSPTSKYNRDNEKVQLLARKIIFSYLNLLVNSKNDLAVAYILNIPDRGLGREAFTDLKHAAREKQMSIFLVATSFIRTIELGGKGYAPPPSDPLRTHVKGLSNFINFIDKLDEILGEIPNPRSPTQVNNSIKPLRERICVSMQEKKIKRV

SEQ ID NO: 12256 - protein, 798 aa, Homo sapiens
MEASGKLICRQRQVLFSFLLLGLSLAGAAEPRSYSVVEETEGSSFVTNLAKDLGLEQREFSRRGVRVVSRGNKLHLQLNQETADLLLNEKLDREDLCGHTEPCVLRFQVLLESPFEFFQAELQVIDINDHSPVFLDKQMLVKVSESSPPGTTFPLKNAEDLDVGQNNIENYIISPNSYFRVLTRKRSDGRKYPELVLDKALDREEEAELRLTLTALDGGSPPRSGTAQVYIEVLDVNDNAPEFEQPFYRVQISEDSPVGFLVVKVSATDVDTGVNGEISYSLFQASEEIGKTFKINPLTGEIELKKQLDFEKLQSYEVNIEARDAGTFSGKCTVLIQVIDVNDHAPEVTMSAFTSPIPENAPETVVALFSVSDLDSGENGKISCSIQEDLPFLLKSAENFYTLLTERPLDRESRAEYNITITVTDLGTPMLITQLNMTVLIADVNDNAPAFTQTSYTLFVRENNSPALHIRSVSATDRDSGTNAQVTYSLLPPQDPHLPLTSLVSINADNGHLFALRSLDYEALQGFQFRVGASDHGSPALSSEALVRVVVLDANDNSPFVLYPLQNGSAPCTELVPRAAEPGYLVTKVVAVDGDSGQNAWLSYQLLKATELGLFGVWAHNGEVRTARLLSERDAAKHRLVVLVKDNGEPPRSATATLHVLLVDGFSQPYLPLPEAAPTQAQADLLTVYLVVALASVSSLFLFSVLLFVAVRLCRRSRAASVGRCLVPEGPLPGHLVDMSGTRTLSQSYQYEVCLAGGSGTNEFKFLKPIIPNFPPQCPGKEIQGNSTFPNNFGFNIQ

SEQ ID NO: 12257 - protein, 776 aa, Homo sapiens
MEIGWMHNRRQRQVLVFFVLLSLSGAGAELGSYSVVEETERGSFVANLGKDLGLGLTEMSTRKARIISQGNKQHLQLKAQTGDLLINEKLDREELCGPTEPCILHFQVLMENPLEIFQAELRVIDINDHSPMFTEKEMILKIPENSPLGTEFPLNHALDLDVGSNNVQNYKISPSSHFRVLIHEFRDGRKYPELVLDKELDREEEPQLRLTLTALDGGSPPRSGTAQVRIEVVDINDNAPEFEQPIYKVQIPENSPLGSLVATVSARDLDGGANGKISYTLFQPSEDISKTLEVNPMTGEVRLRKQVDFEMVTSYEVRIKATDGGGLSGKCTLLLQVVDVNDNPPQVTMSALTSPIPENSPEIVVAVFSVSDPDSGNNGKTISSIQEDLPFLLKPSVKNFYTLVTERALDREARAEYNITLTVTDMGTPRLKTEHNITVQISDVNDNAPTFTQTSYTLFVRENNSPALHIGSVSATDRDSGTNAQVTYSLLPPQDPHLPLASLVSINADNGHLFALRSLDYEALQAFEFRVGATDRGSPALSREALVRVLVLDANDNSPFVLYPLQNGSAPCTELVPRAAEPGYLVTKVVAVDGDSGQNAWLSYQLLKATEPGLFGVWAHNGEVRTARLLSERDAAKQRLVVLVKDNGEPPRSATATLHVLLVDGFSQPFLPLPEAAPGQTQANSLTVYLVVALASVSSLFLFSVLLFVAVRLCRRSRAASVGRCSMPEGPFPGRLVDVSGTGTLSQSYQYEVCLTGGSETSEFKFLKPIIPNFSP

SEQ ID NO: 12258 - protein, 136 aa, Homo sapiens
MVRPYPLIYFLFLPLGACFPLLDRREPTDAMGGLGAGERWADLAMGPRPHSVWGSSRWLRASQPQALLVIARGLQTSGREHAGCRFRFGRQDEGSEATGFLPAAGEKTSGPLGNLAEELNGYSRKKGGFSFRFGRR

SEQ ID NO: 12259 - protein, 595 aa, Homo sapiens; identical to SEQ ID NO: 272

SEQ ID NO: 12260 - protein, 597 aa, Homo sapiens
MLSRGWFHRDLSGLDAETLLKGRGVHGSFLARPSRKNQGDFSLSVRVGDQVTHIRIQNSGDFYDLYGGEKFATLTELVEYYTQQQGVLQDRDGTIIHLKYPLNCSDPTSERWYHGHMSGGQAETLLQAKGEPWTFLVRESLSQPGDFVLSVLSDQPKAGPGSPLRVTHIKVMCEGGRYTVGGLETFDSLTDLVEHFKKTGIEEASGAFVYLRQPYYATRVNAADIENRVLELNKKQESEDTAKAGFWEEFESLQKQEVKNLHQRLEGQRPENKGKNRYKNILPFDHSRVILQGRDSNIPGSDYINANYIKNQLLGPDENAKTYIASQGCLEATVNDFWQMAWQENSRVIVMTTREVEKGRNKCVPYWPEVGMQRAYGPYSVTNCGEHDTTEYKLRTLQVSPLDNGDLIREIWHYQYLSWPDHGVPSEPGGVLSFLDQINQRQESLPHAGPIIVHCSAGIGRTGTIIVIDMLMENISTKGLDCDIDIQKTIQMVRAQRSGMVQTEAQYKFIYVAIAQFIETTKKKLEVLQSQKGQESEYGNITYPPAMKNAHAKASRTSSKHKEDVYENLHTKNKREEKVKKQRSADKEKSKGSLKRK

SEQ ID NO: 12261 - protein, 556 aa, Homo sapiens
MLSRGVGDQVTHIRIQNSGDFYDLYGGEKFATLTELVEYYTQQQGVLQDRDGTIIHLKYPLNCSDPTSERWYHGHMSGGQAETLLQAKGEPWTFLVRESLSQPGDFVLSVLSDQPKAGPGSPLRVTHIKVMCEGGRYTVGGLETFDSLTDLVEHFKKTGIEEASGAFVYLRQPYYATRVNAADIENRVLELNKKQESEDTAKAGFWEEFESLQKQEVKNLHQRLEGQRPENKGKNRYKNILPFDHSRVILQGRDSNIPGSDYINANYIKNQLLGPDENAKTYIASQGCLEATVNDFWQMAWQENSRVIVMTTREVEKGRNKCVPYWPEVGMQRAYGPYSVTNCGEHDTTEYKLRTLQVSPLDNGDLIREIWHYQYLSWPDHGVPSEPGGVLSFLDQINQRQESLPHAGPIIVHCSAGIGRTGTIIVIDMLMENISTKGLDCDIDIQKTIQMVRAQRSGMVQTEAQYKFIYVAIAQFIETTKKKLEVLQSQKGQESEYGNITYPPAMKNAHAKASRTSSKHKEDVYENLHTKNKREEKVKKQRSADKEKSKGSLKRK

SEQ ID NO: 12262 - protein, 624 aa, Homo sapiens
MVRWFHRDLSGLDAETLLKGRGVHGSFLARPSRKNQGDFSLSVRVGDQVTHIRIQNSGDFYDLYGGEKFATLTELVEYYTQQQGVLQDRDGTIIHLKYPLNCSDPTSERWYHGHMSGGQAETLLQAKGEPWTFLVRESLSQPGDFVLSVLSDQPKAGPGSPLRVTHIKVMCEGGRYTVGGLETFDSLTDLVEHFKKTGIEEASGAFVYLRQPYYATRVNAADIENRVLELNKKQESEDTAKAGFWEEFESLQKQEVKNLHQRLEGQRPENKGKNRYKNILPFDHSRVILQGRDSNIPGSDYINANYIKNQLLGPDENAKTYIASQGCLEATVNDFWQMAWQENSRVIVMTTREVEKGRNKCVPYWPEVGMQRAYGPYSVTNCGEHDTTEYKLRTLQVSPLDNGDLIREIWHYQYLSWPDHGVPSEPGGVLSFLDQINQRQESLPHAGPIIVHCSAGIGRTGTIIVIDMLMENISTKGLDCDIDIQKTIQMVRAQRSGMVQTEAQYKFIYVAIAQFIETTKKKLEVLQSQKGQESEYGNITYPPAMKNAHAKASRTSSKSLESSAGTVAASPVRRGGQRGLPVPGPPVLSPDLHQLPVLAPLHPAADTRRMCMRTCTLRTRGRRK

SEQ ID NO: 12263 - protein, 360 aa, Homo sapiens
MVQAHGGRSRAQPLTLSLGAAMTQPPPEKTPAKKHVRLQERRGSNVALMLDVRSLGAVEPICSVNTPREVTLHFLRTAGHPLTRWALQRQPPSPKQLEEEFLKIPSNFVSPEDLDIPGHASKDRYKTILPNPQSRVCLGRAQSQEDGDYINANYIRGYDGKEKVYIATQGPMPNTVSDFWEMVWQEEVSLIVMLTQLREGKEKCVHYWPTEEETYGPFQIRIQDMKECPEYTVRQLTIQYQEERRSVKHILFSAWPDHQTPESAGPLLRLVAEVEESPETAAHPGPIVVHCSAGIGRTGCFIATRIGCQQLKARGEVDILGIVCQLRLDRGGMIQTAEQYQFLHHTLALYAGQLPEEPSP

SEQ ID NO: 12264 - protein, 399 aa, Homo sapiens
MGASFWPIRQAREQQRRALSFRQTSWLSEPPLGPAPHLSMVQAHGGRSRAQPLTLSLGAAMTQPPPEKTPAKKHVRLQERRGSNVALMLDVRSLGAVEPICSVNTPREVTLHFLRTAGHPLTRWALQRQPPSPKQLEEEFLKIPSNFVSPEDLDIPGHASKDRYKTILPNPQSRVCLGRAQSQEDGDYINANYIRGYDGKEKVYIATQGPMPNTVSDFWEMVWQEEVSLIVMLTQLREGKEKCVHYWPTEEETYGPFQIRIQDMKECPEYTVRQLTIQYQEERRSVKHILFSAWPDHQTPESAGPLLRLVAEVEESPETAAHPGPIVVHCSAGIGRTGCFIATRIGCQQLKARGEVDILGIVCQLRLDRGGMIQTAEQYQFLHHTLALYAGQLPEEPSP

SEQ ID NO: 12265 - protein, 465 aa, Homo sapiens
MVGKAWPLTHSQGTGPWAPEGHRREAADPWWQRQQAQEGRMQLGCAWVAARRGGGRKLASWSLLSPQRQTDRQTDSWQEAAWGPQLLQQTSWLSEPPLGPAPHLSMVQAHGGRSRAQPLTLSLGAAMTQPPPEKTPAKKHVRLQERRGSNVALMLDVRSLGAVEPICSVNTPREVTLHFLRTAGHPLTRWALQRQPPSPKQLEEEFLKIPSNFVSPEDLDIPGHASKDRYKTILPNPQSRVCLGRAQSQEDGDYINANYIRGYDGKEKVYIATQGPMPNTVSDFWEMVWQEEVSLIVMLTQLREGKEKCVHYWPTEEETYGPFQIRIQDMKECPEYTVRQLTIQYQEERRSVKHILFSAWPDHQTPESAGPLLRLVAEVEESPETAAHPGPIVVHCSAGIGRTGCFIATRIGCQQLKARGEVDILGIVCQLRLDRGGMIQTAEQYQFLHHTLALYAGQLPEEPSP

SEQ ID NO: 12266 - protein, 593 aa, Homo sapiens
MEPATAPRPDMAPELTPEEEQATKQFLEEINKWTVQYNVSPLSWNVAVKFLMARKFDVLRAIELFHSYRETRRKEGIVKLKPHEEPLRSEILSGKFTILNVRDPTGASIALFTARLHHPHKSVQHVVLQALFYLLDRAVDSFETQRNGLVFIYDMCGSNYANFELDLGKKVLNLLKGAFPARLKKVLIVGAPIWFRVPYSIISLLLKDKVRERIQILKTSEVTQHLPRECLPENLGGYVKIDLATWNFQFLPQVNGHPDPFDEIILFSLPPALDWDSVHVPGPHAMTIQELVDYVNARQKQGIYEEYEDIRRENPVGTFHCSMSPGNLEKNRYGDVPCLDQTRVKLTKRSGHTQTDYINASFMDGYKQKNAYIGTQGPLENTYRDFWLMVWEQKVLVIVMTTRFEEGGRRKCGQYWPLEKDSRIRFGFLTVTNLGVENMNHYKKTTLEIHNTEERQKRQVTHFQFLSWPDYGVPSSAASLIDFLRVVRNQQSLAVSNMGARSKGQCPEPPIVVHCSAGIGRTGTFCSLDICLAQLEELGTLNVFQTVSRMRTQRAFSIQTPEQYYFCYKAILEFAEKEGMVSSGQNLLAVESQ

SEQ ID NO: 12267 - protein, 403 aa, Homo sapiens [sequence omitted]

SEQ ID NO: 12268 - protein, 576 aa, Homo sapiens
MERGGEAAAAAAAAAAAPGRGSESPVTISRAGNAGELVSPLLLPPTRRRRRRHIQGPGPVLNLPSAAAAPPVARAPEAAGGGSRSEDYSSSPHSAAAAARPLAAEEKQAQSLQPSSSRRSSHYPAAVQSQAAAERGASATAKSRAISILQKKPRHQQLLPSLSSFFFSHRLPDMTAIIKEIVSRNKRRYQEDGFDLDLTYIYPNIIAMGFPAERLEGVYRNNIDDVVRFLDSKHKNHYKIYNLCAERHYDTAKFNCRVAQYPFEDHNPPQLELIKPFCEDLDQWLSEDDNHVAAIHCKAGKGRTGVMICAYLLHRGKFLKAQEALDFYGEVRTRDKKGVTIPSQRRYVYYYSYLLKNHLDYRPVALLFHKMMFETIPMFSGGTCNPQFVVCQLKVKIYSSNSGPTRREDKFMYFEFPQPLPVCGDIKVEFFHKQNKMLKKDKMFHFWVNTFFIPGPEETSEKVENGSLCDQEIDSICSIERADNDKEYLVLTLTKNDLDKANKDKANRYFSPNFKVKLYFTKTVEEPSNPEASSSTSVTPDVSDNEPDHYRYSDTTDSDPENEPFDEDQHTQITKV

SEQ ID NO: 12269 - protein, 175 aa, Homo sapiens
MTAIIKEIVSRNKRRYQEDGFDLDLTYIYPNIIAMGFPAERLEGVYRNNIDDVVSCAERHYDTAKFNCRVAQYPFEDHNPPQLELIKPFCEDLDQWLSEDDNHVAAIHCKAGKGRTGVMICAYLLHRGKFLKAQEALDFYGEVRTRDKKADPTGGIPDKGIIVIGDGSSMDVIAP

SEQ ID NO: 12270 - protein, 349 aa, Homo sapiens
MSSLSGKVQTVLGLVEPSKLGRTLTHEHLAMTFDCCYCPPPPCQEAISKEPIVMKNLYWIQKNAYSHKENLQLNQETEAIKEELLYFKANGGGALVENTTTGISRDTQTLKRLAEETGVHIISGAGFYVDATHSSETRAMSVEQLTDVLMNEILHGADGTSIKCGIIGEIGCSWPLTESERKVLQATAHAQAQLGCPVIIHPGRSSRAPFQIIRILQEAGADISKTVMSHLDRTILDKKELLEFAQLGCYLEYDLFGTELLHYQLGPDIDMPDDNKRIRRVRLLVEEGCEDRILVAHDIHTKTRLMKYGGHGYSHILTNVVPKMLLRGITENVLDKILIENPKQWLTFK

SEQ ID NO: 12271 - protein, 302 aa, Homo sapiens
MSSLSGKVQTVLGLVEPSKLGRTLTHEHLAMTFDCCYCPPPPCQEAISKEPIVMKNLYWIQKNAYSHKENLQLNQETEAIKEELLYFKANGGGALVENTTTGISRDTQTLKRLAEETGVHIISGAGFYVDATHSSETRAMSVEQLTDVLMNEILHGADGTSIKCGIIGEIGCSWPLTESERKVLQATAHAQAQLGCPVIIHPGRSSRAPFQIIRILQEAGADISKTVMSHLDRVRLLVEEGCEDRILVAHDIHTKTRLMKYGGHGYSHILTNVVPKMLLRGITENVLDKILIENPKQWLTFK

SEQ ID NO: 12272 - protein, 168 aa, Homo sapiens
MQAQQYQQQRRKFAAAFLAFIFILAAVDTAEAGKKEKPEKKVKKSDCGEWQWSVCVPTSGDCGLGTREGTRTGAECKQTMKTQRCKIPCNWKKQFGAECKYQFQAWGECDLNTALKTRTGSLKRALHNAECQKTVTISKPCGKLTKPKPQAESKKKKKEGKKQEKMLD

SEQ ID NO: 12273 - protein, 328 aa, Homo sapiens
MDAVLLEHFPGGLDAFPSSYFDEDDFFTDQSSRDPLEDGDELLADEQAEVEFLSHQLHEYCYRDGACLLLQPAPPAAPLALAPPSSGGLGEPDDGGGGGYCCETGAPPGGFPYSPGSPPSCLAYPCAGAAVLSPGARLRGLSGAAAAAARRRRRVRSEAELQQLRQAANVRERRRMQSINDAFEGLRSHIPTLPYEKRLSKVDTLRLAIGYINFLSELVQADLPLRGGGAGGCGGPGGGGRLGGDSPGSQAQKVIICHRGTRSPSPSDPDYGLPPLAGHSLSWTDEKQLKEQNIIRTAKVWTPEDPRKLNSKSSFNNIENEPPFEFVS

SEQ ID NO: 12274 - protein, 416 aa, Homo sapiens
MVRPRRAPYRSGAGGPLGGRGRPPRPLVVRAVRSRSWPASPRGPQPPRIRARSAPPMEGARVFGALGPIGPSSPGLTLGGLAVSEHRLSNKLLAWSGVLEWQEKRRPYSDSTAKLKRTLPCQAYVNQGENLETDQWPQKLIMQLIPQQLLTTLGPLFRNSQLAQFHFTNRDCDSLKGLCRIMGNGFAGCMLFPHISPCEVRVLMLLYSSKKKIFMGLIPYDQSGFVSAIRQVITTRKQAVGPGGVNSGPVQIVNNKFLAWSGVMEWQEPRPEPNSRSKRWLPSHVYVNQGEILRTEQWPRKLYMQLIPQQLLTTLVPLFRNSRLVQFHFTKDLETLKSLCRIMDNGFAGCVHFSYKASCEIRVLMLLYSSEKKIFIGLIPHDQGNFVNGIRRVIANQQQVLQRNLEQEQQQRGMGG

SEQ ID NO: 12275 - protein, 384 aa, Homo sapiens
MRSPAVPTPARGQLGVAFVLLPPHSEGARVFGALGPIGPSSPGLTLGGLAVSEHRLSNKLLAWSGVLEWQEKRRPYSDSTAKLKRTLPCQAYVNQGENLETDQWPQKLIMQLIPQQLLTTLGPLFRNSQLAQFHFTNRDCDSLKGLCRIMGNGFAGCMLFPHISPCEVRVLMLLYSSKKKIFMGLIPYDQSGFVSAIRQVITTRKQAVGPGGVNSGPVQIVNNKFLAWSGVMEWQEPRPEPNSRSKRWLPSHVYVNQGEILRTEQWPRKLYMQLIPQQLLTTLVPLFRNSRLVQFHFTKDLETLKSLCRIMDNGFRRKSSLASSPMTRATLSTASGVSLPTSSRSCSGTWSRSNSNEGWGGSGYPQQVLQRNLEQEQQQRGMGG

SEQ ID NO: 12276 - protein, 227 aa, Homo sapiens
MLFPHISPCEVRVLMLLYSSKKKIFMGLIPYDQSGFVSAIRQVITTRKQAVGPGGVNSGPVQIVNNKFLAWSGVMEWQEPRPEPNSRSKRWLPSHVYVNQGEILRTEQWPRKLYMQLIPQQLLTTLVPLFRNSRLVQFHFTKDLETLKSLCRIMDNGFAGCVHFSYKASCEIRVLMLLYSSEKKIFIGLIPHDQGNFVNGIRRVIANQQQVLQRNLEQEQQQRGMGG

SEQ ID NO: 12277 - protein, 484 aa, Homo sapiens
MAAGGDHGSPDSYRSPLASRYASPEMCFVFSDRYKFRTWRQLWLWLAEAEQTLGLPITDEQIQEMKSNLENIDFKMAAEEEKRLRHDVMAHVHTFGHCCPKAAGIIHLGATSCYVGDNTDLIILRNALDLLLPKLARVISRLADFAKERASLPTLGFTHFQPAQLTTVGKRCCLWIQDLCMDLQNLKRVRDDLRFRGVKGTTGTQASFLQLFEGDDHKVEQLDKMVTEKAGFKRAFIITGQTYTRKVDIEVLSVLASLGASVHKICTDIRLLANLKEMEEPFEKQQIGSSAMPYKRNPMRSERCCSLARHLMTLVMDPLQTASVQWFERTLDDSANRRICLAEAFLTADTILNTLQNISEGLVVYPKVIERRIRQELPFMATENIIMAMVKAGGSRQDCHEKIRVLSQQAASVVKQEGGDNDLIERIQVDAYFSPIHSQLDHLLDPSSFTGRASQQVQRFLEEEVYPLLKPYESVMKVKAELCL

SEQ ID NO: 12278 - protein, 425 aa, Homo sapiens
MAAGGDHGSPDSYRSPLASRYASPEMCFVFSDRYKFRTWRQLWLWLAEAEQTLGLPITDEQIQEMKSNLENIDFKMAAEEEKRLRHDVMAHVHTFGHCCPKAAGIIHLGATSCYVGDNTDLIILRNALDLLLPKLARVISRLADFAKERASLPTLGFTHFQPAQLTTVGKRCCLWIQDLCMDLQNLKRVRDDLRFRGVKGTTGTQASFLQLFEGDDHKVEQLDKMVTEKAGFKRAFIITGQTYTRKVDIEVLSVLASLGASVHKICTDIRLLANLKEMEEPFEKQQIGSSAMPYKRNPMRSERCCSLARHLMTLVMDPLQTASVQWFERTLDDSANRRICLAEAFLTADTILNTLQNISEGLVVYPKVIERRIRQELPFMATENIIMAMVKAGGSRQVQRFLEEEVYPLLKPYESVMKVKAELCL

SEQ ID NO: 12279 - protein, 517 aa, Homo sapiens
MELEELGIREECGVFGCIASGEWPTQLDVPHVITLGLVGLQHRGQESAGIVTSDGSSVPTFKSHKGMGLVNHVFTEDNLKKLYVSNLGIGHTRYATTGKCELENCQPFVVETLHGKIAVAHNGELVNAARLRKKLLRHGIGLSTSSDSEMITQLLAYTPPQEQDDTPDWVARIKNLMKEAPTAYSLLIMHRDVIYAVRDPYGNRPLCIGRLIPVSDINDKEKKTSETEGWVVSSESCSFLSIGARYYREVLPGEIVEISRHNVQTLDIISRSEGNPVAFCIFEYVYFARPDSMFEDQMVYTVRYRCGQQLAIEAPVDADLVSTVPESATPAALAYAGKCGLPYVEVLCKNRYVGRTFIQPNMRLRQLGVAKKFGVLSDNFKGKRIVLVDDSIVRGNTISPIIKLLKESGAKEVHIRVASPPIKYPCFMGINIPTKEELIANKPEFDHLAEYLGANSVVYLSVEGLVSSVQEGIKFKKQKEKKHDIMIQENGNGLECFEKSGHCTACLTGKYPVELEW

SEQ ID NO: 12280 - protein, 348 aa, Homo sapiens
MKTAENIRGTGSDGPRKRGLCVLCGLPAAGKSTFARALAHRLQQEQGWAIGVVAYDDVMPDAFLAGARARPAPSQWKLLRQELLKYLEYFLMAVINGCQMSVPPNRTEAMWEDFITCLKDQDLIFSAAFEAQSCYLLTKTAVSRPLFLVLDDNFYYQSMRYEVYQLARKYSLGFCQLFLDCPLETCLQRNGQRPQALPPETIHLMGRKLEKPNPEKNAWEHNSLTIPSPACASEASLEVTDLLLTALENPVKYAEDNMEQKDTDRIICSTNILHKTDQTLRRIVSQTMKEAKGNQEAFSEMTFKQRWVRANHAAIWRIILGNEHIKCRSAKVGWLQCCRIEKRPLSTG

SEQ ID NO: 12281 - protein, 289 aa, Homo sapiens
MKTAENIRGTGSDGPRKRGLCVLCGLPAAGKSTFARALAHRLQQEQGWAIGVVAYDDVMPDAFLAGARARPAPSQWKLLRQELLKYLEYFLMAVINGCQMSVPPNRTEAMWEDFITCLKDQDLIFSAAFEAQSCYLLTKTAVSRPLFLVLDDNFYYQSMRYEVYQLARKYSLGFCQLFLDCPLETCLQRNGQRPQALPPETIHLMGRKLEKPNPEKNAWEHNSLTIPSPACASEASLEVTDLLLTALENPVKYAEDNMEQKVNFQCKFNVNEKEQLFVGRSFEPIIKCE

SEQ ID NO: 12282 - protein, 530 aa, Homo sapiens
MTRDFKPGDLIFAKMKGYPHWPARVDEVPDGAVKPPTNKLPIFFFGTHETAFLGPKDIFPYSENKEKYGKPNKRKGFNEGLWEIDNNPKVKFSSQQAATKQSNASSDVEVEEKETSVSKEDTDHEEKASNEDVTKAVDITTPKAARRGRKRKAEKQVETEEAGVVTTATASVNLKVSPKRGRPAATEVKIPKPRGRPKMVKQPCPSESDIITEEDKSKKKGQEEKQPKKQPKKDEEGQKEEDKPRKEPDKKEGKKEVESKRKNLAKTGVTSTSDSEEEGDDQEGEKKRKGGRNFQTAHRRNMLKGQHEKEAADRKRKQEEQMETEQQNKDEGKKPEVKKVEKKRETSMDSRLQRIHAEIKNSLKIDNLDVNRCIEALDELASLQVTMQQAQKHTEMITTLKKIRRFKVSQVIMEKSTMLYNKFKNMFLVGEGDSVITQVLNKSLAEQRQHEEANKTKDQGKKGPNKKLEKEQTGSKTLNGGSDAQDGNQPQHNGESNEDSKDNHEASTKKKPSSEERETEISLKDSTLDN

SEQ ID NO: 12283 - protein, 333 aa, Homo sapiens
MTRDFKPGDLIFAKMKGYPHWPARVDEVPDGAVKPPTNKLPIFFFGTHETAFLGPKDIFPYSENKEKYGKPNKRKGFNEGLWEIDNNPKVKFSSQQAATKQSNASSDVEVEEKETSVSKEDTDHEEKASNEDVTKAVDITTPKAARRGRKRKAEKQVETEEAGVVTTATASVNLKVSPKRGRPAATEVKIPKPRGRPKMVKQPCPSESDIITEEDKSKKKGQEEKQPKKQPKKDEEGQKEEDKPRKEPDKKEGKKEVESKRKNLAKTGVTSTSDSEEEGDDQEGEKKRKGGRNFQTAHRRNMLKGQHEKEAADRKRKQEEQMETEHQTTCNLQ

SEQ ID NO: 12284 - protein, 329 aa, Homo sapiens
MTRDFKPGDLIFAKMKGYPHWPARVDEVPDGAVKPPTNKLPIFFFGTHETAFLGPKDIFPYSENKEKYGKPNKRKGFNEGLWEIDNNPKVKFSSQQAATKQSNASSDVEVEEKETSVSKEDTDHEEKASNEDVTKAVDITTPKAARRGRKRKAEKQVETEEAGVVTTATASVNLKVSPKRGRPAATEVKIPKPRGRPKMVKQPCPSESDIITEEDKSKKKGQEEKQPKKQPKKDEEGQKEEDKPRKEPDKKEGKKEVESKRKNLAKTGVTSTSDSEEEGDDQEGEKKRKGGRNFQTAHRRNMLKGQHEKEAADRKRKQEEQMETEHFAL

SEQ ID NO: 12285 - protein, 854 aa, Homo sapiens
MDFSMVAGAAAYNEKSGRITSLSLLFQKVFAQIFPQWRKGNTEECLPYKCSETGALGENYSWQIPINHNDFKILKNNERQLCEVLQNKFGCISTLVSPVQEGNSKSLQVFRKMLTPRIELSVWKDDLTTHAVDAVVNAANEDLLHGGGLALALVKAGGFEIQEESKQFVARYGKVSAGEIAVTGAGRLPCKQIIHAVGPRWMEWDKQGCTGKLQRAIVSILNYVIYKNTHIKTVAIPALSSGIFQFPLNLCTKTIVETIRVSLQGKPMMSNLKEIHLVSNEDPTVAAFKAASEFILGKSELGQETTPSFNAMVVNNLTLQIVQGHIEWQTADVIVNSVNPHDITVGPVAKSILQQAGVEMKSEFLATKAKQFQRSQLVLVTKGFNLFCKYIYHVLWHSEFPKPQILKHAMKECLEKCIEQNITSISFPALGTGNMEIKKETAAEILFDEVLTFAKDHVKHQLTVKFVIFPTDLEIYKAFSSEMAKRSKMLSLNNYSVPQSTREEKRENGLEARSPAINLMGFNVEEMYEAHAWIQRILSLQNHHIIENNHILYLGRKEHDILSQLQKTSSVSITEIISPGRTELEIEGARADLIEVVMNIEDMLCKVQEEMARKKERGLWRSLGQWTIQQQKTQDEMKENIIFLKCPVPPTQELLDQKKQFEKCGLQVLKVEKIDNEVLMAAFQRKKKMMEEKLHRQPVSHRLFQQVPYQFCNVVCRVGFQRMYSTPCDPKYGAGIYFTKNLKNLAEKAKKISAADKLIYVFEAEVLTGFFCQGHPLNIVPPPLSPGAIDGHDSVVDNVSSPETFVIFSGMQAIPQYLWTCTQEYVQSQDYSSGPMRPFAQHPWRGFASGSPVD

SEQ ID NO: 12286 - protein, 819 aa, Homo sapiens
MDFSMVAGAAAYNEKSETGALGENYSWQIPINHNDFKILKNNERQLCEVLQNKFGCISTLVSPVQEGNSKSLQVFRKMLTPRIELSVWKDDLTTHAVDAVVNAANEDLLHGGGLALALVKAGGFEIQEESKQFVARYGKVSAGEIAVTGAGRLPCKQIIHAVGPRWMEWDKQGCTGKLQRAIVSILNYVIYKNTHIKTVAIPALSSGIFQFPLNLCTKTIVETIRVSLQGKPMMSNLKEIHLVSNEDPTVAAFKAASEFILGKSELGQETTPSFNAMVVNNLTLQIVQGHIEWQTADVIVNSVNPHDITVGPVAKSILQQAGVEMKSEFLATKAKQFQRSQLVLVTKGFNLFCKYIYHVLWHSEFPKPQILKHAMKECLEKCIEQNITSISFPALGTGNMEIKKETAAEILFDEVLTFAKDHVKHQLTVKFVIFPTDLEIYKAFSSEMAKRSKMLSLNNYSVPQSTREEKRENGLEARSPAINLMGFNVEEMYEAHAWIQRILSLQNHHIIENNHILYLGRKEHDILSQLQKTSSVSITEIISPGRTELEIEGARADLIEVVMNIEDMLCKVQEEMARKKERGLWRSLGQWTIQQQKTQDEMKENIIFLKCPVPPTQELLDQKKQFEKCGLQVLKVEKIDNEVLMAAFQRKKKMMEEKLHRQPVSHRLFQQVPYQFCNVVCRVGFQRMYSTPCDPKYGAGIYFTKNLKNLAEKAKKISAADKLIYVFEAEVLTGFFCQGHPLNIVPPPLSPGAIDGHDSVVDNVSSPETFVIFSGMQAIPQYLWTCTQEYVQSQDYSSGPMRPFAQHPWRGFASGSPVD

SEQ ID NO: 12287 - protein, 710 aa, Homo sapiens
MDFSMVAGAAAYNEKSETGALGENYSWQIPINHNDFKILKNNERQLCEVLQNKFGCISTLVSPVQEGNSKSLQVFRKMLTPRIELSVWKDDLTTHAVDAVVNAANEDLLHGGGLALALVKAGGFEIQEESKQFVARYGKVSAGEIAVTGAGRLPCKQIIHAVGPRWMEWDKQGCTGKLQRAIVSILNYVIYKNTHIKTVAIPALSSGIFQFPLNLCTKTIVETIRVSLQGKPMMSNLKEIHLVSNEDPTVAAFKAASEFILGKSELGQETTPSFNAMVVNNLTLQIVQGHIEWQTADVIVNSVNPHDITVGPVAKSILQQAGVEMKSEFLATKAKQFQRSQLVLVTKGFNLFCKYIYHVLWHSEFPKPQILKHAMKECLEKCIEQNITSISFPALGTGNMEIKKETAAEILFDEVLTFAKDHVKHQLTVKFVIFPTDLEIYKAFSSEMAKRSKMLSLNNYSVPQSTREEKRENGLEARSPAINLMGFNVEEMYEAHAWIQRILSLQNHHIIENNHILYLGRKEHDILSQLQKTSSVSITEIISPGRTELEIEGARADLIEVVMNIEDMLCKVQEEMARKKERGLWRSLGQWTIQQQKTQDEMKENIIFLKCPVPPTQELLDQKKQFEKCGLQVLKVEKIDNEVLMAAFQRKKKMMEEKLHRQPVSHRLFQQVPYQFCNVVCRVGFQRMYSTPCGRCQCLIIGATLWNLVS

SEQ ID NO: 12288 - protein, 936 aa, Homo sapiens
MAAQRNRSKESKDCSGLVLLCLFFGIPWEAGARQISYSIPEELEKGSFVGNISKDLGLAPRELAERGVRIVSRGRTQLFSLNPRSGSLITAGRIDREELCAQSARCVVSFNILVEDRVKLFGIEIEVTDINDNAPKFQAENLDVKINENVAAGMRFPLPEAIDPDVGVNSLQSYQLSPNKHFSLRVQSRANGVKYPELVLEHSLDREEEAIHHLVLTASDGGDPLRSGTVLVSVTVFDANDNAPVFTLPEYRVSVPENLPVGTQLLTVTATDRDEGANGEVTYSFRKLPDTQLLKFQLNKYTGEIKISENLDYEETGFYEIEIQAEDGGAYLATAKVLITVEDVNDNSPELTITSLFSPVTEDSPLGTVVALLNVHDLDSEQNGQVTCSILAYLPFKLEKSIDSYYRLVIHRALDREQVSSYNITVTATDGGSPPLSTEAHFMLQVADINDNPPTFSQVSYFTYIPENNARGASIFSVTALDPDSKENAQIIYSLAEDTIQGVPLSSYISINSDTGVLYALRSFDYEQFHELQMQVTASDSGDPPLSSNVSLSLFVLDQNDNAPEILYPALPTDGSTGVELAPRSAEPGYLVTKVVAVDRDSGQNAWLSYRLLKASEPGLFAVGEHTGEVRTARALLDRDALKQSLVVAVQDHGQPPLSATVTLTVAVADSIPQVLADLGSFESPANSETSDLTLYLVVAVAAVSCVFLAFVIVLLAHRLRRWHKSRLLQASGGGLTGVSGSHFVGVDGVRAFLQTYSHEVSLTADSRKSHLIFPQPNYADTLISQESCEKNDPLSLLDDSKFPIEDTPLVPQAPPNTDWRFSQAQRPGTSGSQNGDDTGTWPNNQFDTEMLQAMILASASEAADGSSTLGGGAGTMGLSARYGPQFTLQHVPDYRQNVYIPGSNATLTNAAGKRDGKAPAGGNGNKKKSGKKEKK

SEQ ID NO: 12289 - protein, 850 aa, Homo sapiens
MAAQRNRSKESKDCSGLVLLCLFFGIPWEAGARQISYSIPEELEKGSFVGNISKDLGLAPRELAERGVRIVSRGRTQLFSLNPRSGSLITAGRIDREELCAQSARCVVSFNILVEDRVKLFGIEIEVTDINDNAPKFQAENLDVKINENVAAGMRFPLPEAIDPDVGVNSLQSYQLSPNKHFSLRVQSRANGVKYPELVLEHSLDREEEAIHHLVLTASDGGDPLRSGTVLVSVTVFDANDNAPVFTLPEYRVSVPENLPVGTQLLTVTATDRDEGANGEVTYSFRKLPDTQLLKFQLNKYTGEIKISENLDYEETGFYEIEIQAEDGGAYLATAKVLITVEDVNDNSPELTITSLFSPVTEDSPLGTVVALLNVHDLDSEQNGQVTCSILAYLPFKLEKSIDSYYRLVIHRALDREQVSSYNITVTATDGGSPPLSTEAHFMLQVADINDNPPTFSQVSYFTYIPENNARGASIFSVTALDPDSKENAQIIYSLAEDTIQGVPLSSYISINSDTGVLYALRSFDYEQFHELQMQVTASDSGDPPLSSNVSLSLFVLDQNDNAPEILYPALPTDGSTGVELAPRSAEPGYLVTKVVAVDRDSGQNAWLSYRLLKASEPGLFAVGEHTGEVRTARALLDRDALKQSLVVAVQDHGQPPLSATVTLTVAVADSIPQVLADLGSFESPANSETSDLTLYLVVAVAAVSCVFLAFVIVLLAHRLRRWHKSRLLQASGGGLTGVSGSHFVGVDGVRAFLQTYSHEVSLTADSRKSHLIFPQPNYADTLISQESCEKNDPLSLLDDSKFPIEDTPLVPVSFIFIFTFVKKKKIGFYFEVCGMMVESVNAKTLMSRI

SEQ ID NO: 12290 - protein, 657 aa, Homo sapiens
MEMETTEPEPDCVVQPPSPPDDFSCQMRLSEKITPLKTCFKKKDQKRLGTGTLRSLRPILNTLLESGSLDGVFRSRNQSTDENSLHEPMMKKAMEINSSCPPAENNMSVLIPDRTNVGDQIPEAHPSTEAPERVVPIQDHSFPSETLSGTVADSTPAHFQTDLLHPVSSDVPTSPDCLDKVIDYVPGIFQENSFTIQYILDTSDKLSTELFQDKSEEASLDLVFELVNQLQYHTHQENGIEICMDFLQGTCIYGRDCLKHHTVLPYHWQIKRTTTQKWQSVFNDSQEHLERFYCNPENDRMRMKYGGQEFWADLNAMNVYETTEFDQLRRLSTPPSSNVNSIYHTVWKFFCRDHFGWREYPESVIRLIEEANSRGLKEVRFMMWNNHYILHNSFFRREIKRRPLFRSCFILLPYLQTLGGVPTQAPPPLEATSSSQIICPDGVTSANFYPETWVYMHPSQDFIQVPVSAEDKSYRIIYNLFHKTVPEFKYRILQILRVQNQFLWEKYKRKKEYMNRKMFGRDRIINERHLFHGTSQDVVDGICKHNFDPRVCGKHATMFGQGSYFAKKASYSHNFSKKSSKGVHFMFLAKVLTGRYTMGSHGMRRPPPVNPGSVTSDLYDSCVDNFFEPQIFVIFNDDQSYPYFVIQYEEVSNTVSI

SEQ ID NO: 12291 - protein, 923 aa, Homo sapiens
MGSGAGELGRAERLPVLFLFLLSLFCPALCEQIRYRIPEEMPKGSVVGNLATDLGFSVQELPTRKLRVSSEKPYFTVSAESGELLVSSRLDREEICGKKPACALEFEAVAENPLNFYHVNVEIEDINDHTPKFTQNSFELQISESAQPGTRFILGSAHDADIGSNTLQNYQLSPSDHFSLINKEKSDGSKYPEMVLKTPLDREKQKSYHLTLTALDFGAPPLSSTAQIHVLVTDANDNAPVFSQDVYRVSLSENVYPGTTVLQVTATDQDEGVNAEITFSFSEASQITQFDLNSNTGEITVLNTLDFEEVKEYSIVLEARDGGGMIAQCTVEVEVIDENDNAPEVIFQSLPNLIMEDAELGTHIALLKVRDKDSRHNGEVTCKLEGDVPFKILTSSRNTYKLVTDAVLDREQNPEYNITVTATDRGKPPLSSSSSITLHIGDVNDNAPVFSQSSYIVHVAENNPPGASISQVRASDPDLGPNGQVSYCIMASDLEQRELSSYVSISAESGVVFAQRAFDHEQLRAFELTLQARDQGSPALSANVSLRVLVDDRNDNAPRVLYPALGPDGSALFDMVPHAAEPGYLVTKVVAVDADSGHNAWLSYHVLQASEPGLFSLGLRTGEVRTARALGDRDAVRQRLLVAVRDGGQPPLSATATLHLVFADSLQEVLPDITDRPDPSDLQAELQFYLVVALALISVLFLVAMILAIALRLRRSSSPASWSCFQPGLCVKSESVVPPNYSEGTLPYSYNLCVAHTGKTEFNFLKCSEQLSSGQDILCGDSSGALFPLCNSSELTSHQQAPPNTDWRFSQAQRPGTSGSQNGDDTGTWPNNQFDTEMLQAMILASASEAADGSSTLGGGAGTMGLSARYGPQFTLQHVPDYRQNVYIPGSNATLTNAAGKRDGKAPAGGNGNKKKSGKKEKK

SEQ ID NO: 12292 - protein, 803 aa, Homo sapiens
MGSGAGELGRAERLPVLFLFLLSLFCPALCEQIRYRIPEEMPKGSVVGNLATDLGFSVQELPTRKLRVSSEKPYFTVSAESGELLVSSRLDREEICGKKPACALEFEAVAENPLNFYHVNVEIEDINDHTPKFTQNSFELQISESAQPGTRFILGSAHDADIGSNTLQNYQLSPSDHFSLINKEKSDGSKYPEMVLKTPLDREKQKSYHLTLTALDFGAPPLSSTAQIHVLVTDANDNAPVFSQDVYRVSLSENVYPGTTVLQVTATDQDEGVNAEITFSFSEASQITQFDLNSNTGEITVLNTLDFEEVKEYSIVLEARDGGGMIAQCTVEVEVIDENDNAPEVIFQSLPNLIMEDAELGTHIALLKVRDKDSRHNGEVTCKLEGDVPFKILTSSRNTYKLVTDAVLDREQNPEYNITVTATDRGKPPLSSSSSITLHIGDVNDNAPVFSQSSYIVHVAENNPPGASISQVRASDPDLGPNGQVSYCIMASDLEQRELSSYVSISAESGVVFAQRAFDHEQLRAFELTLQARDQGSPALSANVSLRVLVDDRNDNAPRVLYPALGPDGSALFDMVPHAAEPGYLVTKVVAVDADSGHNAWLSYHVLQASEPGLFSLGLRTGEVRTARALGDRDAVRQRLLVAVRDGGQPPLSATATLHLVFADSLQEVLPDITDRPDPSDLQAELQFYLVVALALISVLFLVAMILAIALRLRRSSSPASWSCFQPGLCVKSESVVPPNYSEGTLPYSYNLCVAHTGKTEFNFLKCSEQLSSGQDILCGDSSGALFPLCNSSELTSHQVSFL

SEQ ID NO: 12293 - protein, 1724 aa, Homo sapiens
MVMGIFANCIFCLKVKYLPQQQKKKLQTDIKENGGKFSFSLNPQCTHIILDNADVLSQYQLNSIQKNHVHIANPDFIWKSIREKRLLDVKNYDPYKPLDITPPPDQKASSSEVKTEGLCPDSATEEEDTVELTEFGMQNVEIPHLPQDFEVAKYNTLEKVGMEGGQEAVVVELQCSRDSRDCPFLISSHFLLDDGMETRRQFAIKKTSEDASEYFENYIEELKKQGFLLREHFTPEATQLASEQLQALLLEEVMNSSTLSQEVSDLVEMIWAEALGHLEHMLLKPVNRISLNDVSKAEGILLLVKAALKNGETAEQLQKMMTEFYRLIPHKGTMPKEVNLGLLAKKADLCQLIRDMVNVCETNLSKPNPPSLAKYRALRCKIEHVEQNTEEFLRVRKEVLQNHHSKSPVDVLQIFRVGRVNETTEFLSKLGNVRPLLHGSPVQNIVGILCRGLLLPKVVEDRGVQRTDVGNLGSGIYFSDSLSTSIKYSHPGETDGTRLLLICDVALGKCMDLHEKDFSLTEAPPGYDSVHGVSQTASVTTDFEDDEFVVYKTNQVKMKYIIKFSMPGDQIKDFHPSDHTELEEYRPEFSNFSKVEDYQLPDAKTSSSTKAGLQDASGNLVPLEDVHIKGRIIDTVAQVIVFQTYTNKSHVPIEAKYIFPLDDKAAVCGFEAFINGKHIVGEIKEKEEAQQEYLEAVTQGHGAYLMSQDAPDVFTVSVGNLPPKAKVLIKITYITELSILGTVGVFFMPATVAPWQQDKALNENLQDTVEKICIKEIGTKQSFSLTMSIEMPYVIEFIFSDTHELKQKRTDCKAVISTMEGSSLDSSGFSLHIGLSAAYLPRMWVEKHPEKESEACMLVFQPDLDVDLPDLASESEVIICLDCSSSMEGVTFLQAKQIALHALSLVGEKQKVNIIQFGTGYKELFSYPKHITSNTMAAEFIMSATPTMGNTDFWKTLRYLSLLYPARGSRNILLVSDGHLQDESLTLQLVKRSRPHTRLFACGIGSTANRHVLRILSQCGAGVFEYFNAKSKHSWRKQIEDQMTRLCSPSCHSVSVKWQQLNPDVPEALQAPAQVPSLFLNDRLLVYGFIPHCTQATLCALIQEKEFRTMVSTTELQKTTGTMIHKLAARALIRDYEDGILHENETSHEMKKQTLKSLIIKLSKENSLITQFTSFVAVEKRDENESPFPDIPKVSELIAKEDVDFLPYMSWQGEPQEAVRNQSLLASSEWPELRLSKRKHRKIPFSKRKMELSQPEVSEDFEEDGLGVLPAFTSNLERGGVEKLLDLSWTESCKPTATEPLFKKVSPWETSTSSFFPILAPAVGSYLPPTARAHSPASLSFASYRQVASFGSAAPPRQFDASQFSQGPVPGTCADWIPQSASCPTGPPQNPPSSPYCGIVFSGSSLSSAQSAPLQHPGGFTTRPSAGTFPELDSPQLHFSLPTDPDPIRGFGSYHPSASSPFHFQPSAASLTANLRLPMASALPEALCSQSRTTPVDLCLLEESVGSLEGSRCPVFAFQSSDTESDELSEVLQDSCFLQIKCDTKDDSILCFLEVKEEDEIVCIQHWQDAVPWTELLSLQTEDGFWKLTPELGLILNLNTNGLHSFLKQKGIQSLGVKGRECLLDLIATMLVLQFIRTRLEKEGIVFKSLMKMDDASISRNIPWAFEAIKQASEWVRRTEGQYPSICPRLELGNDWDSATKQLLGLQPISTVSPLHRVLHYSQG

SEQ ID NO: 12294 - protein, 932 aa, Homo sapiens
MIPARLHRDYKGLVLLGILLGTLWETGCTQIRYSVPEELEKGSRVGDISRDLGLEPRELAERGVRIIPRGRTQLFALNPRSGSLVTAGRIDREELCMGAIKCQLNLDILMEDKVKIYGVEVEVRDINDNAPYFRESELEIKISENAATEMRFPLPHAWDPDIGKNSLQSYELSPNTHFSLIVQNGADGSKYPELVLKRALDREEKAAHHLVLTASDGGDPVRTGTARIRVMVLDANDNAPAFAQPEYRASVPENLALGTQLLVVNATDPDEGVNAEVRYSFRYVDDKAAQVFKLDCNSGTISTIGELDHEESGFYQMEVQAMDNAGYSARAKVLITVLDVNDNAPEVVLTSLASSVPENSPRGTLIALLNVNDQDSEENGQVICFIQGNLPFKLEKSYGNYYSLVTDIVLDREQVPSYNITVTATDRGTPPLSTETHISLNVADTNDNPPVFPQASYSAYIPENNPRGVSLVSVTAHDPDCEENAQITYSLAENTIQGASLSSYVSINSDTGVLYALSSFDYEQFRDLQVKVMARDNGHPPLSSNVSLSLFVLDQNDNAPEILYPALPTDGSTGVELAPRSAEPGYLVTKVVAVDRDSGQNAWLSYRLLKASEPGLFSVGLHTGEVRTARALLDRDALKQSLVVAVQDHGQPPLSATVTLTVAVADSIPQVLADLGSLESPANSETSDLTLYLVVAVAAVSCVFLAFVILLLALRLRRWHKSRLLQASGGGLTGAPASHFVGVDGVQAFLQTYSHEVSLTTDSRKSHLIFPQPNYADMLVSQESFEKSEPLLLSGDSVFSKDSHGLIEQAPPNTDWRFSQAQRPGTSGSQNGDDTGTWPNNQFDTEMLQAMILASASEAADGSSTLGGGAGTMGLSARYGPQFTLQHVPDYRQNVYIPGSNATLTNAAGKRDGKAPAGGNGNKKKSGKKEKK

SEQ ID NO: 12295 - protein, 820 aa, Homo sapiens
MIPARLHRDYKGLVLLGILLGTLWETGCTQIRYSVPEELEKGSRVGDISRDLGLEPRELAERGVRIIPRGRTQLFALNPRSGSLVTAGRIDREELCMGAIKCQLNLDILMEDKVKIYGVEVEVRDINDNAPYFRESELEIKISENAATEMRFPLPHAWDPDIGKNSLQSYELSPNTHFSLIVQNGADGSKYPELVLKRALDREEKAAHHLVLTASDGGDPVRTGTARIRVMVLDANDNAPAFAQPEYRASVPENLALGTQLLVVNATDPDEGVNAEVRYSFRYVDDKAAQVFKLDCNSGTISTIGELDHEESGFYQMEVQAMDNAGYSARAKVLITVLDVNDNAPEVVLTSLASSVPENSPRGTLIALLNVNDQDSEENGQVICFIQGNLPFKLEKSYGNYYSLVTDIVLDREQVPSYNITVTATDRGTPPLSTETHISLNVADTNDNPPVFPQASYSAYIPENNPRGVSLVSVTAHDPDCEENAQITYSLAENTIQGASLSSYVSINSDTGVLYALSSFDYEQFRDLQVKVMARDNGHPPLSSNVSLSLFVLDQNDNAPEILYPALPTDGSTGVELAPRSAEPGYLVTKVVAVDRDSGQNAWLSYRLLKASEPGLFSVGLHTGEVRTARALLDRDALKQSLVVAVQDHGQPPLSATVTLTVAVADSIPQVLADLGSLESPANSETSDLTLYLVVAVAAVSCVFLAFVILLLALRLRRWHKSRLLQASGGGLTGAPASHFVGVDGVQAFLQTYSHEVSLTTDSRKSHLIFPQPNYADMLVSQESFEKSEPLLLSGDSVFSKDSHGLIEVSLYQIFFLFFF

SEQ ID NO: 12296 - protein, 708 aa, Homo sapiens
MRERIWAPPLLLLLPLLLPPPLWGGPPDSPRRELELEPGPLQPFDLLYASGAAAYYSGDYERAVRDLEAALRSHRRLREIRTRCARHCAARHPLPPPPPGEGPGAELPLFRSLLGRARCYRSCETQRLGGPASRHRVSEDVRSDFQRRVPYNYLQRAYIKLNQLEKAVEAAHTFFVANPEHMEMQQNIENYRATAGVEALQLVDREAKPHMESYNAGVKHYEADDFEMAIRHFEQALREYFVEDTECRTLCEGPQRFEEYEYLGYKAGLYEAIADHYMQVLVCQHECVRELATRPGRLSPIENFLPLHYDYLQFAYYRVGEYVKALECAKAYLLCHPDDEDVLDNVDYYESLLDDSIDPASIEAREDLTMFVKRHKLESELIKSAAEGLGFSYTEPNYWIRYGGRQDENRVPSGVNVEGAEVHGFSMGKKLSPKIDRDLREGGPLLYENITFVYNSEQLNGTQRVLLDNVLSEEQCRELHSVASGIMLVGDGYRGKTSPHTPNEKFEGATVLKALKSGYEGRVPLKSARLFYDISEKARRIVESYFMLNSTLYFSYTHMVCRTALSGQQDRRNDLSHPIHADNCLLDPEANECWKEPPAYTFRDYSALLYMNDDFEGGEFIFTEMDAKTVTASIKPKCGRMISFSSGGENPHGVKAVTKGKRCAVALWFTLDPLYRELERIQADEVIAILDQEQQGKHELNINPKDEL

SEQ ID NO: 12297 - protein, 527 aa, Homo sapiens
MEMQQNIENYRATAGVEALQLVDREAKPHMESYNAGVKHYEADDFEMAIRHFEQALREYFVEDTECRTLCEGPQRFEEYEYLGYKAGLYEAIADHYMQVLVCQHECVRELATRPGRLSPIENFLPLHYDYLQFAYYRVGEYVKALECAKAYLLCHPDDEDVLDNVDYYESLLDDSIDPASIEAREDLTMFVKRHKLESELIKSAAEGLGFSYTEPNYWIRYGGRQDENRVPSGVNVEGAEVHGFSMGKKLSPKIDRDLREGGPLLYENITFVYNSEQLNGTQRVLLDNVLSEEQCRELHSVASGIMLVGDGYRGKTSPHTPNEKFEGATVLKALKSGYEGRVPLKSARLFYDISEKARRIVESYFMLNSTLYFSYTHMVCRTALSGQQDRRNDLSHPIHADNCLLDPEANECWKEPPAYTFRDYSALLYMNDDFEGGEFIFTEMDAKTVTASIKPKCGRMISFSSGGENPHGVKAVTKGKRCAVALWFTLDPLYRELERIQADEVIAILDQEQQGKHELNINPKDEL

SEQ ID NO: 12298 - protein, 426 aa, Homo sapiens
MAIAQLATEYVFSDFLLKEPTEPKFKGLRLELAVDKMVTCIAVGLPLLLISLAFAQEISIGTQISCFSPSSFSWRQAAFVDSYCWAAVQQKNSLQSESGNLPLWLHKFFPYILLLFAILLYLPPLFWRFAAAPHICSDLKFIMEELDKVYNRAIKAAKSARDLDMRDGACSVPGVTENLGQSLWEVSESHFKYPIVEQYLKTKKNSNNLIIKYISCRLLTLIIILLACIYLGYYFSLSSLSDEFVCSIKSGILRNDSTVPDQFQCKLIAVGIFQLLSVINLVVYVLLAPVVVYTLFVPFRQKTDVLKVYEILPTFDVLHFKSEGYNDLSLYNLFLEENISEVKSYKCLKVLENIKSSGQGIDPMLLLTNLGMIKMDVVDGKTPMSAEMREEQGNQTAELQGMNIDSETKANNGEKNARQRLLDSSC

SEQ ID NO: 12299 - protein, 422 aa, Homo sapiens
MAIAQLATEYVFSDFLLKEPTEPKFKGLRLELAVDKMVTCIAVGLPLLLISLAFAQEISIGTQISCFSPSSFSWRQAAFVDSYCWAAVQQKNSLQSESGNLPLWLHKFFPYILLLFAILLYLPPLFWRFAAAPHICSDLKFIMEELDKVYNRAIKAAKSARDLDMRDGACSVPGVTENLGQSLWEVSESHFKYPIVEQYLKTKKNSNNLIIKYISCRLLTLIIILLACIYLGYYFSLSSLSDEFVCSIKSGILRNDSTVPDQFQCKLIAVGIFQLLSVINLVVYVLLAPVVVYTLFVPFRQKTDVLKVYEILPTFDVLHFKSEGYNDLSLYNLFLEENISEVKSYKCLKVLENIKSSGQGIDPMLLLTNLGMIKMDVVDGKTPMSAEMREEQGNQTAELQDSETKANNGEKNARQRLLDSSC

SEQ ID NO: 12300 - protein, 663 aa, Homo sapiens
MAQGTLIRVTPEQPTHAVCVLGTLTQLDICSSAPEDCTSFSINASPGVVVDIAHGPPAKKKSTGSSTWPLDPGVEVTLTMKVASGSTGDQKVQISYYGPKTPPVKALLYLTGVEISLCADITRTGKVKPTRAVKDQRTWTWGPCGQGAILLVNCDRDNLESSAMDCEDDEVLDSEDLQDMSLMTLSTKTPKDFFTNHTLVLHVARSEMDKVRVFQATRGKLSSKCSVVLGPKWPSHYLMVPGGKHNMDFYVEALAFPDTDFPGLITLTISLLDTSNLELPEAVVFQDSVVFRVAPWIMTPNTQPPQEVYACSIFENEDFLKSVTTLAMKAKCKLTICPEEENMDDQWMQDEMEIGYIQAPHKTLPVVFDSPRNRGLKEFPIKRVMGPDFGYVTRGPQTGGISGLDSFGNLEVSPPVTVRGKEYPLGRILFGDSCYPSNDSRQMHQALQDFLSAQQVQAPVKLYSDWLSVGHVDEFLSFVPAPDRKGFRLLLASPRSCYKLFQEQQNEGHGEALLFEGIKKKKQQKIKNILSNKTLREHNSFVERCIDWNRELLKRELGLAESDIIDIPQLFKLKEFSKAEAFFPNMVNMLVLGKHLGIPKPFGPVINGRCCLEEKVCSLLEPLGLQCTFINDFFTYHIRHGEVHCGTNVRRKPFSFKWWNMVP

SEQ ID NO: 12301 - protein, 1634 aa, Homo sapiens
MSSTQGNGEHWKSLESVGISRKELAMAEALQMEYDALSRLRHDKEENRAKQNADPSLISWDEPGVDFYSKPAGRRTDLKLLRGLSGSDPTLNYNSLSPQEGPPNHSTSQGPQPGSDPWPKGSLSGDYLYIFDGSDGGVSSSPGPGDIEGSCKKLSPPPLPPRASIWDTPPLPPRKGSPSSSKISQPSDINTFSLVEQLPGKLLEHRILEEEEVLGGGGQGRLLGSVDYDGINDAITRLNLKSTYDAEMLRDATRGWKEGRGPLDFSKDTSGKPVARSKTMPPQVPPRTYASRYGNRKNATPGKNRRISAAPVGSRPHTVANGHELFEVSEERDEEVAAFCHMLDILRSGSDIQDYFLTGYVWSAVTPSPEHLGDEVNLKVTVLCDRLQEALTFTCNCSSTVDLLIYQTLCYTHDDLRNVDVGDFVLKPCGLEEFLQNKHALGSHEYIQYCRKFDIDIRLQLMEQKVVRSDLARTVNDDQSPSTLNYLVHLQERPVKQTISRQALSLLFDTYHNEVDAFLLADGDFPLKADRVVQSVKAICNALAAVETPEITSALNQLPPCPSRMQPKIQKDPSVLAVRENREKVVEALTAAILDLVELYCNTFNADFQTAVPGSRKHDLVQEACHFARSLAFTVYATHRIPIIWATSYEDFYLSCSLSHGGKELCSPLQTRRAHFSKYLFHLIVWDQQICFPVQVNRLPRETLLCATLYALPIPPPGSSSEANKQRRVPEALGWVTTPLFNFRQVLTCGRKLLGLWPATQENPSARWSAPNFHQPDSVILQIDFPTSAFDIKFTSPPGDKFSPRYEFGSLREEDQRKLKDIMQKESLYWLTDADKKRLWEKRYYCHSEVSSLPLVLASAPSWEWACLPDIYVLLKQWTHMNHQDALGLLHATFPDQEVRRMAVQWIGSLSDAELLDYLPQLVQALKYECYLDSPLVRFLLKRAVSDLRVTHYFFWLLKDGLKDSQFSIRYQYLLAALLCCCGKGLREEFNRQCWLVNALAKLAQQVREAAPSARQGILRTGLEEVKQFFALNGSCRLPLSPSLLVKGIVPRDCSYFNSNAVPLKLSFQNVDPLGENIRVIFKCGDDLRQDMLTLQMIRIMSKIWVQEGLDMRMVIFRCFSTGRGRGMVEMIPNAETLRKIQVEHGVTGSFKDRPLADWLQKHNPGEDEYEKAVENFIYSCAGCCVATYVLGICDRHNDNIMLKTTGHMFHIDFGRFLGHAQMFGNIKRDRAPFVFTSDMAYVINGGDKPSSRFHDFVDLCCQAYNLIRKHTHLFLNLLGLMLSCGIPELSDLEDLKYVYDALRPQDTEANATTYFTRLIESSLGSVATKLNFFIHNLAQMKFTGSDDRLTLSFASRTHTLKSSGRISDVFLCRHEKIFHPNKGYIYVVKVMRENTHEATYIQRTFEEFQELHNKLRLLFPSSHLPSFPSRFVIGRSRGEAVAERRREELNGYIWHLIHAPPEVAECDLVYTFFHPLPRDEKAMGTSPAPKSSDGTWARPVGKVGGEVKLSISYKNNKLFIMVMHIRGLQLLQDGNDPDPYVKIYLLPDPQKTTKRKTKVARKTCNPTYNEMLVYDGIPKGDLQQRELQLSVLSEQGFWENVLLGEVNIRLRELDLAQEKTGWFALGSRSHGTL

SEQ ID NO: 12302 - protein, 180 aa, Homo sapiens
MLCLLLTLGVALVCGVPAMDIPQTKQDLELPKLAGTWHSMAMATNNISLMATLKAPLRVHITSLLPTPEDNLEIVLHRWENNSCVEKKVLGEKTENPKKFKINYTVANEATLLDTDYDNFLFLCLQDTTTPIQSMMCQYLARVLVEDDEIMQGFIRAFRPLPRHLWYLLDLKQMEEPCRF

SEQ ID NO: 12303 - protein, 158 aa, Homo sapiens
MLCLLLTLGVALVCGVPAMDIPQTKQDLELPKAPLRVHITSLLPTPEDNLEIVLHRWENNSCVEKKVLGEKTENPKKFKINYTVANEATLLDTDYDNFLFLCLQDTTTPIQSMMCQYLARVLVEDDEIMQGFIRAFRPLPRHLWYLLDLKQMEEPCRF

SEQ ID NO: 12304 - protein, 86 aa, Homo sapiens
MLCLLLTLGVALVCGVPAMDIPQTKQDLELPKDTTTPIQSMMCQYLARVLVEDDEIMQGFIRAFRPLPRHLWYLLDLKQMEEPCRF

SEQ ID NO: 12305 - protein, 1555 aa, Homo sapiens
MSEQTPAEAGAAGAREDACRDYQSSLEDLTFNSKPHINMLTILAEENLPFAKEIVSLIEAQTAKAPSSEKLPVMYLMDSIVKNVGREYLTAFTKNLVATFICVFEKVDENTRKSLFKLRSTWDEIFPLKKLYALDVRVNSLDPAWPIKPLPPNVNTSSIHVNPKFLNKSPEEPSTPGTVVSSPSISTPPIVPDIQKNLTQEQLIRQQLLAKQKQLLELQQKKLELELEQAKAQLAVSLSVQQETSNLGPGSAPSKLHVSQIPPMAVKAPHQVPVQSEKSRPGPSLQIQDLKGTNRDPRLNRISQHSHGKDQSHRKEFLMNTLNQSDTKTSKTIPSEKLNSSKQEKSKSGEKITKKELDQLDSKSKSKSKSPSPLKNKLSHTKDLKNQESESMRLSDMNKRDPRLKKHLQDKTDGKDDDVKEKRKTAEKKDKDEHMKSSEHRLAGSRNKIINGIVQKQDTITEESEKQGTKPGRSSTRKRSRSRSPKSRSPIIHSPKRRDRRSPKRRQRSMSPTSTPKAGKIRQSGAKQSHMEEFTPPSREDRNAKRSTKQDIRDPRRMKKTEEERPQETTNQHSTKSGTEPKENVENWQSSKSAKRWKSGWEENKSLQQVDEHSKPPHLRHRESWSSTKGILSPRAPKQQQHRLSVDANLQIPKELTLASKRELLQKTSERLASGEITQDDFLVVVHQIRQLFQYQEGVREEQRSPFNDRFPLKRPRYEDSDKPFVDSPASRFAGLDTNQRLTALAEDRPLFDGPSRPSVARDGPTKMIFEGPNKLSPRIDGPPTPASLRFDGSPGQMGGGGPLRFEGPQGQLGGGCPLRFEGPPGPVGTPLRFEGPIGQAGGGGFRFEGSPGLRFEGSPGGLRFEGPGGQPVGGLRFEGHRGQPVGGLRFEGPHGQPVGGLRFDNPRGQPVGGLRFEGGHGPSGAAIRFDGPHGQPGGGIRFEGPLLQQGVGMRFEGPHGQSVAGLRFEGQHNQLGGNLRFEGPHGQPGVGIRFEGPLVQQGGGMRFEGPSVPGGGLRIEGPLGQGGPRFEGCHALRFDGQPGQPSLLPRFDGLHGQPGPRFERTPGQPGPQRFDGPPGQQVQPRFDGVPQRFDGPQHQQASRFDIPLGLQGTRFDNHPSQRLESVSFNQTGPYNDPPGNAFNAPSQGLQFQRHEQIFDSPQGPNFNGPHGPGNQSFSNPLNRASGHYFDEKNLQSSQFGNFGNIPAPMTVGNIQASQQVLSGVAQPVAFGQGQQFLPVHPQNPGFVQNPSGALPKAYPDNHLSQVDVNELFSKLLKTGILKLSQTDSATTQVSEVTAQPPPEEEEDQNEDQDVPDLTNFTVEELKQRYDSVINRLYTGIQCYSCGMRFTTSQTDVYADHLDWHYRQNRTEKDVSRKVTHRRWYYSLTDWIEFEEIADLEERAKSQFFEKVHEEVVLKTQEAAKEKEFQSVPAGPAGAVESCEICQEQFEQYWDEEEEEWHLKNAIRVDGKIYHPSCYEDYQNTSSFDCTPSPSKTPVENPLNIMLNIVKNELQEPCDSPKVKEERIDTPPACTEESIATPSEIKTENDTVESV

SEQ ID NO: 12306 - protein, 126 aa, Homo sapiens
MDKSLLLELPILLCCFRALSGSLSMRNDAVNEIVAVKNNFPVIEIVQCRMCHLQFPGEKCSRGRGICTATTEEACMVGRMFKRDGNPWLTFMGCLKNCADVKGIRWSVYLVNFRCCRSHDLCNEDL

SEQ ID NO: 12307 - protein, 114 aa, Homo sapiens
MDKSLLLELPILLCCFRALSGSLSMRNDAVIEIVQCRMCHLQFPGEKCSRGRGICTATTEEACMVGRMFKRDGNPWLTFMGCLKNCADVKGIRWSVYLVNFRCCRSHDLCNEDL

SEQ ID NO: 12308 - protein, 1060 aa, Homo sapiens
MDSGAGGRRCPEAALLILGPPRMEHLRHSPGPGGQRLLLPSMLLALLLLLAPSPGHATRVVYKVPEEQPPNTLIGSLAADYGFPDVGHLYKLEVGAPYLRVDGKTGDIFTTETSIDREGLRECQNQLPGDPCILEFEVSITDLVQNGSPRLLEGQIEVQDINDNTPNFASPVITLAIPENTNIGSLFPIPLASDRDAGPNGVASYELQAGPEAQELFGLQVAEDQEEKQPQLIVMGNLDRERWDSYDLTIKVQDGGSPPRASSALLRVTVLDTNDNAPKFERPSYEAELSENSPIGHSVIQVKANDSDQGANAEIEYTFHQAPEVVRRLLRLDRNTGLITVQGPVDREDLSTLRFSVLAKDRGTNPKSARAQVVVTVKDMNDNAPTIEIRGIGLVTHQDGMANISEDVAEETAVALVQVSDRDEGENAAVTCVVAGDVPFQLRQASETGSDSKKKYFLQTTTPLDYEKVKDYTIEIVAVDSGNPPLSSTNSLKVQVVDVNDNAPVFTQSVTEVAFPENNKPGEVIAEITASDADSGSNAELVYSLEPEPAAKGLFTISPETGEIQVKTSLDREQRESYELKVVAADRGSPSLQGTATVLVNVLDCNDNDPKFMLSGYNFSVMENMPALSPVGMVTVIDGDKGENAQVQLSVEQDNGDFVIQNGTGTILSSLSFDREQQSTYTFQLKAVDGGVPPRSAYVGVTINVLDENDNAPYITAPSNTSHKLLTPQTRLGETVSQVAAEDFDSGVNAELIYSIAGGNPYGLFQIGSHSGAITLEKEIERRHHGLHRLVVKVSDRGKPPRYGTALVHLYVNETLANRTLLETLLGHSLDTPLDIDIAGDPEYERSKQRGNILFGVVAGVVAVALLIALAVLVRYCRQREAKSGYQAGKKETKDLYAPKPSGKASKGNKSKGKKSKSPKPVKPVEDEDEAGLQKSLKFNLMSDAPGDSPRIHLPLNYPPGSPDLGRHYRSNSPLPSIQLQPQSPSASKKHQVVQDLPPANTFVGTGDTTSTGSEQYSDYSYRTNPPKYPSKQVGQPFQLSTPQPLPHPYHGAIWTEVWE

SEQ ID NO: 12309 - protein, 1237 aa, Homo sapiens
MDSGAGGRRCPEAALLILGPPRMEHLRHSPGPGGQRLLLPSMLLALLLLLAPSPGHATRVVYKVPEEQPPNTLIGSLAADYGFPDVGHLYKLEVGAPYLRVDGKTGDIFTTETSIDREGLRECQNQLPGDPCILEFEVSITDLVQNGSPRLLEGQIEVQDINDNTPNFASPVITLAIPENTNIGSLFPIPLASDRDAGPNGVASYELQAGPEAQELFGLQVAEDQEEKQPQLIVMGNLDRERWDSYDLTIKVQDGGSPPRASSALLRVTVLDTNDNAPKFERPSYEAELSENSPIGHSVIQVKANDSDQGANAEIEYTFHQAPEVVRRLLRLDRNTGLITVQGPVDREDLSTLRFSVLAKDRGTNPKSARAQVVVTVKDMNDNAPTIEIRGIGLVTHQDGMANISEDVAEETAVALVQVSDRDEGENAAVTCVVAGDVPFQLRQASETGSDSKKKYFLQTTTPLDYEKVKDYTIEIVAVDSGNPPLSSTNSLKVQVVDVNDNAPVFTQSVTEVAFPENNKPGEVIAEITASDADSGSNAELVYSLEPEPAAKGLFTISPETGEIQVKTSLDREQRESYELKVVAADRGSPSLQGTATVLVNVLDCNDNDPKFMLSGYNFSVMENMPALSPVGMVTVIDGDKGENAQVQLSVEQDNGDFVIQNGTGTILSSLSFDREQQSTYTFQLKAVDGGVPPRSAYVGVTINVLDENDNAPYITAPSNTSHKLLTPQTRLGETVSQVAAEDFDSGVNAELIYSIAGGNPYGLFQIGSHSGAITLEKEIERRHHGLHRLVVKVSDRGKPPRYGTALVHLYVNETLANRTLLETLLGHSLDTPLDIDIAGDPEYERSKQRGNILFGVVAGVVAVALLIALAVLVRYCRQREAKSGYQAGKKETKDLYAPKPSGKASKGNKSKGKKSKSPKPVKPVEDEDEAGLQKSLKFNLMSDAPGDSPRIHLPLNYPPGSPDLGRHYRSNSPLPSIQLQPQSPSASKKHQVVQDLPPANTFVGTGDTTSTGSEQYSDYSYRTNPPKYPSKQLPHRRVTFSATSQAQELQDPSQHSYYDSGLEESETPSSKSSSGPRLGPLALPEDHYERTTPDGSIGEMEHPENDLRPLPDVAMTGTCTRECSEFGHSDTCWMPGQSSPSRRTKSSALKLSTFVPYQDRGGQEPAGAGSPSPPEDRNTKTAPVRLLPSYSAFSHSSHDSCKDSATLEEIPLTQTSDFPPAATPASAQTAKREIYL

SEQ ID NO: 12310 - protein, 677 aa, Homo sapiens
MHHLLEQSADMATALLAGEKLRELILPGAQDDKAGALAALLLQLKLELPFDRVVTIGTVLVPILLVTLVFTKNFAEEPIYCYTPHNFTRDQALYARGYCWTELRDALPGVDASLWPSLFEHKFLPYALLAFAAIMYVPALGWEFLASTRLTSELNFLLQEIDNCYHRAAEGRAPKIEKQIQSKGPGITEREKREIIENAEKEKSPEQNLFEKYLERRGRSNFLAKLYLARHVLILLLSAVPISYLCTYYATQKQNEFTCALGASPDGAAGAGPAVRVSCKLPSVQLQRIIAGVDIVLLCVMNLIILVNLIHLFIFRKSNFIFDKLHKVGIKTRRQWRRSQFCDINILAMFCNENRDHIKSLNRLDFITNESDLMYDNVVRQLLAALAQSNHDATPTVRDSGVQTVDPSANPAEPDGAAEPPVVKRPRKKMKWIPTSNPLPQPFKEPLAIMRVENSKAEKPKPARRKTATDTLIAPLLDRSAHHYKGGGGDPGPGPAPAPAPPPAPDKKHARHFSLDVHPYILGTKKAKAEAVPAALPASRSQEGGFLSQAEDCGLGLAPAPIKDAPLPEKEIPYPTEPARAGLPSGGPFHVRSPPAAPAVAPLTPASLGKAEPLTILSRNATHPLLHINTLYEAREEEDGGPRLPQDVGDLIAIPAPQQILIATFDEPRTVVSTVEF

SEQ ID NO: 12311 - protein, 643 aa, Homo sapiens
MHHLLEQSADMATALLAGEKLRELILPGAQDDKAGALAALLLQLKLELPFDRVVTIGTVLVPILLVTLVFTKNFAEEPIYCYTPHNFTRDQALYARGYCWTELRDALPGVDASLWPSLFEHKFLPYALLAFAAIMYVPALGWEFLASTRLTSELNFLLQEIDNCYHRAAEGRAPKIEKQIQSKGPGITEREKREIIENAEKEKSPEQNLFEKYLERRGRSNFLAKLYLARHVLILLLSAVPISYLCTYYATQKQNEFTCALGASPDGAAGAGPAVRVSCKLPSVQLQRIIAGVDIVLLCVMNLIILVNLIHLFIFRKSNFIFDKLHKVGIKTRRQWRRSQFCDINILAMFCNENRDHIKSLNRLDFITNESDLMYDNVVRQLLAALAQSNHDATPTVRDSGVQTVDPSANPAEPDGAAEPPVVKRPRKKMKWIPTSNPLPQPFKEPLAIMRVENSKAEKPKPARRKTATDTLIAPLLDRSAHHYKGGGGDPGPGPAPAPAPPPAPDKKHARHFSLDVHPYILGTKKAKAEAVPAALPASRSQEGGFLSQAEDCGLGLAPAPIKDAPLPEKEIPYPTEPARAGLPSGGPFHVRSPPAAPAVAPLTPASLGKAEPLTILSRNATHPLLHINTLSSSPPSTSRERS

SEQ ID NO: 12312 - protein, 509 aa, Homo sapiens
MYVPALGWEFLASTRLTSELNFLLQEIDNCYHRAAEGRAPKIEKQIQSKGPGITEREKREIIENAEKEKSPEQNLFEKYLERRGRSNFLAKLYLARHVLILLLSAVPISYLCTYYATQKQNEFTCALGASPDGAAGAGPAVRVSCKLPSVQLQRIIAGVDIVLLCVMNLIILVNLIHLFIFRKSNFIFDKLHKVGIKTRRQWRRSQFCDINILAMFCNENRDHIKSLNRLDFITNESDLMYDNVVRQLLAALAQSNHDATPTVRDSGVQTVDPSANPAEPDGAAEPPVVKRPRKKMKWIPTSNPLPQPFKEPLAIMRVENSKAEKPKPARRKTATDTLIAPLLDRSAHHYKGGGGDPGPGPAPAPAPPPAPDKKHARHFSLDVHPYILGTKKAKAEAVPAALPASRSQEGGFLSQAEDCGLGLAPAPIKDAPLPEKEIPYPTEPARAGLPSGGPFHVRSPPAAPAVAPLTPASLGKAEPLTILSRNATHPLLHINTLSSSPPSTSRERS

SEQ ID NO: 12313 - protein, 1069 aa, Homo sapiens
MLRMRTAGWARGWCLGCCLLLPLSLSLAAAKQLLRYRLAEEGPADVRIGNVASDLGIVTGSGEVTFSLESGSEYLKIDNLTGELSTSERRIDREKLPQCQMIFDENECFLDFEVSVIGPSQSWVDLFEGQVIVLDINDNTPTFPSPVLTLTVEENRPVGTLYLLPTATDRDFGRNGIERYELLQEPGGGGSGGESRRAGAADSAPYPGGGGNGASGGGSGGSKRRLDASEGGGGTNPGGRSSVFELQVADTPDGEKQPQLIVKGALDREQRDSYELTLRVRDGGDPPRSSQAILRVLITDVNDNSPRFEKSVYEADLAENSAPGTPILQLRAADLDVGVNGQIEYVFGAATESVRRLLRLDETSGWLSVLHRIDREEVNQLRFTVMARDRGQPPKTDKATVVLNIKDENDNVPSIEIRKIGRIPLKDGVANVAEDVLVDTPIALVQVSDRDQGENGVVTCTVVGDVPFQLKPASDTEGDQNKKKYFLHTSTPLDYEATREFNVVIVAVDSGSPSLSSNNSLIVKVGDTNDNPPMFGQSVVEVYFPENNIPGERVATVLATDADSGKNAEIAYSLDSSVMGIFAIDPDSGDILVNTVLDREQTDRYEFKVNAKDKGIPVLQGSTTVIVQVADKNDNDPKFMQDVFTFYVKENLQPNSPVGMVTVMDADKGRNAEMSLYIEENNNIFSIENDTGTIYSTMSFDREHQTTYTFRVKAVDGGDPPRSATATVSLFVMDENDNAPTVTLPKNISYTLLPPSSNVRTVVATVLATDSDDGINADLNYSIVGGNPFKLFEIDPTSGVVSLVGKLTQKHYGLHRLVVQVNDSGQPSQSTTTLVHVFVNESVSNATAIDSQIARSLHIPLTQDIAGDPSYEISKQRLSIVIGVVAGIMTVILIILIVVMARYCRSKNKNGYEAGKKDHEDFFTPQQHDKSKKPKKDKKNKKSKQPLYSSIVTVEASKPNGQRYDSVNEKLSDSPSMGRYRSVNGGPGSPDLARHYKSSSPLPTVQLHPQSPTAGKKHQAVQDLPPANTFVGAGDNISIGSDHCSEYSCQTNNKYSKQMRLHPYITVFG

SEQ ID NO: 12314 - protein, 1072 aa, Homo sapiens
MLRMRTAGWARGWCLGCCLLLPLSLSLAAAKQLLRYRLAEEGPADVRIGNVASDLGIVTGSGEVTFSLESGSEYLKIDNLTGELSTSERRIDREKLPQCQMIFDENECFLDFEVSVIGPSQSWVDLFEGQVIVLDINDNTPTFPSPVLTLTVEENRPVGTLYLLPTATDRDFGRNGIERYELLQEPGGGGSGGESRRAGAADSAPYPGGGGNGASGGGSGGSKRRLDASEGGGGTNPGGRSSVFELQVADTPDGEKQPQLIVKGALDREQRDSYELTLRVRDGGDPPRSSQAILRVLITDVNDNSPRFEKSVYEADLAENSAPGTPILQLRAADLDVGVNGQIEYVFGAATESVRRLLRLDETSGWLSVLHRIDREEVNQLRFTVMARDRGQPPKTDKATVVLNIKDENDNVPSIEIRKIGRIPLKDGVANVAEDVLVDTPIALVQVSDRDQGENGVVTCTVVGDVPFQLKPASDTEGDQNKKKYFLHTSTPLDYEATREFNVVIVAVDSGSPSLSSNNSLIVKVGDTNDNPPMFGQSVVEVYFPENNIPGERVATVLATDADSGKNAEIAYSLDSSVMGIFAIDPDSGDILVNTVLDREQTDRYEFKVNAKDKGIPVLQGSTTVIVQVADKNDNDPKFMQDVFTFYVKENLQPNSPVGMVTVMDADKGRNAEMSLYIEENNNIFSIENDTGTIYSTMSFDREHQTTYTFRVKAVDGGDPPRSATATVSLFVMDENDNAPTVTLPKNISYTLLPPSSNVRTVVATVLATDSDDGINADLNYSIVGGNPFKLFEIDPTSGVVSLVGKLTQKHYGLHRLVVQVNDSGQPSQSTTTLVHVFVNESVSNATAIDSQIARSLHIPLTQDIAGDPSYEISKQRLSIVIGVVAGIMTVILIILIVVMARYCRSKNKNGYEAGKKDHEDFFTPQQHDKSKKPKKDKKNKKSKQPLYSSIVTVEASKPNGQRYDSVNEKLSDSPSMGRYRSVNGGPGSPDLARHYKSSSPLPTVQLHPQSPTAGKKHQAVQDLPPANTFVGAGDNISIGSDHCSEYSCQTNNKYSKQVRCIPNIFKYPREG

SEQ ID NO: 12315 - protein, 331 aa, Homo sapiens
MEPEFLYDLLQLPKGVEPPAEEELSKGGKKKYLPPTSRKDPKFEELQKVLMEWINATLLPEHIVVRSLEEDMFDGLILHHLFQRLAALKLEAEDIALTATSQKHKLTVVLEAVNRSLQLEEWQAKWSVESIFNKDLLSTLHLLVALAKRFQPDLSLPTNVQVEVITIESTKSGLKSEKLVEQLTEYSTDKDEPPKDVFDELFKLAPEKVNAVKEAIVNFVNQKLDRLGLSVQNLDTQFADGVILLLLIGQLEGFFLHLKEFYLTPNSPAEMLHNVTLALELLKDEGLLSCPVSPEDIVNKDAKSTLRVLYGLFCKHTQKAHRDRTPHGAPN

SEQ ID NO: 12316 - protein, 273 aa, Homo sapiens
MEPEFLYDLLQLPKGVEPPAEEELSKGGKKKYLPPTSRKDPKFEELQKVLMEWINATLLPEHIVVRSLEEDMFDGLILHHLFQRLAALKLEAEDIALTATSQKHKLTVVLEAVNRSLQLEEWQAKWSVESIFNKDLLSTLHLLVALAKRFQPDLSLPTNVQVEVITIESTKSGLKSEKLVEQLTEYSTDKDEPPKDVFDELFKLAPEKVNAVKEAIVNFVNQKLDRLGLSVQNLDTQFADGVILLLLIGQLEGFFLHLKEFYLTPNSPAEMIS

SEQ ID NO: 12317 - protein, 187 aa, Homo sapiens
MEPEFLYDLLQLPKGVEPPAEEELSKGGKKKYLPPTSRKDPKFEELQKVLMEWINATLLPEHIVVRSLEEDMFDGLILHHLFQRLAALKLEAEDIALTATSQKHKLTVVLEAVNRSLQLEEWQAKWSVESIFNKDLLSTLHLLVALAKRFQPDLSLPTNVQVEVITIESTKSGLKSEKLVEQLTEYR

SEQ ID NO: 12318 - protein, 137 aa, Homo sapiens
MVPAKEQVPGRCDSTQRCFPGPSNWTGAGGRAGSQPFVGDGTLGTPNFCWDHKEKRAAESQLQAWEAMEPEFLYDLLQLPKGVEPPAEEELSKGGKKKYLPPTSRKDPKFEELQKHTWPSPVTGTGDTICGLARKTW

SEQ ID NO: 12319 - protein, 70 aa, Homo sapiens
MEPEFLYDLLQLPKGVEPPAEEELSKGGKKKYLPPTSRKDPKFEELQKHTWPSPVTGTGDTICGLARKTW

SEQ ID NO: 12320 - protein, 392 aa, Homo sapiens
MSLAHTAAEYMLSDALLPDRRGPRLKGLRLELPLDRIVKFVAVGSPLLLMSLAFAQEFSSGSPISCFSPSNFSIRQAAYVDSSCWDSLLHHKQDGPGQDKMKSLWPHKALPYSLLALALLMYLPVLLWQYAAVPALSSDLLFIISELDKSYNRSIRLVQHMLKIRQKSSDPYVFWNELEKARKERYFEFPLLERYLACKQRSHSLVATYLLRNSLLLIFTSATYLYLGHFHLDVFFQEEFSCSIKTGLLSDETHVPNLITCRLTSLSIFQIVSLSSVAIYTILVPVIIYNLTRLCRWDKRLLSVYEMLPAFDLLSRKMLGCPINDLNVILLFLRANISELISFSWLSVLCVLKDTTTQKHNIDTVVDFMTLLAGLEPSKPKHLTNSACDEHP

SEQ ID NO: 12321 - protein, 1070 aa, Homo sapiens
MSPVRRWGSPCLFPLQLFSLCWVLSVAQSKTVRYSTFEEDAPGTVIGTLAEDLHMKVSGDTSFRLMKQFNSSLLRVREGDGQLTVGDAGLDRERLCGQAPQCVLAFDVVSFSQEQFRLVHVEVEVRDVNDHAPRFPRAQIPVEVSEGAAVGTRIPLEVPVDEDVGANGLQTVRLAEPHSPFRVELQTRADGAQCADLVLLQELDRESQAAYSLELVAQDGGRPPRSATAALSVRVLDANDHSPAFPQGAVAEVELAEDAPVGSLLLDLDAADPDEGPNGDVVFAFGARTPPEARRLFRLDPRSGRLTLAGPVDYERQDTYELDVRAQDRGPGPRAATCKVIVRIRDVNDNAPDIAITPLAAPGAPATSPFAAAAAAAALGGADASSPAGAGTPEAGATSLVPEGAARESLVALVSTSDRDSGANGQVRCALYGHEHFRLQPAYAGSYLVVTAASLDRERIAEYNLTLVAEDRGAPPLRTVRPYTVRVGDENDNAPLFTRPVYEVSVRENNPPGAYLATVAARDRDLGRNGQVTYRLLEAEVGRAGGAVSTYVSVDPATGAIYALRSFDYETLRQLDVRIQASDGGSPQLSSSALVQVRVLDQNDHAPVLVHPAPANGSLEVAVPGRTAKDTVVARVQARDADEGANGELAFELQQQEPREAFAIGRRTGEILLTGDLSQEPPGRVFRALLVISDGGRPPLTTTATVSFVVTAGGGRGPAAPASAGSPERSRPPGSRLGVSGSVLQWDTPLIVIIVLAGSCTLLLAAIIAIATTCNRRKKEVRKGGALREERPGAAGGGASAPGSPEEAARGAGPRPNMFDVLTFPGTGKAPFGSPAADAPPPAVAAAEVPGSEGGSATGESACHFEGQQRLRGAHAEPYGASPGFGKEPAPPVAVWKGHSFNTISGREAEKFSGKDSGKGDSDFNDSDSDISGDALKKDLINHMQSGLWACTAECKILGHSDRCWSPSCSGPNAHPSPHPPAQMSTFCKSTSLPRDPLRRDNYYQAQLPKTVGLQSVYEKVLHRDYDRTVTLLSPPRPGRLPDLQEIGVPLYQSPPGRYLSPKKGANENV

SEQ ID NO: 12322 - protein, 973 aa, Homo sapiens
MSPVRRWGSPCLFPLQLFSLCWVLSVAQSKTVRYSTFEEDAPGTVIGTLAEDLHMKVSGDTSFRLMKQFNSSLLRVREGDGQLTVGDAGLDRERLCGQAPQCVLAFDVVSFSQEQFRLVHVEVEVRDVNDHAPRFPRAQIPVEVSEGAAVGTRIPLEVPVDEDVGANGLQTVRLAEPHSPFRVELQTRADGAQCADLVLLQELDRESQAAYSLELVAQDGGRPPRSATAALSVRVLDANDHSPAFPQGAVAEVELAEDAPVGSLLLDLDAADPDEGPNGDVVFAFGARTPPEARRLFRLDPRSGRLTLAGPVDYERQDTYELDVRAQDRGPGPRAATCKVIVRIRDVNDNAPDIAITPLAAPGAPATSPFAAAAAAAALGGADASSPAGAGTPEAGATSLVPEGAARESLVALVSTSDRDSGANGQVRCALYGHEHFRLQPAYAGSYLVVTAASLDRERIAEYNLTLVAEDRGAPPLRTVRPYTVRVGDENDNAPLFTRPVYEVSVRENNPPGAYLATVAARDRDLGRNGQVTYRLLEAEVGRAGGAVSTYVSVDPATGAIYALRSFDYETLRQLDVRIQASDGGSPQLSSSALVQVRVLDQNDHAPVLVHPAPANGSLEVAVPGRTAKDTVVARVQARDADEGANGELAFELQQQEPREAFAIGRRTGEILLTGDLSQEPPGRVFRALLVISDGGRPPLTTTATVSFVVTAGGGRGPAAPASAGSPERSRPPGSRLGVSGSVLQWDTPLIVIIVLAGSCTLLLAAIIAIATTCNRRKKEPYGASPGFGKEPAPPVAVWKGHSFNTISGREAEKFSGKDSGKGDSDFNDSDSDISGDALKKDLINHMQSGLWACTAECKILGHSDRCWSPSCSGPNAHPSPHPPAQMSTFCKSTSLPRDPLRRDNYYQAQLPKTVGLQSVYEKVLHRDYDRTVTLLSPPRPGRLPDLQEIGVPLYQSPPGRYLSPKKGANENV

SEQ ID NO: 12323 - protein, 868 aa, Homo sapiens
MATFISVQLKKTSEVDLAKPLVKFIQQTYPSGGEEQAQYCRAAEELSKLRRAAVGRPLDKHEGALETLLRYYDQICSIEPKFPFSENQICLTFTWKDAFDKGSLFGGSVKLALASLGYEKSCVLFNCAALASQIAAEQNLDNDEGLKIAAKHYQFASGAFLHIKETVLSALSREPTVDISPDTVGTLSLIMLAQAQEVFFLKATRDKMKDAIIAKLANQAADYFGDAFKQCQYKDTLPKEVFPVLAAKHCIMQANAEYHQSILAKQQKKFGEEIARLQHAAELIKTVASRYDEYVNVKDFSDKINRALAAAKKDNDFIYHDRVPDLKDLDPIGKATLVKSTPVNVPISQKFTDLFEKMVPVSVQQSLAAYNQRKADLVNRSIAQMREATTLANGVLASLNLPAAIEDVSGDTVPQSILTKSRSVIEQGGIQTVDQLIKELPELLQRNREILDESLRLLDEEEATDNDLRAKFKERWQRTPSNELYKPLRAEGTNFRTVLDKAVQADGQVKECYQSHRDTIVLLCKPEPELNAAIPSANPAKTMQGSEVVNVLKSLLSNLDEVKKEREGLENDLKSVNFDMTSKFLTALAQDGVINEEALSVTELDRVYGGLTTKVQESLKKQEGLLKNIQVSHQEFSKMKQSNNEANLREEVLKNLATAYDNFVELVANLKEGTKFYNELTEILVRFQNKCSDIVFARKTERDELLKDLQQSIAREPSAPSIPTPAYQSSPAGGHAPTPPTPAPRTMPPTKPQPPARPPPPVLPANRAPSATAPSPVGAGTAAPAPSQTPGSAPPPQAQGPPYPTYPGYPGYCQMPMPMGYNPYAYGQYNMPYPPVYHQSPGQAPYPGPQQPSYPFPQPPQQSYYPQQ

SEQ ID NO: 12324 - protein, 873 aa, Homo sapiens
MATFISVQLKKTSEVDLAKPLVKFIQQTYPSGGEEQAQYCRAAEELSKLRRAAVGRPLDKHEGALETLLRYYDQICSIEPKFPFSENQICLTFTWKDAFDKGSLFGGSVKLALASLGYEKSCVLFNCAALASQIAAEQNLDNDEGLKIAAKHYQFASGAFLHIKETVLSALSREPTVDISPDTVGTLSLIMLAQAQEVFFLKATRDKMKDAIIAKLANQAADYFGDAFKQCQYKDTLPKYFYFQEVFPVLAAKHCIMQANAEYHQSILAKQQKKFGEEIARLQHAAELIKTVASRYDEYVNVKDFSDKINRALAAAKKDNDFIYHDRVPDLKDLDPIGKATLVKSTPVNVPISQKFTDLFEKMVPVSVQQSLAAYNQRKADLVNRSIAQMREATTLANGVLASLNLPAAIEDVSGDTVPQSILTKSRSVIEQGGIQTVDQLIKELPELLQRNREILDESLRLLDEEEATDNDLRAKFKERWQRTPSNELYKPLRAEGTNFRTVLDKAVQADGQVKECYQSHRDTIVLLCKPEPELNAAIPSANPAKTMQGSEVVNVLKSLLSNLDEVKKEREGLENDLKSVNFDMTSKFLTALAQDGVINEEALSVTELDRVYGGLTTKVQESLKKQEGLLKNIQVSHQEFSKMKQSNNEANLREEVLKNLATAYDNFVELVANLKEGTKFYNELTEILVRFQNKCSDIVFARKTERDELLKDLQQSIAREPSAPSIPTPAYQSSPAGGHAPTPPTPAPRTMPPTKPQPPARPPPPVLPANRAPSATAPSPVGAGTAAPAPSQTPGSAPPPQAQGPPYPTYPGYPGYCQMPMPMGYNPYAYGQYNMPYPPVYHQSPGQAPYPGPQQPSYPFPQPPQQSYYPQQ

SEQ ID NO: 12325 - protein, 271 aa, Homo sapiens
MATFISVQLKKTSEVDLAKPLVKFIQQTYPSGGEEQAQYCRAAEELSKLRRAAVGRPLDKHEGALETLLRYYDQICSIEPKFPFSENQICLTFTWKDAFDKGSLFGGSVKLALASLGYEKSCVLFNCAALASQIAAEQNLDNDEGLKIAAKHYQFASGAFLHIKETVLSALSREPTVDISPDTVGTLSLIMLAQAQEVFFLKATRDKMKDAIIAKLANQAADYFGDAFKQCQYKDTLPKVSYCFYKHLLTLHVKYLDFFVYKKQVETYKEI

SEQ ID NO: 12326 - protein, 393 aa, Homo sapiens
MAPPPPSPQLLLLAALARLLGPSEVMAGPAEEAGAHCPESLWPLPPQVSPRVTYTRVSPGQAEDVTFLYHPCAHPWLKLQLALLAYACMANPSLTPDFSLTQDRPLVLTAWGLALEMAWVEPAWAAHWLMRRRRRKQRKKKAWIYCESLSGPAPSEPTPGRGRLCRRGCVQALALAFALRSWRPPGTEVTSQGPRQPSSSGAKRRRLRAALGPQPTRSALRFPSASPGSLKAKQSMAGIPGRESNAPSVPTVSLLPGAPGGNASSRTEAQVPNGQGSPGGCVCSSQASPAPRAAAPPRAARGPTPRTEEAAWAAMALTFLLVLLTLATLCTRLHRNFRRGESIYWGPTADSQDTVAAVLKRRLLQPSRRVKRSRRRPLLPPTPDSGPEGESSE

SEQ ID NO: 12327 - protein, 386 aa, Homo sapiens
MNEPTENRLGCSRTPEPDIRLRKGHQLDGTRRGDNDSHQGDLEPILEASVLSSHHKKSSEEHEYSDEAPQEDEGFMGMSPLLQAHHAMEKMEEFVCKVWEGRWRVIPHDVLPDWLKDNDFLLHGHRPPMPSFRACFKSIFRIHTETGNIWTHLLGCVFFLCLGIFYMFRPNISFVAPLQEKVVFGLFFLGAILCLSFSWLFHTVYCHSEGVSRLFSKLDYSGIALLIMGSFVPWLYYSFYCNPQPCFIYLIVICVLGIAAIIVSQWDMFATPQYRGVRAGVFLGLGLSGIIPTLHYVISEGFLKAATIGQIGWLMLMASLYITGAALYAARIPERFFPGKCDIWFHSHQLFHIFVVAGAFVHFHGVSNLQEFRFMIGGGCSEEDAL

SEQ ID NO: 12328 - protein, 189 aa, Homo sapiens
MAAKQPPPLMKKHSQTDLVSRLKTRKILGVGGEDDDGEVHRSKISQVLGNEIKFTIREPLGLRVWQFVSAVLFSGIAIMALAFPDQLYDAVFDGAQVTSKTPIRLYGGALLSISLIMWNALYTAEKVIIRWTLLTEACYFGVQFLVVTATLAETGLMSLGILLLLVSRLLFVVISIYYYYQVGRRPKKA

SEQ ID NO: 12329 - protein, 125 aa, Homo sapiens
MADEELEALRRQRLAELQAKHGDPGDAAQQEAKHREAEMRNSILAQVLDQSARARLSNLALVKPEKTKAVENYLIQMARYGQLSEKVSEQGLIEILKKVSQQTEKTTTVKFNRRKVMDSDEDDDY

SEQ ID NO: 12330 - protein, 129 aa, Homo sapiens
MADEELEALRRQRLAELQAKHGDPGDAAQQEAKHREAEMRNSILAQVLDQSARARLSNLALVKPEKTKAVENYLIQMARYGQLSEKVSLDSLEELYCYLLYQNMASKGQLHLHWITEFLLTLRRNCWRE

SEQ ID NO: 12331 - protein, 728 aa, Homo sapiens
MAGPEGFQYRALYPFRRERPEDLELLPGDVLVVSRAALQALGVAEGGERCPQSVGWMPGLNERTRQRGDFPGTYVEFLGPVALARPGPRPRGPRPLPARPRDGAPEPGLTLPDLPEQFSPPDVAPPLLVKLVEAIERTGLDSESHYRPELPAPRTDWSLSDVDQWDTAALADGIKSFLLALPAPLVTPEASAEARRALREAAGPVGPALEPPTLPLHRALTLRFLLQHLGRVASRAPALGPAVRALGATFGPLLLRAPPPPSSPPPGGAPDGSEPSPDFPALLVEKLLQEHLEEQEVAPPALPPKPPKAKPASTVLANGGSPPSLQDAEWYWGDISREEVNEKLRDTPDGTFLVRDASSKIQGEYTLTLRKGGNNKLIKVFHRDGHYGFSEPLTFCSVVDLINHYRHESLAQYNAKLDTRLLYPVSKYQQDQIVKEDSVEAVGAQLKVYHQQYQDKSREYDQLYEEYTRTSQELQMKRTAIEAFNETIKIFEEQGQTQEKCSKEYLERFRREGNEKEMQRILLNSERLKSRIAEIHESRTKLEQQLRAQASDNREIDKRMNSLKPDLMQLRKIRDQYLVWLTQKGARQKKINEWLGIKNETEDQYALMEDEDDLPHHEERTWYVGKINRTQAEEMLSGKRDGTFLIRESSQRGCYACSVVVDGDTKHCVIYRTATGFGFAEPYNLYGSLKELVLHYQHASLVQHNDALTVTLAHPVRAPGPGPPPAAR

SEQ ID NO: 12332 - protein, 387 aa, Homo sapiens
MEVLAAETTSQQERLQAIAEKRKRQAEIENKRRQLEDERRQLQHLKSKALRERWLLEGTPSSASEGDEDLRRQMQDDEQKTRLLEDSVSRLEKEIEVLERGDSAPATAKENAAAPSPVRAPAPSPAKEERKTEVVMNSQQTPVGTPKDKRVSNTPLRTVDGSPMMKAAMYSVEITVEKDKVTGETRVLSSTTLLPRQPLPLGIKVYEDETKVVHAVDGTAENGIHPLSSSEVDELIHKADEVTLSEAGSTAGAAETRGAVEGAARTTPSRREITGVQAQPGEATSGPPGIQPGQEPPVTMIFMGYQNVEDEAETKKVLGLQDTITAELVVIEDAAEPKEPAPPNGSAAEPPTEAASREENQAGPEATTSDPQDLDMKKHRCKCCSIM

SEQ ID NO: 12333 - protein, 343 aa, Homo sapiens
MEVLAAETTSQQERLQAIAEKRKRQAEIENKRRQLEDERRQLQHLKSKALRERWLLEGTPSSASEGDEDLRRQMQDDEQKTRLLEDSVSRLEKEIEVLERGDSAPATAKENAAAPSPVRAPAPSPAKEERKTEVVMNSQQTPVGTPKDKRVSNTPLRTVDGSPMMKAVVHAVDGTAENGIHPLSSSEVDELIHKADEVTLSEAGSTAGAAETRGAVEGAARTTPSRREITGVQAQPGEATSGPPGIQPGQEPPVTMIFMGYQNVEDEAETKKVLGLQDTITAELVVIEDAAEPKEPAPPNGSAAEPPTEAASREENQAGPEATTSDPQDLDMKKHRCKCCSIM

SEQ ID NO: 12334 - protein, 540 aa, Homo sapiens
MQQVLENLTELPSSTGAEEIDLIFLKGIMENPIVKSLAKAHERLEDSKLEAVSDNNLELVNEILEDITPLINVDENVAELVGILKEPHFQSLLEAHDIVASKCYDSPPSSPEMNNSSINNQLLPVDAIRILGIHKRAGEPLGVTFRVENNDLVIARILHGGMIDRQGLLHVGDIIKEVNGHEVGNNPKELQELLKNISGSVTLKILPSYRDTITPQQVFVKCHFDYNPYNDNLIPCKEAGLKFSKGEILQIVNREDPNWWQASHVKEGGSAGLIPSQFLEEKRKAFVRRDWDNSGPFCGTISSKKKKKMMYLTTRNAEFDRHEIQIYEEVAKMPPFQRKTLVLIGAQGVGRRSLKNRFIVLNPTRFGTTVPFTSRKPREDEKDGQAYKFVSRSEMEADIKAGKYLEHGEYEGNLYGTKIDSILEVVQTGRTCILDVNPQALKVLRTSEFMPYVVFIAAPELETLRAMHKAVVDAGITTKLLTDSDLKKTVDESARIQRAYNHYFDLIIINDNLDKAFEKLQTAIEKLRMEPQWVPISWVY

SEQ ID NO: 12335 - protein, 675 aa, Homo sapiens
MTTSHMNGHVTEESDSEVKNVDLASPEEHQKHREMAVDCPGDLGTRMMPIRRSAQLERIRQQQEDMRRRREEEGKKQELDLNSSMRLKKLAQIPPKTGIDNPMFDTEEGIVLESPHYAVKILEIEDLFSSLKHIQHTLVDSQSQEDISLLLQLVQNKDFQNAFKIHNAITVHMNKASPPFPLISNAQDLAQEVQTVLKPVHHKEGQELTALLNTPHIQALLLAHDKVAEQEMQLEPITDERVYESIGQYGGETVKIVRIEKARDIPLGATVRNEMDSVIISRIVKGGAAEKSGLLHEGDEVLEINGIEIRGKDVNEVFDLLSDMHGTLTFVLIPSQQIKPPPAKETVIHVKAHFDYDPSDDPYVPCRELGLSFQKGDILHVISQEDPNWWQAYREGDEDNQPLAGLVPGKSFQQQREAMKQTIEEDKEPEKSGKLWCAKKNKKKRKKVLYNANKNDDYDNEEILTYEEMSLYHQPANRKRPIILIGPQNCGQNELRQRLMNKEKDRFASAVPHTTRSRRDQEVAGRDYHFVSRQAFEADIAAGKFIEHGEFEKNLYGTSIDSVRQVINSGKICLLSLRTQSLKTLRNSDLKPYIIFIAPPSQERLRALLAKEGKNPKPEELREIIEKTREMEQNNGHYFDTAIVNSDLDKAYQELLRLINKLDTEPQWVPSTWLR

SEQ ID NO: 12336 - protein, 641 aa, Homo sapiens
MAVDCPGDLGTRMMPIRRSAQLERIRQQQEDMRRRREEEGKKQELDLNSSMRLKKLAQIPPKTGIDNPMFDTEEGIVLESPHYAVKILEIEDLFSSLKHIQHTLVDSQSQEDISLLLQLVQNKDFQNAFKIHNAITVHMNKASPPFPLISNAQDLAQEVQTVLKPVHHKEGQELTALLNTPHIQALLLAHDKVAEQEMQLEPITDERVYESIGQYGGETVKIVRIEKARDIPLGATVRNEMDSVIISRIVKGGAAEKSGLLHEGDEVLEINGIEIRGKDVNEVFDLLSDMHGTLTFVLIPSQQIKPPPAKETVIHVKAHFDYDPSDDPYVPCRELGLSFQKGDILHVISQEDPNWWQAYREGDEDNQPLAGLVPGKSFQQQREAMKQTIEEDKEPEKSGKLWCAKKNKKKRKKVLYNANKNDDYDNEEILTYEEMSLYHQPANRKRPIILIGPQNCGQNELRQRLMNKEKDRFASAVPHTTRSRRDQEVAGRDYHFVSRQAFEADIAAGKFIEHGEFEKNLYGTSIDSVRQVINSGKICLLSLRTQSLKTLRNSDLKPYIIFIAPPSQERLRALLAKEGKNPKPEELREIIEKTREMEQNNGHYFDTAIVNSDLDKAYQELLRLINKLDTEPQWVPSTWLR

SEQ ID NO: 12337 - protein, 1141 aa, Homo sapiens
MAVPGDAARVRDKPVHSGVSQAPTAGRDCHHRADPASPRDSGCRGCWGDLVLQPLRSSRKLSSALCAGSLSFLLALLVRLVRGEVGCDLEQCKEAAAAEEEEAAPGAEGGVFPGPRGGAPGGGARLSPWLQPSALLFSLLCAFFWMGLYLLRAGVRLPLAVALLAACCGGEALVQIGLGVGEDHLLSLPAAGVVLSCLAAATWLVLRLRLGVLMIALTSAVRTVSLISLERFKVAWRPYLAYLAGVLGILLARYVEQILPQSAEAAPREHLGSQLIAGTKEDIPVFKRRRRSSSVVSAEMSGCSSKSHRRTSLPCIPREQLMGHSEWDHKRGPRGSQSSGTSITVDIAVMGEAHGLITDLLADPSLPPNVCTSLRAVSNLLSTQLTFQAIHKPRVNPVTSLSENYTCSDSEESSEKDKLAIPKRLRRSLPPGLLRRVSSTWTTTTSATGLPTLEPAPVRRDRSTSIKLQEAPSSSPDSWNNPVMMTLTKSRSFTSSYAISAANHVKAKKQSRPGALAKISPLSSPCSSPLQGTPASSLVSKISAVQFPESADTTAKQSLGSHRALTYTQSAPDLSPQILTPPVICSSCGRPYSQGNPADEPLERSGVATRTPSRTDDTAQVTSDYETNNNSDSSDIVQNEDETECLREPLRKASACSTYAPETMMFLDKPILAPEPLVMDNLDSIMEQLNTWNFPIFDLVENIGRKCGRILSQVSYRLFEDMGLFEAFKIPIREFMNYFHALEIGYRDIPYHNRIHATDVLHAVWYLTTQPIPGLSTVINDHGSTSDSDSDSGFTHGHMGYVFSKTYNVTDDKYGCLSGNIPALELMALYVAAAMHDYDHPGRTNAFLVATSAPQAVLYNDRSVLENHHAAAAWNLFMSRPEYNFLINLDHVEFKHFRFLVIEAILATDLKKHFDFVAKFNGKVNDDVGIDWTNENDRLLVCQMCIKLADINGPAKCKELHLQWTDGIVNEFYEQGDEEASLGLPISPFMDRSAPQLANLQESFISHIVGPLCNSYDSAGLMPGKWVEDSDESGDTDDPEEEEEEAPAPNEEETCENNESPKKKTFKRRKIYCQITQHLLQNHKMWKKVIEEEQRLAGIENQSLDQTPQSHSSEQIQAIKEEEEEKGKPRGEEIPTQKPDQ

SEQ ID NO: 12338 - protein, 535 aa, Homo sapiens
MKLWVSALLMAWFGVLSCVQAEFFTSIGHMTDLIYAEKELVQSLKEYILVEEAKLSKIKSWANKMEALTSKSAADAEGYLAHPVNAYKLVKRLNTDWPALEDLVLQDSAAGFIANLSVQRQFFPTDEDEIGAAKALMRLQDTYRLDPGTISRGELPGTKYQAMLSVDDCFGMGRSAYNEGDYYHTVLWMEQVLKQLDAGEEATTTKSQVLDYLSYAVFQLGDLHRALELTRRLLSLDPSHERAGGNLRYFEQLLEEEREKTLTNQTEAELATPEGIYERPVDYLPERDVYESLCRGEGVKLTPRRQKRLFCRYHHGNRAPQLLIAPFKEEDEWDSPHIVRYYDVMSDEEIERIKEIAKPKLARATVRDPKTGVLTVASYRVSKSSWLEEDDDPVVARVNRRMQHITGLTVKTAELLQVANYGVGGQYEPHFDFSRNDERDTFKHLGTGNRVATFLNYMSDVEAGGATVFPDLGAAIWPKKGTAVFWYNLLRSGEGDYRTRHAACPVLVGCKWVSNKWFHERGQEFLRPCGSTEVD

SEQ ID NO: 12339 - protein, 533 aa, Homo sapiens
MKLWVSALLMAWFGVLSCVQAEFFTSIGHMTDLIYAEKELVQSLKEYILVEEAKLSKIKSWANKMEALTSKSAADAEGYLAHPVNAYKLVKRLNTDWPALEDLVLQDSAAGFIANLSVQRQFFPTDEDEIGAAKALMRLQDTYRLDPGTISRGELPGTKYQAMLSVDDCFGMGRSAYNEGDYYHTVLWMEQVLKQLDAGEEATTTKSQVLDYLSYAVFQLGDLHRALELTRRLLSLDPSHERAGGNLRYFEQLLEEEREKTLTNQTEAELATPEGIYERPVDYLPERDVYESLCRGEGVKLTPRRQKRLFCRYHHGNRAPQLLIAPFKEEDEWDSPHIVRYYDVMSDEEIERIKEIAKPKLARATVRDPKTGVLTVASYRVSKSSWLEEDDDPVVARVNRRMQHITGLTVKTAELLQVANYGVGGQYEPHFDFSRRPFDSGLKTEGNRLATFLNYMSDVEAGGATVFPDLGAAIWPKKGTAVFWYNLLRSGEGDYRTRHAACPVLVGCKWVSNKWFHERGQEFLRPCGSTEVD

SEQ ID NO: 12340 - protein, 148 aa, Homo sapiens
MKLLVLAVLLTVAAADSGISPRAVWQFRKMIKCVIPGSDPFLEYNNYGCYCGLGGSGTPVDELDKCCQTHDNCYDQAKKLDSCKFLLDNPYTHTYSYSCSGSAITCSSKNKECEAFICNCDRNAAICFSKAPYNKAHKNLDTKKYCQS

SEQ ID NO: 12341 - protein, 785 aa, Homo sapiens
MPKGRQKVPHLDAPLGLPTCLWLELAGLFLLVPWVMGLAGTGGPDGQGTGGPSWAVHLESLEGDGEEETLEQQADALAQAAGLVNAGRIGELQGHYLFVQPAGHRPALEVEAIRQQVEAVLAGHEAVRWHSEQRLLRRAKRSVHFNDPKYPQQWHLNNRRSPGRDINVTGVWERNVTGRGVTVVVVDDGVEHTIQDIAPNYSPEGSYDLNSNDPDPMPHPDVENGNHHGTRCAGEIAAVPNNSFCAVGVAYGSRIAGIRVLDGPLTDSMEAVAFNKHYQINDIYSCSWGPDDDGKTVDGPHQLGKAALQHGVIAGRQGFGSIFVVASGNGGQHNDNCNYDGYANSIYTVTIGAVDEEGRMPFYAEECASMLAVTFSGGDKMLRSIVTTDWDLQKGTGCTEGHTGTSAAAPLAAGMIALMLQVRPCLTWRDVQHIIVFTATRYEDRRAEWVTNEAGFSHSHQHGFGLLNAWRLVNAAKIWTSVPYLASYVSPVLKENKAIPQSPRSLEVLWNVSRMDLEMSGLKTLEHVAVTVSITHPRRGSLELKLFCPSGMMSLIGAPRSMDSDPNGFNDWTFSTVRCWGERARGTYRLVIRDVGDESFQVGILRQWQLTLYGSVWSAVDIRDRQRLLESAMSGKYLHDDFALPCPPGLKIPEEDGYTITPNTLKTLVLVGCFTVFWTVYYMLEVYLSQRNVASNQVCRSGPCHWPHRSRKAKEEGTELESVPLCSSKDPDEVETESRGPPTTSDLLAPDLLEQGDWSLSQNKSALDCPHQHLDVPHGKEEQIC

SEQ ID NO: 12342 - protein, 761 aa, Homo sapiens
MPNFCAAPNCTRKSTQSDLAFFRFPRDPARCQKWVENCRRADLEDKTPDQLNKHYRLCAKHFETSMICRTSPYRTVLRDNAIPTIFDLTSHLNNPHSRHRKRIKELSEDEIRTLKQKKIDETSEQEQKHKETNNSNAQNPSEEEGEGQDEDILPLTLEEKENKEYLKSLFEILILMGKQNIPLDGHEADEIPEGLFTPDNFQALLECRINSGEEVLRKRFETTAVNTLFCSKTQQRQMLEICESCIREETLREVRDSHFFSIITDDVVDIAGEEHLPVLVRFVDESHNLREEFIGFLPYEADAEILAVKFHTMITEKWGLNMEYCRGQAYIVSSGFSSKMKVVASRLLEKYPQAIYTLCSSCALNMWLAKSVPVMGVSVALGTIEEVCSFFHRSPQLLLELDNVISVLFQNSKERGKELKEICHSQWTGRHDAFEILVELLQALVLCLDGINSDTNIRWNNYIAGRAFVLCSAVSDFDFIVTIVVLKNVLSFTRAFGKNLQGQTSDVFFAAGSLTAVLHSLNEVMENIEVYHEFWFEEATNLATKLDIQMKLPGKFRRAHQGNLESQLTSESYYKETLSVPTVEHIIQELKDIFSEQHLKALKCLSLVPSVMGQLKFNTSEEHHADMYRSDLPNPDTLSAELHCWRIKWKHRGKDIELPSTIYEALHLPDIKFFPNVYALLKVLCILPVMKVENERYENGRKRLKAYLRNTLTDQRSSNLALLNINFDIKHDLDLMVDTYIKLYTSKSELPTDNSETVENT

SEQ ID NO: 12343 - protein, 492 aa, Homo sapiens
MPNFCAAPNCTRKSTQSDLAFFRFPRDPARCQKWVENCRRADLEDKTPDQLNKHYRLCAKHFETSMICRTSPYRTVLRDNAIPTIFDLTSHLNNPHSRHRKRIKELSEDEIRTLKQKKIDETSEQEQKHKETNNSNAQNPSEEEGEGQDEDILPLTLEEKENKEYLKSLFEILILMGKQNIPLDGHEADEIPEGLFTPDNFQALLECRINSGEEVLRKRFETTAVNTLFCSKTQQRQMLEICESCIREETLREVRDSHFFSIITDDVVDIAGEEHLPVLVRFVDESHNLREEFIGFLPYEADAEILAVKFHTMITEKWGLNMEYCRGQAYIVSSGFSSKMKVVASRLLEKYPQAIYTLCSSCALNMWLAKSVPVMGVSVALGTIEEVCSFFHRSPQLLLELDNVISVLFQNSKERGKELKEICHSQWTGRHDAFEILVELLQALVLCLDGINSDTNIRWNNYIAGRAFVLCSAVSDFDFIVTIVVLKNEIKI

SEQ ID NO: 12344 - protein, 260 aa, Homo sapiens
MAGSPLLWGPRAGGVGLLVLLLLGLFRPPPALCARPVKEPRGLSAASPPLAETGAPRRFRRSVPRGEAAGAVQELARALAHLLEAERQERARAEAQEAEDQQARVLAQLLRVWGAPRNSDPALGLDDDPDAPAAQLARALLRARLDPAALAAQLVPAPVPAAALRPRPPVYDDGPAGPDAEEAGDETPDVDPELLRYLLGRILAGSADSEGVAAPRRLRRAADHDVGSELPPEGVLGALLRVKRLETPAPQVPARRLLPP

SEQ ID NO: 12345 - protein, 434 aa, Homo sapiens
MDDQSRMLQTLAGVNLAGHSVQGGMALPPPPHGHEGADGDGRKQDIGDILHQIMTITDQSLDEAQAKKHALNCHRMKPALFSVLCEIKEKTGLSIRGAQEEDPPDPQLMRLDNMLLAEGVSGPEKGGGSAAAAAAAAASGGSSDNSIEHSDYRAKLTQIRQIYHTELEKYEQACNEFTTHVMNLLREQSRTRPISPKEIERMVGIIHRKFSSIQMQLKQSTCEAVMILRSRFLDARRKRRNFSKQATEILNEYFYSHLSNPYPSEEAKEELAKKCSITVSQVSNWFGNKRIRYKKNIGKFQEEANLYAAKTAVTAAHAVAAAVQNNQTNSPTTPNSGSSGSFNLPNSGDMFMNMQSLNGDSYQGSQVGANVQSQVDTLRHVINQTGGYSDGLGGNSLYSPHNLNANGGWQDATTPSSVTSPTEGPGSVHSDTSN

SEQ ID NO: 12346 - protein, 351 aa, Homo sapiens
MDDQSRMLQTLAGVNLAGHSVQGGMALPPPPHGHEGADGDGRKQDIGDILHQIMTITDQSLDEAQAKKHALNCHRMKPALFSVLCEIKEKTGLSIRGAQEEDPPDPQLMRLDNMLLAEGVSGPEKGGGSAAAAAAAAASGGSSDNSIEHSDYRAKLTQIRQIYHTELEKYEQACNEFTTHVMNLLREQSRTRPISPKEIERMVGIIHRKFSSIQMQLKQSTCEAVMILRSRFLDARRKRRNFSKQATEILNEYFYSHLSNPYPSEEAKEELAKKCSITVSQVSNWFGNKRIRYKKNIGKFQEEANLYAAKTAVTAAHAVAAAVQNNQTNSPTTPNSGGYPPSCYQSDGRLQ

SEQ ID NO: 12347 - protein, 253 aa, Homo sapiens
MNLLREQSRTRPISPKEIERMVGIIHRKFSSIQMQLKQSTCEAVMILRSRFLDARRKRRNFSKQATEILNEYFYSHLSNPYPSEEAKEELAKKCSITVSQVSNWFGNKRIRYKKNIGKFQEEANLYAAKTAVTAAHAVAAAVQNNQTNSPTTPNSGSSGSFNLPNSGDMFMNMQSLNGDSYQGSQVGANVQSQVDTLRHVINQTGGYSDGLGGNSLYSPHNLNANGGWQDATTPSSVTSPTEGPGSVHSDTSN

SEQ ID NO: 12348 - protein, 170 aa, Homo sapiens
MNLLREQSRTRPISPKEIERMVGIIHRKFSSIQMQLKQSTCEAVMILRSRFLDARRKRRNFSKQATEILNEYFYSHLSNPYPSEEAKEELAKKCSITVSQVSNWFGNKRIRYKKNIGKFQEEANLYAAKTAVTAAHAVAAAVQNNQTNSPTTPNSGGYPPSCYQSDGRLQ

SEQ ID NO: 12349 - protein, 359 aa, Homo sapiens
MKPALFSVLCEIKEKTGLSIRGAQEEDPPDPQLMRLDNMLLAEGVSGPEKGGGSAAAAAAAAASGGSSDNSIEHSDYRAKLTQIRQIYHTELEKYEQACNEFTTHVMNLLREQSRTRPISPKEIERMVGIIHRKFSSIQMQLKQSTCEAVMILRSRFLDARRKRRNFSKQATEILNEYFYSHLSNPYPSEEAKEELAKKCSITVSQVSNWFGNKRIRYKKNIGKFQEEANLYAAKTAVTAAHAVAAAVQNNQTNSPTTPNSGSSGSFNLPNSGDMFMNMQSLNGDSYQGSQVGANVQSQVDTLRHVINQTGGYSDGLGGNSLYSPHNLNANGGWQDATTPSSVTSPTEGPGSVHSDTSN

SEQ ID NO: 12350 - protein, 388 aa, Homo sapiens
MKWLLLLGLVALSECIMYKVPLIRKKSLRRTLSERGLLKDFLKKHNLNPARKYFPQWEAPTLVDEQPLENYLDMEYFGTIGIGTPAQDFTVVFDTGSSNLWVPSVYCSSLACTNHNRFNPEDSSTYQSTSETVSITYGTGSMTGILGYDTVQVGGISDTNQIFGLSETEPGSFLYYAPFDGILGLAYPSISSSGATPVFDNIWNQGLVSQDLFSVYLSADDKSGSVVIFGGIDSSYYTGSLNWVPVTVEGYWQITVDSITMNGETIACAEGCQAIVDTGTSLLTGPTSPIANIQSDIGASENSDGDMVVSCSAISSLPDIVFTINGVQYPVPPSAYILQSEGSCISGFQGMNVPTESGELWILGDVFIRQYFTVFDRANNQVGLAPVA

SEQ ID NO: 12351 - protein, 749 aa, Homo sapiens
MEAETGSSVETGKKANRGTRIALVVFVGGTLVLGTILFLVSQGLLSLQAKQEYCLKPECIEAAAAILSKVNLSVDPCDNFFRFACDGWISNNPIPEDMPSYGVYPWLRHNVDLKLKELLEKSISRRRDTEAIQKAKILYSSCMNEKAIEKADAKPLLHILRHSPFRWPVLESNIGPEGVWSERKFSLLQTLATFRGQYSNSVFIRLYVSPDDKASNEHILKLDQATLSLAVREDYLDNSTEAKSYRDALYKFMVDTAVLLGANSSRAEHDMKSVLRLEIKIAEIMIPHENRTSEAMYNKMNISELSAMIPQFDWLGYIKKVIDTRLYPHLKDISPSENVVVRVPQYFKDLFRILGSERKKTIANYLVWRMVYSRIPNLSRRFQYRWLEFSRVIQGTTTLLPQWDKCVNFIESALPYVVGKMFVDVYFQEDKKEMMEELVEGVRWAFIDMLEKENEWMDAGTKRKAKEKARAVLAKVGYPEFIMNDTHVNEDLKAIKFSEADYFGNVLQTRKYLAQSDFFWLRKAVPKTEWFTNPTTVNAFYSASTNQIRFPAGELQKPFFWGTEYPRSLSYGAIGVIVGHEFTHGFDNNGRKYDKNGNLDPWWSTESEEKFKEKTKCMINQYSNYYWKKAGLNVKGKRTLGENIADNGGLREAFRAYRKWINDRRQGLEEPLLPGITFTNNQLFFLSYAHVRCNSYRPEAAREQVQIGAHSPPQFRVNGAISNFEEFQKAFNCPPNSTMNRGMDSCRLW

SEQ ID NO: 12352 - protein, 236 aa, Homo sapiens
MTSEKGPSTGDPTLRRRIEPWEFDVFYDPRELRKEACLLYEIKWGMSRKIWRSSGKNTTNHVEVNFIKKFTSERDFHPSMSCSITWFLSWSPCWECSQAIREFLSRHPGVTLVIYVARLFWHMDQQNRQGLRDLVNSGVTIQIMRASEYYHCWRNFVNYPPGDEAHWPQYPPLWMMLYALELHCIILSLPPCLKISRRWQNHLTFFRLHLQNCHYQTIPPHILLATGLIHPSVAWR

SEQ ID NO: 12353 - protein, 913 aa, Homo sapiens
MKDSENKGASSPDMEPSYGGGLFDMVKGGAGRLFSNLKDNLKDTLKDTSSRVIQSVTSYTKGDLDFTYVTSRIIVMSFPLDNVDIGFRNQVDDIRSFLDSRHLDHYTVYNLSPKSYRTAKFHSRVSECSWPIRQAPSLHNLFAVCRNMYNWLLQNPKNVCVVHCLDGRAASSILVGAMFIFCNLYSTPGPAIRLLYAKRPGIGLSPSHRRYLGYMCDLLADKPYRPHFKPLTIKSITVSPIPFFNKQRNGCRPYCDVLIGETKIYSTCTDFERMKEYRVQDGKIFIPLNITVQGDVVVSMYHLRSTIGSRLQAKVTNTQIFQLQFHTGFIPLDTTVLKFTKPELDACDVPEKYPQLFQVTLDVELQPHDKVIDLTPPWEHYCTKDVNPSILFSSHQEHQDTLALGGQAPIDIPPDNPRHYGQSGFFASLCWQDQKSEKSFCEEDHAALVNQESEQSDDELLTLSSPHGNANGDKPHGVKKPSKKQQEPAAPPPPEDVDLLGLEGSAMSNSFSPPAAPPTNSELLSDLFGGGGAAGPTQAGQSGVEDVFHPSGPASTQSTPRRSATSTSASPTLRVGEGATFDPFGAPSKPSGQDLLGSFLNTSSASSDPFLQPTRSPSPTVHASSTPAVNIQPDVSGGWDWHAKPGGFGMGSKSAATSPTGSSHGTPTHQSKPQTLDPFADLGTLGSSSFASKPTTPTGLGGGFPPLSSPQKASPQPMGGGWQQGGAYNWQQPQPKPQPSMPHSSPQNRPNYNVSFSAMPGGQNERGKGSSNLEGKQKAADFEDLLSGQGFNAHKDKKGPRTIAEMRKEEMAKEMDPEKLKILEWIEGKERNIRALLSTMHTVLWAGETKWKPVGMADLVTPEQVKKVYRKAVLVVHPDKATGQPYEQYAKMIFMELNDAWSEFENQGQKPLY

SEQ ID NO: 12354 - protein, 970 aa, Homo sapiens
MSLLGSYRKKTSNDGYESLQLVDSNGDLSAGSGGVGGKQRVNAGAAARSPARQPPDRASTMDSSGASSPDMEPSYGGGLFDMVKGGAGRLFSNLKDNLKDTLKDTSSRVIQSVTSYTKGDLDFTYVTSRIIVMSFPLDNVDIGFRNQVDDIRSFLDSRHLDHYTVYNLSPKSYRTAKFHSRVSECSWPIRQAPSLHNLFAVCRNMYNWLLQNPKNVCVVHCLDGRAASSILVGAMFIFCNLYSTPGPAIRLLYAKRPGIGLSPSHRRYLGYMCDLLADKPYRPHFKPLTIKSITVSPIPFFNKQRNGCRPYCDVLIGETKIYSTCTDFERMKEYRVQDGKIFIPLNITVQGDVVVSMYHLRSTIGSRLQAKVTNTQIFQLQFHTGFIPLDTTVLKFTKPELDACDVPEKYPQLFQVTLDVELQPHDKVIDLTPPWEHYCTKDVNPSILFSSHQEHQDTLALGGQAPIDIPPDNPRHYGQSGFFASLCWQDQKSEKSFCEEDHAALVNQESEQSDDELLTLSSPHGNANGDKPHGVKKPSKKQQEPAAPPPPEDVDLLGLEGSAMSNSFSPPAAPPTNSELLSDLFGGGGAAGPTQAGQSGVEDVFHPSGPASTQSTPRRSATSTSASPTLRVGEGATFDPFGAPSKPSGQDLLGSFLNTSSASSDPFLQPTRSPSPTVHASSTPAVNIQPDVSGGWDWHAKPGGFGMGSKSAATSPTGSSHGTPTHQSKPQTLDPFADLGTLGSSSFASKPTTPTGLGGGFPPLSSPQKASPQPMGGGWQQGGAYNWQQPQPKPQPSMPHSSPQNRPNYNVSFSAMPGGQNERGKGSSNLEGKQKAADFEDLLSGQGFNAHKDKKGPRTIAEMRKEEMAKEMDPEKLKILEWIEGKERNIRALLSTMHTVLWAGETKWKPVGMADLVTPEQVKKVYRKAVLVVHPDKATGQPYEQYAKMIFMELNDAWSEFENQGQKPLY

SEQ ID NO: 12355 - protein, 442 aa, Homo sapiens
MEPSYGGGLFDMVKGGAGRLFSNLKDNLKDTLKDTSSRVIQSVTSYTKGDLDFTYVTSRIIVMSFPLDNVDIGFRNQVDDIRSFLDSRHLDHYTVYNLSPKSYRTAKFHSRVSECSWPIRQAPSLHNLFAVCRNMYNWLLQNPKNVCVVHCLDGRAASSILVGAMFIFCNLYSTPGPAIRLLYAKRPGIGLSPSHRRYLGYMCDLLADKPYRPHFKPLTIKSITVSPIPFFNKQRNGCRPYCDVLIGETKIYSTCTDFERMKEYRVQDGKIFIPLNITVQGDVVVSMYHLRSTIGSRLQAKVTNTQIFQLQFHTGFIPLDTTVLKFTKPELDACDVPEKYPQLFQVTLDVELQPHDKVIDLTPPWEHYCTKDVNPSILFSSHQEHQDTLALGGQAPIDIPPDNPRHYGQSGFFASLCWQDQKSEKSFCEEDHAALVNQESEQ

SEQ ID NO: 12356 - protein, 900 aa, Homo sapiens
MEPSYGGGLFDMVKGGAGRLFSNLKDNLKDTLKDTSSRVIQSVTSYTKGDLDFTYVTSRIIVMSFPLDNVDIGFRNQVDDIRSFLDSRHLDHYTVYNLSPKSYRTAKFHSRVSECSWPIRQAPSLHNLFAVCRNMYNWLLQNPKNVCVVHCLDGRAASSILVGAMFIFCNLYSTPGPAIRLLYAKRPGIGLSPSHRRYLGYMCDLLADKPYRPHFKPLTIKSITVSPIPFFNKQRNGCRPYCDVLIGETKIYSTCTDFERMKEYRVQDGKIFIPLNITVQGDVVVSMYHLRSTIGSRLQAKVTNTQIFQLQFHTGFIPLDTTVLKFTKPELDACDVPEKYPQLFQVTLDVELQPHDKVIDLTPPWEHYCTKDVNPSILFSSHQEHQDTLALGGQAPIDIPPDNPRHYGQSGFFASLCWQDQKSEKSFCEEDHAALVNQESEQSDDELLTLSSPHGNANGDKPHGVKKPSKKQQEPAAPPPPEDVDLLGLEGSAMSNSFSPPAAPPTNSELLSDLFGGGGAAGPTQAGQSGVEDVFHPSGPASTQSTPRRSATSTSASPTLRVGEGATFDPFGAPSKPSGQDLLGSFLNTSSASSDPFLQPTRSPSPTVHASSTPAVNIQPDVSGGWDWHAKPGGFGMGSKSAATSPTGSSHGTPTHQSKPQTLDPFADLGTLGSSSFASKPTTPTGLGGGFPPLSSPQKASPQPMGGGWQQGGAYNWQQPQPKPQPSMPHSSPQNRPNYNVSFSAMPGGQNERGKGSSNLEGKQKAADFEDLLSGQGFNAHKDKKGPRTIAEMRKEEMAKEMDPEKLKILEWIEGKERNIRALLSTMHTVLWAGETKWKPVGMADLVTPEQVKKVYRKAVLVVHPDKATGQPYEQYAKMIFMELNDAWSEFENQGQKPLY

SEQ ID NO: 12357 - protein, 106 aa, Homo sapiens
MAVTALAARTWLGVWGVRTMQARGFGSDQSENVDRGAGSIREAGGAFGKREQAEEERYFRAQSREQLAALKKHHEEEIVHHKKEIERLQKEIERHKQKIKMLKHDD

SEQ ID NO: 12358 - protein, 71 aa, Homo sapiens
MAVTALAARTWLGVWGVRTMQARGFGSDQSENVDRGAGSIREAGGAFGKREQAEEERYFRHYRLCFEISLG

SEQ ID NO: 12359 - protein, 60 aa, Homo sapiens
MAVTALAARTWLGVWGVRTMQARGFGSDQSENVDRGAGSIREAGGAFGKREQAEEERYFR

SEQ ID NO: 12360 - protein, 201 aa, Homo sapiens
MALSWVLTVLSLLPLLEAQIPLCANLVPVPITNATLDRITGKWFYIASAFRNEEYNKSVQEIQATFFYFTPNKTEDTIFLREYQTRQNQCFYNSSYLNVQRENGTVSRYEGGREHVAHLLFLRDTKTLMFGSYLDDEKNWGLSFYADKPETTKEQLGEFYEALDCLCIPRSDVMYTDWKKDKCEPLEKQHEKERKQEEGES

SEQ ID NO: 12361 - protein, 163 aa, Homo sapiens
MKSSQTFEEQTECIVNTLLMDFLSPTLQVASRNLCCVDEVDSGEPCSFDVAIIAGRLRMLGDQFNGELEASAKNVIAETIKGQTGAILQDTVESLSKTWCAQDSSLAYERAFLAVSVKLLEYMAHIAPEVVGQVAIPMTGMINGNQAIREFIQGQGGWENLES

SEQ ID NO: 12362 - protein, 56 aa, Homo sapiens
MKSSQTFEEQTECIVNTLLMDFLSPTLQVASRNLCCVDEVDSGKSGELKSWSYSRD

SEQ ID NO: 12363 - protein, 405 aa, Homo sapiens
MLSSFLSPQNGTWADTFSLLLALAVALYLGYYWACVLQRPRLVAGPQFLAFLEPHCSITTETFYPTLWCFEGRLQSIFQVLLQSQPLVLYQSDILQTPDGGQLLLDWAKQPDSSQDPDPTTQPIVLLLPGITGSSQDTYVLHLVNQALRDGYQAVVFNNRGCRGEELRTHRAFCASNTEDLETVVNHIKHRYPQAPLLAVGISFGGILVLNHLAQARQAAGLVAALTLSACWDSFETTRSLETPLNSLLFNQPLTAGLCQLVERNRKVIEKVVDIDFVLQARTIRQFDERYTSVAFGYQDCVTYYKAASPRTKIDAIRIPVLYLSAADDPFSPVCALPIQAAQHSPYVALLITARGGHIGFLEGLLPWQHWYMSRLLHQYAKAIFQDPEGLPDLRALLPSEDRNS

SEQ ID NO: 12364 - protein, 305 aa, Homo sapiens
MLSSFLSPQNGTWADTFSLLLALAVALYLGYYWACVLQRPRLVAGPQFLAFLEPHCSITTETFYPTLWCFEGRLQSIFQVLLQSQPLVLYQSDILQTPDGGQLLLDWAKQPDSSQDPDPTTQPIVLLLPGITGSSQDTYVLHLVNQALRDGYQAVVFNNRGCRGEELRTHRAFCASNTEDLETVVNHIKHRYPQAPLLAVGISFGGILVLNHLAQARQAAGLVAALTLSACWDSFETTRSLETPLNSLLFNQPLTAGLCQLVERLSYGKTCRPVQSASLMSATHLWPLDIKTVLPTTKQQALEPR

SEQ ID NO: 12365 - protein, 402 aa, Homo sapiens
MSAEGAEPGPGSGSGPGPGPLCPEHGQALSWFCGSERRPVCAACAGLGGRCRGHRIRRAEERAEELRNKIVDQCERLQLQSAAITKYVADVLPGKNQRAVSMASAARELVIQRLSLVRSLCESEEQRLLEQVHGEEERAHQSILTQRVHWAEALQKLDTIRTGLVGMLTHLDDLQLIQKEQEIFERTEEAEGILDPQESEMLNFNEKCTRSPLLTQLWATAVLGSLSGTEDIRIDERTVSPFLQLSDDRKTLTFSTKKSKACADGPERFDHWPNALAATSFQNGLHAWMVNVQNSCAYKVGVASGHLPRKGSGSDCRLGHNAFSWVFSRYDQEFRFSHNGQHEPLGLLRGPAQLGVVLDLQVQELLFYEPASGTVLCAHHVSFPGPLFPVFAVADQTISIVR

SEQ ID NO: 12366 - protein, 193 aa, Homo sapiens
MSAEGAEPGPGSGSGPGPGPLCPEHGQALSWFCGSERRPVCAACAGLGGRCRGHRIRRAEERAEELRNKIVDQCERLQLQSAAITKYVADVLPGKNQRAVSMASAARELVIQRLSLVRSLCESEEQRLLEQVHGEEERAHQSILTQRVHWAEALQKLDTIRTGLVGMLTHLDDLQLIQKEQEIFERHRGHTDR

SEQ ID NO: 12367 - protein, 1059 aa, Homo sapiens
MCVRSCFQSPRLQWVWRTAFLKHTQRRHQGSHRWTHLGGSTYRAVIFDMGGVLIPSPGRVAAEWEVQNRIPSGTILKALMEGGENGPWMRFMRAEITAEGFLREFGRLCSEMLKTSVPVDSFFSLLTSERVAKQFPVMTEAITQIRAKGLQTAVLSNNFYLPNQKSFLPLDRKQFDVIVESCMEGICKPDPRIYKLCLEQLGLQPSESIFLDDLGTNLKEAARLGIHTIKVNDPETAVKELEALLGFTLRVGVPNTRPVKKTMEIPKDSLQKYLKDLLGIQTTGPLELLQFDHGQSNPTYYIRLANRDLVLRKKPPGTLLPSAHAIEREFRIMKALANAGVPVPNVLDLCEDSSVIGTPFYVMEYCPGLIYKDPSLPGLEPSHRRAIYTAMNTVLCKIHSVDLQAVGLEDYGKQGDYIPRQVRTWVKQYRASETSTIPAMERLIEWLPLHLPRQQRTTVVHGDFRLDNLVFHPEEPEVLAVLDWELSTLGDPLADVAYSCLAHYLPSSFPVLRGINDCDLTQLGIPAAEEYFRMYCLQMGLPPTENWNFYMAFSFFRVAAILQGVYKRSLTGQASSTYAEQTGKLTEFVSNLAWDFAVKEGFRVFKEMPFTNPLTRSYHTWARPQSQWCPTGSRSYSSVPEASPAHTSRGGLVISPESLSPPVRELYHRLKHFMEQRVYPAEPELQSHQASAARWSPSPLIEDLKEKAKAEGLWNLFLPLEADPEKKYGAGLTNVEYAHLCELMGTSLYAPEVCNCSAPDTGNMELLVRYGTEAQKARWLIPLLEGKARSCFAMTEPQVASSDATNIEASIREEDSFYVINGHKWWITGILDPRCQLCVFMGKTDPHAPRHRQQSVLLVPMDTPGIKIIRPLTVYGLEDAPGGHGEVRFEHVRVPKENMVLGPGRGFEIAQGRLGPGRIHHCMRLIGFSERALALMKARVKSRLAFGKPLVEQGTVLADIAQSRVEIEQARLLVLRAAHLMDLAGNKAAALDIAMIKMVAPSMASRVIDRAIQAFGAAGLSSDYPLAQFFTWARALRFADGPDEVHRATVAKLELKHRI

SEQ ID NO: 12368 - protein, 890 aa, Homo sapiens
MCVRSCFQSPRLQWVWRTAFLKHTQRRHQGSHRWTHLGGSTYRAVIFDMGGVLIPSPGRVAAEWEVQNRIPSGTILKALMEGGENGPWMRFMRAEITAEGFLREFGRLCSEMLKTSVPVDSFFSLLTSERVAKQFPVMTEAITQIRAKGLQTAVLSNNFYLPNQKSFLPLDRKQFDVIVESCMEGICKPDPRIYKLCLEQLGLQPSESIFLDDLGTNLKEAARLGIHTIKVNDPETAVKELEALLGFTLRVGVPNTRPVKKTMEIPKDSLQKYLKDLLGIQTTGPLELLQFDHGQSNPTYYIRLANRDLVLRKKPPGTLLPSAHAIEREFRIMKALANAGVPVPNVLDLCEDSSVIGTPFYVMEYCPGLIYKDPSLPGLEPSHRRAIYTAMNTVLCKIHSVDLQAVGLEDYGKQGDYIPRQVRTWVKQYRASETSTIPAMERLIEWLPLHLPRQQRTTVVHGDFRLDNLVFHPEEPEVLAVLDWELSTLGDPLADVAYSCLAHYLPSSFPVLRGINDCDLTQLGIPAAEEYFRMYCLQMGLPPTENWNFYMAFSFFRVAAILQGVYKRSLTGQASSTYAEQTGKLTEFVSNLAWDFAVKEGFRVFKEMPFTNPLTRSYHTWARPQSQWCPTGSRSYSSVPEASPAHTSRGGLVISPESLSPPVRELYHRLKHFMEQRVYPAEPELQSHQASAARWSPSPLIEDLKEKAKAEGLWNLFLPLEADPEKKYGAGLTNVEYAHLCELMGTSLYAPEVCNCSAPDTGNMELLVRYGTEAQKARWLIPLLEGKARSCFAMTEPQVASSDATNIEASIREEDSFYVINGHKWWITGILDPRCQLCVFMGKTDPHAPRHRQQSVLLVPMDTPGIKIIRPLTVYGLEDAPGCFLPSFSL

SEQ ID NO: 12369 - protein, 492 aa, Homo sapiens
MLEYLSLTFLISVKIQGDYIPRQVRTWVKQYRASETSTIPAMERLIEWLPLHLPRQQRTTVVHGDFRLDNLVFHPEEPEVLAVLDWELSTLGDPLADVAYSCLAHYLPSSFPVLRGINDCDLTQLGIPAAEEYFRMYCLQMGLPPTENWNFYMAFSFFRVAAILQGVYKRSLTGQASSTYAEQTGKLTEFVSNLAWDFAVKEGFRVFKEMPFTNPLTRSYHTWARPQSQWCPTGSRSYSSVPEASPAHTSRGGLVISPESLSPPVRELYHRLKHFMEQRVYPAEPELQSHQASAARWSPSPLIEDLKEKAKAEGLWNLFLPLEADPEKKYGAGLTNVEYAHLCELMGTSLYAPEVCNCSAPDTGNMELLVRYGTEAQKARWLIPLLEGKARSCFAMTEPQVASSDATNIEASIREEDSFYVINGHKWWITGILDPRCQLCVFMGKTDPHAPRHRQQSVLLVPMDTPGIKIIRPLTVYGLEDAPGCFLPSFSL

SEQ ID NO: 12370 - protein, 285 aa, Homo sapiens
MCVRSCFQSPRLQWVWRTAFLKHTQRRHQGSHRWTHLGGSTYRAVIFDMGGVLIPSPGRVAAEWEVQNRIPSGTILKALMEGGENGPWMRFMRAEITAEGFLREFGRLCSEMLKTSVPVDSFFSLLTSERVAKQFPVMTEAITQIRAKGLQTAVLSNNFYLPNQKSFLPLDRKQFDVIVESCMEGICKPDPRIYKLCLEQLGLQPSESIFLDDLGTNLKEAARLGIHTIKVNDPETAVKELEALLGFTLRVGVPNTRPVKKTMEIPKDSLQKYLKDLLGIQTTGL

SEQ ID NO: 12371 - protein, 1090 aa, Homo sapiens
MCVRSCFQSPRLQWVWRTAFLKHTQRRHQGSHRWTHLGGSTYRAVIFDMGGVLIPSPGRVAAEWEVQNRIPSGTILKALMEGGENGPWMRFMRAEITAEGFLREFGRLCSEMLKTSVPVDSFFSLLTSERVAKQFPVMTEAITQIRAKGLQTAVLSNNFYLPNQKSFLPLDRKQFDVIVESCMEGICKPDPRIYKLCLEQLGLQPSESIFLDDLGTNLKEAARLGIHTIKRQGFAVLPKLVSNSWAQAIYPPYPPKVVRLQVNDPETAVKELEALLGFTLRVGVPNTRPVKKTMEIPKDSLQKYLKDLLGIQTTGPLELLQFDHGQSNPTYYIRLANRDLVLRKKPPGTLLPSAHAIEREFRIMKALANAGVPVPNVLDLCEDSSVIGTPFYVMEYCPGLIYKDPSLPGLEPSHRRAIYTAMNTVLCKIHSVDLQAVGLEDYGKQGDYIPRQVRTWVKQYRASETSTIPAMERLIEWLPLHLPRQQRTTVVHGDFRLDNLVFHPEEPEVLAVLDWELSTLGDPLADVAYSCLAHYLPSSFPVLRGINDCDLTQLGIPAAEEYFRMYCLQMGLPPTENWNFYMAFSFFRVAAILQGVYKRSLTGQASSTYAEQTGKLTEFVSNLAWDFAVKEGFRVFKEMPFTNPLTRSYHTWARPQSQWCPTGSRSYSSVPEASPAHTSRGGLVISPESLSPPVRELYHRLKHFMEQRVYPAEPELQSHQASAARWSPSPLIEDLKEKAKAEGLWNLFLPLEADPEKKYGAGLTNVEYAHLCELMGTSLYAPEVCNCSAPDTGNMELLVRYGTEAQKARWLIPLLEGKARSCFAMTEPQVASSDATNIEASIREEDSFYVINGHKWWITGILDPRCQLCVFMGKTDPHAPRHRQQSVLLVPMDTPGIKIIRPLTVYGLEDAPGGHGEVRFEHVRVPKENMVLGPGRGFEIAQGRLGPGRIHHCMRLIGFSERALALMKARVKSRLAFGKPLVEQGTVLADIAQSRVEIEQARLLVLRAAHLMDLAGNKAAALDIAMIKMVAPSMASRVIDRAIQAFGAAGLSSDYPLAQFFTWARALRFADGPDEVHRATVAKLELKHRI

SEQ ID NO: 12372 - protein, 425 aa, Homo sapiens
MNAMLETPELPAVFDGVKLAAVAAVLYVIVRCLNLKSPTAPPDLYFQDSGLSRFLLKSCPLLTKEYIPPLIWGKSGHIQTALYGKMGRVRSPHPYGHRKFITMSDGATSTFDLFEPLAEHCVGDDITMVICPGIANHSEKQYIRTFVDYAQKNGYRCAVLNHLGALPNIELTSPRMFTYGCTWEFGAMVNYIKKTYPLTQLVVVGFSLGGNIVCKYLGETQANQEKVLCCVSVCQGYSALRAQETFMQWDQCRRFYNFLMADNMKKIILSHRQALFGDHVKKPQSLEDTDLSRLYTATSLMQIDDNVMRKFHGYNSLKEYYEEESCMRYLHRIYVPLMLVNAADDPLVHESLLTIPKSLSEKRENVMFVLPLHGGHLGFFEGSVLFPEPLTWMDKLVVEYANAICQWERNKLQCSDTEQVEADLE

SEQ ID NO: 12373 - protein, 1642 aa, Homo sapiens
MSTAIREVGVWRQTRTLLLKNYLIKCRTKKSSVQEILFPLFFLFWLILISMMHPNKKYEEVPNIELNPMDKFTLSNLILGYTPVTNITSSIMQKVSTDHLPDVIITEEYTNEKEMLTSSLSKPSNFVGVVFKDSMSYELRFFPDMIPVSSIYMDSRAGCSKSCEAAQYWSSGFTVLQASIDAAIIQLKTNVSLWKELESTKAVIMGETAVVEIDTFPRGVILIYLVIAFSPFGYFLAIHIVAEKEKKIKEFLKIMGLHDTAFWLSWVLLYTSLIFLMSLLMAVIATASLLFPQSSSIVIFLLFFLYGLSSVFFALMLTPLFKKSKHVGIVEFFVTVAFGFIGLMIILIESFPKSLVWLFSPFCHCTFVIGIAQVMHLEDFNEGASFSNLTAGPYPLIITIIMLTLNSIFYVLLAVYLDQVIPGEFGLRRSSLYFLKPSYWSKSKRNYEELSEGNVNGNISFSEIIEPVSSEFVGKEAIRISGIQKTYRKKGENVEALRNLSFDIYEGQITALLGHSGTGKSTLMNILCGLCPPSDGFASIYGHRVSEIDEMFEARKMIGICPQLDIHFDVLTVEENLSILASIKGIPANNIIQEVQKVLLDLDMQTIKDNQAKKLSGGQKRKLSLGIAVLGNPKILLLDEPTAGMDPCSRHIVWNLLKYRKANRVTVFSTHFMDEADILADRKAVISQGMLKCVGSSMFLKSKWGIGYRLSMYIDKYCATESLSSLVKQHIPGATLLQQNDQQLVYSLPFKDMDKFSGLFSALDSHSNLGVISYGVSMTTLEDVFLKLEVEAEIDQADYSVFTQQPLEEEMDSKSFDEMEQSLLILSETKAALVSTMSLWKQQMYTIAKFHFFTLKRESKSVRSVLLLLLIFFTVQIFMFLVHHSFKNAVVPIKLVPDLYFLKPGDKPHKYKTSLLLQNSADSDISDLISFFTSQNIMVTMINDSDYVSVAPHSAALNVMHSEKDYVFAAVFNSTMVYSLPILVNIISNYYLYHLNVTETIQIWSTPFFQEITDIVFKIELYFQAALLGIIVTAMPPYFAMENAENHKIKAYTQLKLSGLLPSAYWIGQAVVDIPLFFIILILMLGSLLAFHYGLYFYTVKFLAVVFCLIGYVPSVILFTYIASFTFKKILNTKEFWSFIYSVAALACIAITEITFFMGYTIATILHYAFCIIIPIYPLLGCLISFIKISWKNVRKNVDTYNPWDRLSVAVISPYLQCVLWIFLLQYYEKKYGGRSIRKDPFFRNLSTKSKNRKLPEPPDNEDEDEDVKAERLKVKELMGCQCCEEKPSIMVSNLHKEYDDKKDFLLSRKVKKVATKYISFCVKKGEILGLLGPNGAGKSTIINILVGDIEPTSGQVFLGDYSSETSEDDDSLKCMGYCPQINPLWPDTTLQEHFEIYGAVKGMSASDMKEVISRITHALDLKEHLQKTVKKLPAGIKRKLCFALSMLGNPQITLLDEPSTGMDPKAKQHMWRAIRTAFKNRKRAAILTTHYMEEAEAVCDRVAIMVSGQLRCIGTVQHLKSKFGKGYFLEIKLKDWIENLEVDRLQREIQYIFPNASRQESFSSILAYKIPKEDVQSLSQSFFKLEEAKHAFAIEEYSFSQATLEQVFVELTKEQEEEDNSCGTLNSTLWWERTQEDRVVF

SEQ ID NO: 12374 - protein, 925 aa, Homo sapiens
MSTAIREVGVWRQTRTLLLKNYLIKCRTKKSSVQEILFPLFFLFWLILISMMHPNKKYEEVPNIELNPMDKFTLSNLILGYTPVTNITSSIMQKVSTDHLPDVIITEEYTNEKEMLTSSLSKPSNFVGVVFKDSMSYELRFFPDMIPVSSIYMDSRAGCSKSCEAAQYWSSGFTVLQASIDAAIIQLKTNVSLWKELESTKAVIMGETAVVEIDTFPRGVILIYLVIAFSPFGYFLAIHIVAEKEKKIKEFLKIMGLHDTAFWLSWVLLYTSLIFLMSLLMAVIATASLLFPQSSSIVIFLLFFLYGLSSVFFALMLTPLFKKSKHVGIVEFFVTVAFGFIGLMIILIESFPKSLVWLFSPFCHCTFVIGIAQVMHLEDFNEGASFSNLTAGPYPLIITIIMLTLNSIFYVLLAVYLDQVIPGEFGLRRSSLYFLKPSYWSKSKRNYEELSEGNVNGNISFSEIIEPVSSEFVGKEAIRISGIQKTYRKKGENVEALRNLSFDIYEGQITALLGHSGTGKSTLMNILCGLCPPSDGFASIYGHRVSEIDEMFEARKMIGICPQLDIHFDVLTVEENLSILASIKGIPANNIIQEVQKVLLDLDMQTIKDNQAKKLSGGQKRKLSLGIAVLGNPKILLLDEPTAGMDPCSRHIVWNLLKYRKANRVTVFSTHFMDEADILADRKAVISQGMLKCVGSSMFLKSKWGIGYRLSMYIDKYCATESLSSLVKQHIPGATLLQQNDQQLVYSLPFKDMDKFSGLFSALDSHSNLGVISYGVSMTTLEDVFLKLEVEAEIDQADYSVFTQQPLEEEMDSKSFDEMEQSLLILSETKAALVSTMSLWKQQMYTIAKFHFFTLKRESKSVRSVLLLLLIFFTVQIFMFLVHHSFKNAVVPIKLVPDLYFLKPGDKPHKYKTSLLLQNSAGESV

SEQ ID NO: 12375 - protein, 865 aa, Homo sapiens
MTTLEDVFLKLEVEAEIDQADYSVFTQQPLEEEMDSKSFDEMEQSLLILSETKAALVSTMSLWKQQMYTIAKFHFFTLKRESKSVRSVLLLLLIFFTVQIFMFLVHHSFKNAVVPIKLVPDLYFLKPGDKPHKYKTSLLLQNSADSDISDLISFFTSQNIMVTMINDSDYVSVAPHSAALNVMHSEKDYVFAAVFNSTMVYSLPILVNIISNYYLYHLNVTETIQIWSTPFFQEITDIVFKIELYFQAALLGIIVTAMPPYFAMENAENHKIKAYTQLKLSGLLPSAYWIGQAVVDIPLFFIILILMLGSLLAFHYGLYFYTVKFLAVVFCLIGYVPSVILFTYIASFTFKKILNTKEFWSFIYSVAALACIAITEITFFMGYTIATILHYAFCIIIPIYPLLGCLISFIKISWKNVRKNVDTYNPWDRLSVAVISPYLQCVLWIFLLQYYEKKYGGRSIRKDPFFRNLSTKSKNRKLPEPPDNEDEDEDVKAERLKVKELMGCQCCEEKPSIMVSNLHKEYDDKKDFLLSRKVKKVATKYISFCVKKGEILGLLGPNGAGKSTIINILVGDIEPTSGQVFLGDYSSETSEDDDSLKCMGYCPQINPLWPDTTLQEHFEIYGAVKGMSASDMKEVISRITHALDLKEHLQKTVKKLPAGIKRKLCFALSMLGNPQITLLDEPSTGMDPKAKQHMWRAIRTAFKNRKRAAILTTHYMEEAEAVCDRVAIMVSGQLRCIGTVQHLKSKFGKGYFLEIKLKDWIENLEVDRLQREIQYIFPNASRQESFSSILAYKIPKEDVQSLSQSFFKLEEAKHAFAIEEYSFSQATLEQVFVELTKEQEEEDNSCGTLNSTLWWERTQEDRVVF

SEQ ID NO: 12376 - protein, 317 aa, Homo sapiens
MVVSGAPPALGGGCLGTFTSLLLLASTAILNAARIPVPPACGKPQQLNRVVGGEDSTDSEWPWIVSIQKNGTHHCAGSLLTSRWVITAAHCFKDNLNKPYLFSVLLGAWQLGNPGSRSQKVGVAWVEPHPVYSWKEGACADIALVRLERSIQFSERVLPICLPDASIHLPPNTHCWISGWGSIQDGVPLPHPQTLQKLKVPIIDSEVCSHLYWRGAGQGPITEDMLCAGYLEGERDACLGDSGGPLMCQVDGAWLLAGIISWGEGCAERNRPGVYISLSAHRSWVEKIVQGVQLRGRAQGGGALRAPSQGSGAAARS

SEQ ID NO: 12377 - protein, 1621 aa, Homo sapiens
MRKRKISVCQQTWALLCKNFLKKWRMKRESLMEWLNSLLLLLCLYIYPHSHQVNDFSSLLTMDLGRVDTFNESRFSVVYTPVTNTTQQIMNKVASTPFLAGKEVLGLPDEESIKEFTANYPEEIVRVTFTNTYSYHLKFLLGHGMPAKKEHKDHTAHCYETNEDVYCEVSVFWKEGFVALQAAINAAIIEITTNHSVMEELMSVTGKNMKMHSFIGQSGVITDLYLFSCIISFSSFIYYASVNVTRERKRMKALMTMMGLRDSAFWLSWGLLYAGFIFIMALFLALVIRSTQFIILSGFMVVFSLFLLYGLSLVALAFLMSILVKKSFLTGLVVFLLTVFWGCLGFTSLYRHLPASLEWILSLLSPFAFMLGMAQLLHLDYDLNSNAFPHPSDGSNLIVATNFMLAFDTCLYLALAIYFEKILPNEYGHRRPPLFFLKSSFWSQTQKTDHVALEDEMDADPSFHDSFEQAPPEFQGKEAIRIRNVTKEYKGKPDKIEALKDLVFDIYEGQITAILGHSGAGKSTLLNILSGLSVPTKGSVTIYNNKLSEMADLENLSKLTGVCPQSNVQFDFLTVRENLRLFAKIKGILPQEVDKEIQRVLLELEMKNIQDVLAQNLSGGQKRKLTFGIAILGDPQIFLLDEPTAGLDPFSRHQVWNLLKERKTDRVILFSTQFMDEADILADRKVFLSQGKLKCAGSSLFLKKKWGIGYHLSLQLNEICVEENITSLVKQHIPDAKLSAKSEGKLIYTLPLERTNKFPELYKDLDSYPDLGIENYGVSMTTLNEVFLKLEGKSTINESDIAILGEVQAEKADDTERLVEMEQVLSSLNKMRKTIGGVALWRQQICAIARVRLLKLKHERKALLALLLILMAGFCPLLVEYTMVKIYQNSYTWELSPHLYFLAPGQQPHDPLTQLLIINKTGASIDDFIQSVEHQNIALEVDAFGTRNGTDDPSYNGAITVCCNEKNYSFSLACNAKRLNCFPVLMDIVSNGLLGMVKPSVHIRTERSTFLENGQDNPIGFLAYIMFWLVLTSSCPPYIAMSSIDDYKNRARSQLRISGLSPSAYWFGQALVDVSLYFLVFVFIYLMSYISNFEDMLLTIIHIIQIPCAVGYSFSLIFMTYVISFIFRKGRKNSGIWSFCFYVVTVFSVAGFAFSIFESDIPFIFTFLIPPATMIGCLFLSSHLLFSSLFSEERMDVQPFLVFLIPFLHFIIFLFTLRCLEWKFGKKSMRKDPFFRISPRSSDVCQNPEEPEGEDEDVQMERVRTANALNSTNFDEKPVIIASCLRKEYAGKRKGCFSKRKNKIATRNVSFCVRKGEVLGLLGHNGAGKSTSIKVITGDTKPTAGQVLLKGSGGGDALEFLGYCPQENALWPNLTVRQHLEVYAAVKGLRKGDAEVAITRLVDALKLQDQLKSPVKTLSEGIKRKLCFVLSILGNPSVVLLDEPSTGMDPEGQQQMWQAIRATFRNTERGALLTTHYMAEAEAVCDRVAIMVSGRLRCIGSIQHLKSKFGKDYLLEMKVKNLAQVEPLHAEILRLFPQAARQERYSSLMVYKLPVEDVQPLAQAFFKLEKVKQSFDLEEYSLSQSTLEQVFLELSKEQELGDFEEDFDPSVKWKLLPQEEP

SEQ ID NO: 12378 - protein, 1581 aa, Homo sapiens
MRKRKISVCQQTWALLCKNFLKKWRMKRESLMEWLNSLLLLLCLYIYPHSHQVNDFSSLLTMDLGRVDTFNESRFSVVYTPVTNTTQQIMNKVASTPFLAGKEVLGLPDEESIKEFTANYPEEIVRVTFTNTYSYHLKFLLGHGMPAKKEHKDHTAHCYETNEDVYCEVSVFWKEGFVALQAAINAAIIEITTNHSVMEELMSVTGKNMKMHSFIGQSGVITDLYLFSCIISFSSFIYYASVNVTRERKRMKALMTMMGLRDSAFWLSWGLLYAGFIFIMALFLALVIRSTQFIILSGFMVVFSLFLLYGLSLVALAFLMSILVKKSFLTGLVVFLLTVFWGCLGFTSLYRHLPASLEWILSLLSPFAFMLGMAQLLHLDYDLNSNAFPHPSDGSNLIVATNFMLAFDTCLYLALAIYFEKILPNEYGHRRPPLFFLKSSFWSQTQKTDHVALEDEMDADPSFHDSFEQAPPEFQGKEAIRIRNVTKEYKGKPDKIEALKDLVFDIYEGQITAILGHSGAGKSTLLNILSGLSVPTKGSVTIYNNKLSEMADLENLSKLTGVCPQSNVQFDFLTVRENLRLFAKIKGILPQEVDKEIFLLDEPTAGLDPFSRHQVWNLLKERKTDRVILFSTQFMDEADILADRKVFLSQGKLKCAGSSLFLKKKWGIGYHLSLQLNEICVEENITSLVKQHIPDAKLSAKSEGKLIYTLPLERTNKFPELYKDLDSYPDLGIENYGVSMTTLNEVFLKLEGKSTINESDIAILGEVQAEKADDTERLVEMEQVLSSLNKMRKTIGGVALWRQQICAIARVRLLKLKHERKALLALLLILMAGFCPLLVEYTMVKIYQNSYTWELSPHLYFLAPGQQPHDPLTQLLIINKTGASIDDFIQSVEHQNIALEVDAFGTRNGTDDPSYNGAITVCCNEKNYSFSLACNAKRLNCFPVLMDIVSNGLLGMVKPSVHIRTERSTFLENGQDNPIGFLAYIMFWLVLTSSCPPYIAMSSIDDYKNRARSQLRISGLSPSAYWFGQALVDVSLYFLVFVFIYLMSYISNFEDMLLTIIHIIQIPCAVGYSFSLIFMTYVISFIFRKGRKNSGIWSFCFYVVTVFSVAGFAFSIFESDIPFIFTFLIPPATMIGCLFLSSHLLFSSLFSEERMDVQPFLVFLIPFLHFIIFLFTLRCLEWKFGKKSMRKDPFFRISPRSSDVCQNPEEPEGEDEDVQMERVRTANALNSTNFDEKPVIIASCLRKEYAGKRKGCFSKRKNKIATRNVSFCVRKGEVLGLLGHNGAGKSTSIKVITGDTKPTAGQVLLKGSGGGDALEFLGYCPQENALWPNLTVRQHLEVYAAVKGLRKGDAEVAITRLVDALKLQDQLKSPVKTLSEGIKRKLCFVLSILGNPSVVLLDEPSTGMDPEGQQQMWQAIRATFRNTERGALLTTHYMAEAEAVCDRVAIMVSGRLRCIGSIQHLKSKFGKDYLLEMKVKNLAQVEPLHAEILRLFPQAARQERYSSLMVYKLPVEDVQPLAQAFFKLEKVKQSFDLEEYSLSQSTLEQVFLELSKEQELGDFEEDFDPSVKWKLLPQEEP

SEQ ID NO: 12379 - protein, 266 aa, Homo sapiens
MRKRKISVCQQTWALLCKNFLKKWRMKRESLMEWLNSLLLLLCLYIYPHSHQVNDFSSLLTMDLGRVDTFNESRFSVVYTPVTNTTQQIMNKVASTPFLAGKEVLGLPDEESIKEFTANYPEEIVRVTFTNTYSYHLKFLLGHGMPAKKEHKDHTAHCYETNEDVYCEVSVFWKEGFVALQAAINAAIIEITTNHSVMEELMSVTGKNMKMHSFIGQSGVITDLYLFSCIISFSSFIYYASVNVTRERKRMKALMTMMGLRDSAFW

SEQ ID NO: 12380 - protein, 1543 aa, Homo sapiens
MNKMALASFMKGRTVIGTPDEETMDIELPKKYHEMVGVIFSDTFSYRLKFNWGYRIPVIKEHSEYTEHCWAMHGEIFCYLAKYWLKGFVAFQAAINAAIIEVTTNHSVMEELTSVIGINMKIPPFISKGEIMNEWFHFTCLVSFSSFIYFASLNVARERGKFKKLMTVMGLRESAFWLSWGLTYICFIFIMSIFMALVITSIPIVFHTGFMVIFTLYSLYGLSLIALAFLMSVLIRKPMLAGLAGFLFTVFWGCLGFTVLYRQLPLSLGWVLSLLSPFAFTAGMAQITHLDNYLSGVIFPDPSGDSYKMIATFFILAFDTLFYLIFTLYFERVLPDKDGHGDSPLFFLKSSFWSKHQNTHHEIFENEINPEHSSDDSFEPVSPEFHGKEAIRIRNVIKEYNGKTGKVEALQGIFFDIYEGQITAILGHNGAGKSTLLNILSGLSVSTEGSATIYNTQLSEITDMEEIRKNIGFCPQFNFQFDFLTVRENLRVFAKIKGIQPKEVEQEVKRIIMELDMQSIQDIIAKKLSGGQKRKLTLGIAILGDPQVLLLDEPTAGLDPFSRHRVWSLLKEHKVDRLILFSTQFMDEADILADRKVFLSNGKLKCAGSSLFLKRKWGIGYHLSLHRNEMCDTEKITSLIKQHIPDAKLTTESEEKLVYSLPLEKTNKFPDLYSDLDKCSDQGIRNYAVSVTSLNEVFLNLEGKSAIDEPDFDIGKQEKIHVTRNTGDESEMEQVLCSLPETRKAVSSAALWRRQIYAVATLRFLKLRRERRALLCLLLVLGIAFIPIILEKIMYKVTRETHCWEFSPSMYFLSLEQIPKTPLTSLLIVNNTGSNIEDLVHSLKCQDIVLEIDDFRNRNGSDDPSYNGAIIVSGDQKDYRFSVACNTKKLNCFPVLMGIVSNALMGIFNFTELIQMESTSFSRDDIVLDLGFIDGSIFLLLITNCVSPFIGMSSISDYKKNVQSQLWISGLWPSAYWCGQALVDIPLYFLILFSIHLIYYFIFLGFQLSWELMFVLVVCIIGCAVSLIFLTYVLSFIFRKWRKNNGFWSFGFFIILICVSTIMVSTQYEKLNLILCMIFIPSFTLLGYVMLLIQLDFMRNLDSLDNRINEVNKTILLTTLIPYLQSVIFLFVIRCLEMKYGNEIMNKDPVFRISPRSRETHPNPEEPEEEDEDVQAERVQAANALTAPNLEEEPVITASCLHKEYYETKKSCFSTRKKKIAIRNVSFCVKKGEVLGLLGHNGAGKSTSIKMITGCTKPTAGVVVLQGSRASVRQQHDNSLKFLGYCPQENSLWPKLTMKEHLELYAAVKGLGKEDAALSISRLVEALKLQEQLKAPVKTLSEGIKRKLCFVLSILGNPSVVLLDEPFTGMDPEGQQQMWQILQATVKNKERGTLLTTHYMSEAEAVCDRMAMMVSGTLRCIGSIQHLKNKFGRDYLLEIKMKEPTQVEALHTEILKLFPQAAWQERYSSLMAYKLPVEDVHPLSRAFFKLEAMKQTFNLEEYSLSQATLEQVFLELCKEQELGNVDDKIDTTVEWKLLPQEDP

SEQ ID NO: 12381 - protein, 1520 aa, Homo sapiens
MDIELPKKYHEMVGVIFSDTFSYRLKFNWGYRIPVIKEHSEYTEHCWAMHGEIFCYLAKYWLKGFVAFQAAINAAIIEVTTNHSVMEELTSVIGINMKIPPFISKGEIMNEWFHFTCLVSFSSFIYFASLNVARERGKFKKLMTVMGLRESAFWLSWGLTYICFIFIMSIFMALVITSIPIVFHTGFMVIFTLYSLYGLSLIALAFLMSVLIRKPMLAGLAGFLFTVFWGCLGFTVLYRQLPLSLGWVLSLLSPFAFTAGMAQITHLDNYLSGVIFPDPSGDSYKMIATFFILAFDTLFYLIFTLYFERVLPDKDGHGDSPLFFLKSSFWSKHQNTHHEIFENEINPEHSSDDSFEPVSPEFHGKEAIRIRNVIKEYNGKTGKVEALQGIFFDIYEGQITAILGHNGAGKSTLLNILSGLSVSTEGSATIYNTQLSEITDMEEIRKNIGFCPQFNFQFDFLTVRENLRVFAKIKGIQPKEVEQEVKRIIMELDMQSIQDIIAKKLSGGQKRKLTLGIAILGDPQVLLLDEPTAGLDPFSRHRVWSLLKEHKVDRLILFSTQFMDEADILADRKVFLSNGKLKCAGSSLFLKRKWGIGYHLSLHRNEMCDTEKITSLIKQHIPDAKLTTESEEKLVYSLPLEKTNKFPDLYSDLDKCSDQGIRNYAVSVTSLNEVFLNLEGKSAIDEPDFDIGKQEKIHVTRNTGDESEMEQVLCSLPETRKAVSSAALWRRQIYAVATLRFLKLRRERRALLCLLLVLGIAFIPIILEKIMYKVTRETHCWEFSPSMYFLSLEQIPKTPLTSLLIVNNTGSNIEDLVHSLKCQDIVLEIDDFRNRNGSDDPSYNGAIIVSGDQKDYRFSVACNTKKLNCFPVLMGIVSNALMGIFNFTELIQMESTSFSRDDIVLDLGFIDGSIFLLLITNCVSPFIGMSSISDYKKNVQSQLWISGLWPSAYWCGQALVDIPLYFLILFSIHLIYYFIFLGFQLSWELMFVLVVCIIGCAVSLIFLTYVLSFIFRKWRKNNGFWSFGFFIILICVSTIMVSTQYEKLNLILCMIFIPSFTLLGYVMLLIQLDFMRNLDSLDNRINEVNKTILLTTLIPYLQSVIFLFVIRCLEMKYGNEIMNKDPVFRISPRSRETHPNPEEPEEEDEDVQAERVQAANALTAPNLEEEPVITASCLHKEYYETKKSCFSTRKKKIAIRNVSFCVKKGEVLGLLGHNGAGKSTSIKMITGCTKPTAGVVVLQGSRASVRQQHDNSLKFLGYCPQENSLWPKLTMKEHLELYAAVKGLGKEDAALSISRLVEALKLQEQLKAPVKTLSEGIKRKLCFVLSILGNPSVVLLDEPFTGMDPEGQQQMWQILQATVKNKERGTLLTTHYMSEAEAVCDRMAMMVSGTLRCIGSIQHLKNKFGRDYLLEIKMKEPTQVEALHTEILKLFPQAAWQERYSSLMAYKLPVEDVHPLSRAFFKLEAMKQTFNLEEYSLSQATLEQVFLELCKEQELGNVDDKIDTTVEWKLLPQEDP

SEQ ID NO: 12382 - protein, 92 aa, Homo sapiens
MNKMALASFMKGRTVIGTPDEETMDIELPKKYHEMVGVIFSDTFSYRLKFNWGYRIPVIKEHSEYTGHNKSFCNGGVDISYWNKYEDTTFHF

SEQ ID NO: 12383 - protein, 466 aa, Homo sapiens
MNKMALASFMKGRTVIGTPDEETMDIELPKKYHEMVGVIFSDTFSYRLKFNWGYRIPVIKEHSEYTEHCWAMHGEIFCYLAKYWLKGFVAFQAAINAAIIEVTTNHSVMEELTSVIGINMKIPPFISKGEIMNEWFHFTCLVSFSSFIYFASLNVARERGKFKKLMTVMGLRESAFWLSWGLTYICFIFIMSIFMALVITSIPIVFHTGFMVIFTLYSLYGLSLIALAFLMSVLIRKPMLAGLAGFLFTVFWGCLGFTVLYRQLPLSLGWVLSLLSPFAFTAGMAQITHLDNYLSGVIFPDPSGDSYKMIATFFILAFDTLFYLIFTLYFERVLPDKDGHGDSPLFFLKSSFWSKHQNTHHEIFENEINPEHSSDDSFEPVSPEFHGKEAIRIRNVIKEYNGKTGKVEALQGIFFDIYEGQITAILGHNGAGKSTLLNILSGLSVSTEGKKNYNGIRHAKHSRHYC

SEQ ID NO: 12384 - protein, 452 aa, Homo sapiens
MNKMALASFMKGRTVIGTPDEETMDIELPKKYHEMVGVIFSDTFSYRLKFNWGYRIPVIKEHSEYTEHCWAMHGEIFCYLAKYWLKGFVAFQAAINAAIIEVTTNHSVMEELTSVIGINMKIPPFISKGEIMNEWFHFTCLVSFSSFIYFASLNVARERGKFKKLMTVMGLRESAFWLSWGLTYICFIFIMSIFMALVITSIPIVFHTGFMVIFTLYSLYGLSLIALAFLMSVLIRKPMLAGLAGFLFTVFWGCLGFTVLYRQLPLSLGWVLSLLSPFAFTAGMAQITHLDNYLSGVIFPDPSGDSYKMIATFFILAFDTLFYLIFTLYFERVLPDKDGHGDSPLFFLKSSFWSKHQNTHHEIFENEINPEHSSDDSFEPVSPEFHGKEAIRIRNVIKEYNGKTGKVEALQGSEERLCPAAHRLRCGERLCPAAHHLGCEERPCPAATPSGN

SEQ ID NO: 12385 - protein, 1114 aa, Homo sapiens
MLRGTMTAWRGMRPEVTLACLLLATAGCFADLNEVPQVTVQPASTVQKPGGTVILGCVVEPPRMNVTWRLNGKELNGSDDALGVLITHGTLVITALNNHTVGRYQCVARMPAGAVASVPATVTLANLQDFKLDVQHVIEVDEGNTAVIACHLPESHPKAQVRYSVKQEWLEASRGNYLIMPSGNLQIVNASQEDEGMYKCAAYNPVTQEVKTSGSSDRLRVRRSTAEAARIIYPPEAQTIIVTKGQSLILECVASGIPPPRVTWAKDGSSVTGYNKTRFLLSNLLIDTTSEEDSGTYRCMADNGVGQPGAAVILYNVQVFEPPEVTMELSQLVIPWGQSAKLTCEVRGNPPPSVLWLRNAVPLISSQRLRLSRRALRVLSMGPEDEGVYQCMAENEVGSAHAVVQLRTSRPSITPRLWQDAELATGTPPVSPSKLGNPEQMLRGQPALPRPPTSVGPASPQCPGEKGQGAPAEAPIILSSPRTSKTDSYELVWRPRHEGSGRAPILYYVVKHRKVTNSSDDWTISGIPANQHRLTLTRLDPGSLYEVEMAAYNCAGEGQTAMVTFRTGRRPKPEIMASKEQQIQRDDPGASPQSSSQPDHGRLSPPEAPDRPTISTASETSVYVTWIPRGNGGFPIQSFRVEYKKLKKVGDWILATSAIPPSRLSVEITGLEKGTSYKFRVRALNMLGESEPSAPSRPYVVSGYSGRVYERPVAGPYITFTDAVNETTIMLKWMYIPASNNNTPIHGFYIYYRPTDSDNDSDYKKDMVEGDKYWHSISHLQPETSYDIKMQCFNEGGESEFSNVMICETKARKSSGQPGRLPPPTLAPPQPPLPETIERPVGTGAMVARSSDLPYLIVGVVLGSIVLIIVTFIPFCLWRAWSKQKHTTDLGFPRSALPPSCPYTMVPLGGLPGHQASGQPYLSGISGRACANGIHMNRGCPSAAVGYPGMKPQQHCPGELQQQSDTSSLLRQTHLGNGYDPQSHQITRGPKSSPDEGSFLYTLPDDSTHQLLQPHHDCCQRQEQPAAVGQSGVRRAPDSPVLEAVWDPPFHSGPPCCLGLVPVEEVDSPDSCQVSGGDWCPQHPVGAYVGQEPGMQLSPGPLVRVSFETPPLTI

SEQ ID NO: 12386 - protein, 931 aa, Homo sapiens
KTRNGCLIPSPCSLGLPPGHALQDILVHTPSVLALLAPPGSTAEAARIIYPPEAQTIIVTKGQSLILECVASGIPPPRVTWAKDGSSVTGYNKTRFLLSNLLIDTTSEEDSGTYRCMADNGVGQPGAAVILYNVQVFEPPEVTMELSQLVIPWGQSAKLTCEVRGNPPPSVLWLRNAVPLISSQRLRLSRRALRVLSMGPEDEGVYQCMAENEVGSAHAVVQLRTSRPSITPRLWQDAELATGTPPVSPSKLGNPEQMLRGQPALPRPPTSVGPASPQCPGEKGQGAPAEAPIILSSPRTSKTDSYELVWRPRHEGSGRAPILYYVVKHRKVTNSSDDWTISGIPANQHRLTLTRLDPGSLYEVEMAAYNCAGEGQTAMVTFRTGRRPKPEIMASKEQQIQRDDPGASPQSSSQPDHGRLSPPEAPDRPTISTASETSVYVTWIPRGNGGFPIQSFRVEYKKLKKVGDWILATSAIPPSRLSVEITGLEKGTSYKFRVRALNMLGESEPSAPSRPYVVSGYSGRVYERPVAGPYITFTDAVNETTIMLKWMYIPASNNNTPIHGFYIYYRPTDSDNDSDYKKDMVEGDKYWHSISHLQPETSYDIKMQCFNEGGESEFSNVMICETKARKSSGQPGRLPPPTLAPPQPPLPETIERPVGTGAMVARSSDLPYLIVGVVLGSIVLIIVTFIPFCLWRAWSKQKHTTDLGFPRSALPPSCPYTMVPLGGLPGHQASGQPYLSGISGRACANGIHMNRGCPSAAVGYPGMKPQQHCPGELQQQSDTSSLLRQTHLGNGYDPQSHQITRGPKSSPDEGSFLYTLPDDSTHQLLQPHHDCCQRQEQPAAVGQSGVRRAPDSPVLEAVWDPPFHSGPPCCLGLVPVEEVDSPDSCQVSGGDWCPQHPVGAYVGQEPGMQLSPGPLVRVSFETPPLTI

SEQ ID NO: 12387 - protein, 1115 aa, Homo sapiens
MLRGTMTAWRGMRPEVTLACLLLATAGCFADLNEVPQVTVQPASTVQKPGGTVILGCVVEPPRMNVTWRLNGKELNGSDDALGVLITHGTLVITALNNHTVGRYQCVARMPAGAVASVPATVTLANLQDFKLDVQHVIEVDEGNTAVIACHLPESHPKAQVRYSVKQEWLEASRGNYLIMPSGNLQIVNASQEDEGMYKCAAYNPVTQEVKTSGSSDRLRVRRSTAEAARIIYPPEAQTIIVTKGQSLILECVASGIPPPRVTWAKDGSSVTGYNKTRFLLSNLLIDTTSEEDSGTYRCMADNGVGQPGAAVILYNVQVFEPPEVTMELSQLVIPWGQSAKLTCEVRGNPPPSVLWLRNAVPLISSQRLRLSRRALRVLSMGPEDEGVYQCMAENEVGSAHAVVQLRTSRPSITPRLWQDAELATGTPPVSPSKLGNPEQMLRGQPALPRPPTSVGPASPQCPGEKGQGAPAEAPIILSSPRTSKTDSYELVWRPRHEGSGRAPILYYVVKHRKQVTNSSDDWTISGIPANQHRLTLTRLDPGSLYEVEMAAYNCAGEGQTAMVTFRTGRRPKPEIMASKEQQIQRDDPGASPQSSSQPDHGRLSPPEAPDRPTISTASETSVYVTWIPRGNGGFPIQSFRVEYKKLKKVGDWILATSAIPPSRLSVEITGLEKGTSYKFRVRALNMLGESEPSAPSRPYVVSGYSGRVYERPVAGPYITFTDAVNETTIMLKWMYIPASNNNTPIHGFYIYYRPTDSDNDSDYKKDMVEGDKYWHSISHLQPETSYDIKMQCFNEGGESEFSNVMICETKARKSSGQPGRLPPPTLAPPQPPLPETIERPVGTGAMVARSSDLPYLIVGVVLGSIVLIIVTFIPFCLWRAWSKQKHTTDLGFPRSALPPSCPYTMVPLGGLPGHQASGQPYLSGISGRACANGIHMNRGCPSAAVGYPGMKPQQHCPGELQQQSDTSSLLRQTHLGNGYDPQSHQITRGPKSSPDEGSFLYTLPDDSTHQLLQPHHDCCQRQEQPAAVGQSGVRRAPDSPVLEAVWDPPFHSGPPCCLGLVPVEEVDSPDSCQVSGGDWCPQHPVGAYVGQEPGMQLSPGPLVRVSFETPPLTI

SEQ ID NO: 12388 - protein, 373 aa, Homo sapiens
MTGWSCLVTGAGGFLGQRIIRLLVKEKELKEIRVLDKAFGPELREEFSKLQNKTKLTVLEGDILDEPFLKRACQDVSVIIHTACIIDVFGVTHRESIMNVNVKGTQLLLEACVQASVPVFIYTSSIEVAGPNSYKEIIQNGHEEEPLENTWPAPYPHSKKLAEKAVLAANGWNLKNGGTLYTCALRPMYIYGEGSRFLSASINEALNNNGILSSVGKFSTVNPVYVGNVAWAHILALRALQDPKKAPSIRGQFYYISDDTPHQSYDNLNYTLSKEFGLRLDSRWSFPLSLMYWIGFLLEIVSFLLRPIYTYRPPFNRHIVTLSNSVFTFSYKKAQRDLAYKPLYSWEEAKQKTVEWVGSLVDRHKETLKSKTQ

SEQ ID NO: 12389 - protein, 975 aa, Homo sapiens
MAAEEVLQTVDHYKTEIERLTKELTETTHEKIQAAEYGLVVLEEKLTLKQQYDELEAEYDSLKQELEQLKEAFGQSFSIHRKVAEDGETREETLLQESASKEAYYLGKILEMQNELKQSRAVVTNVQAENERLTAVVQDLKENNEMVELQRIRMKDEIREYKFREARLLQDYTELEEENITLQKLVSTLKQNQVEYEGLKHEIKRFEEETVLLNSQLEDAIRLKEIAEHQLEEALETLKNEREQKNNLRKELSQYISLNDNHISISVDGLKFAEDGSEPNNDDKMNGHIHGPLVKLNGDYRTPTLRKGESLNPVSDLFSELNISEIQKLKQQLMQVEREKAILLANLQESQTQLEHTKGALTEQHERVHRLTEHVNAMRGLQSSKELKAELDGEKGRDSGEEAHDYEVDINGLEILECKYRVAVTEVIDLKAEIKALKEKYNKSVENYTDEKAKYESKIQMYDEQVTSLEKTTKESGEKMAHMEKELQKMTSIANENHSTLNTAQDELVTFSEELAQLYHHVCLCNNETPNRVMLDYYRQSRVTRSGSLKGPDDPRGLLSPRLARRGVSSPVETRTSSEPVAKESTEASKEPSPTKTPTISPVITAPPSSPVLDTSDIRKEPMNIYNLNAIIRDQIKHLQKAVDRSLQLSRQRAAARELAPMIDKDKEALMEEILKLKSLLSTKREQIATLRAVLKANKQTAEVALANLKNKYENEKAMVTETMTKLRNELKALKEDAATFSSLRAMFATRCDEYVTQLDEMQRQLAAAEDEKKTLNTLLRMAIQQKLALTQRLEDLEFDHEQSRRSKGKLGKSKIGSPKVSGEASVTVPTIDTYLLHSQGPQTPNIRVSSGTQRKRQFSPSLCDQSRPRTSGASYLQNLLRVPPDPTSTESFLLKGPPSMSEFIQGHRLSKEKRLTVAPPDCQQPAASVPPQCSQLAGRQDCPTVSPDTALPEEQPHSSSQCAPLHCLSKPPHP

SEQ ID NO: 12390 - protein, 93 aa, Homo sapiens
MAAEEVLQTVDHYKTEIERLTKELTETTHEKIQAAEYGLVVLEEKLTLKQQYDELEAEYDSLKQELEQLKEVSCLSPLPFLALTPPTRKAHSS

SEQ ID NO: 12391 - protein, 873 aa, Homo sapiens
MAAEEVLQTVDHYKTEIERLTKELTETTHEKIQAAEYGLVVLEEKLTLKQQYDELEAEYDSLKQELEQLKEAFGQSFSIHRKVAEDGETREETLLQESASKEAYYLGKILEMQNELKQSRAVVTNVQAENERLTAVVQDLKENNEMVELQRIRMKDEIREYKFREARLLQDYTELEEENITLQKLVSTLKQNQVEYEGLKHEIKRFEEETVLLNSQLEDAIRLKEIAEHQLEEALETLKNEREQKNNLRKELSQYISLNDNHISISVDGLKFAEDGSEPNNDDKMNGHIHGPLVKLNGDYRTPTLRKGESLNPVSDLFSELNISEIQKLKQQLMQVEREKAILLANLQESQTQLEHTKGALTEQHERVHRLTEHVNAMRGLQSSKELKAELDGEKGRDSGEEAHDYEVDINGLEILECKYRVAVTEVIDLKAEIKALKEKYNKSVENYTDEKAKYESKIQMYDEQVTSLEKTTKESGEKMAHMEKELQKMTSIANENHSTLNTAQDELVTFSEELAQLYHHVCLCNNETPNRVMLDYYRQSRVTRSGSLKGPDDPRGLLSPRLARRGVSSPVETRTSSEPVAKESTEASKEPSPTKTPTISPVITAPPSSPVLDTSDIRKEPMNIYNLNAIIRDQIKHLQKAVDRSLQLSRQRAAARELAPMIDKDKEALMEEILKLKSLLSTKREQIATLRAVLKANKQTAEVALANLKNKYENEKAMVTETMTKLRNELKALKEDAATFSSLRAMFATRCDEYVTQLDEMQRQLAAAEDEKKTLNTLLRMAIQQKLALTQRLEDLEFDHEQSRRSKGKLGKSKIGSPKVSGEASVTVPTIDTYLLHSQGPQTPNIRVSSGTQRKRYACSDLHSTVQWPDFS

SEQ ID NO: 12392 - protein, 835 aa, Homo sapiens
MAAEEVLQTVDHYKTEIERLTKELTETTHEKIQAAEYGLVVLEEKLTLKQQYDELEAEYDSLKQELEQLKEAFGQSFSIHRKVAEDGETREETLLQESASKEAYYLGKILEMQNELKQSRAVVTNVQAENERLTAVVQDLKENNEMVELQRIRMKDEIREYKFREARLLQDYTELEEENITLQKLVSTLKQNQVEYEGLKHEIKRFEEETVLLNSQLEDAIRLKEIAEHQLEEALETLKNEREQKNNLRKELSQYISLNDNHISISVDGLKFAEDGSEPNNDDKMNGHIHGPLVKLNGDYRTPTLRKGESLNPVSDLFSELNISEIQKLKQQLMQVEREKAILLANLQESQTQLEHTKGALTEQHERVHRLTEHVNAMRGLQSSKELKAELDGEKGRDSGEEAHDYEVDINGLEILECKYRVAVTEVIDLKAEIKALKEKYNKSVENYTDEKAKYESKIQMYDEQVTSLEKTTKESGEKMAHMEKELQKMTSIANENHSTLNTAQDELVTFSEELAQLYHHVCLCNNETPNRVMLDYYRQSRVTRSGSLKGPDDPRGLLSPRLARRGVSSPVETRTSSEPVAKESTEASKEPSPTKTPTISPVITAPPSSPVLDTSDIRKEPMNIYNLNAIIRDQIKHLQKAVDRSLQLSRQRAAARELAPMIDKDKEALMEEILKLKSLLSTKREQIATLRAVLKANKQTAEVALANLKNKYENEKAMVTETMTKLRNELKALKEDAATFSSLRAMFATRCDEYVTQLDEMQRQLAAAEDEKKTLNTLLRMAIQQKLALTQRLEDLEFDHEQSRRSKGKLGKSKIGSPKIVSSLLPPYRHSAHN

SEQ ID NO: 12393 - protein, 455 aa, Homo sapiens
MDAALKRSRSEEPAEILPPARDEEEEEEEGMEQGLEEEEEVDPRIQGELEKLNQSTDDINRRETELEDARQKFRSVLVEATVKLDELVKKIGKAVEDSKPYWEARRVARQAQLEAQKATQDFQRATEVLRAAKETISLAEQRLLEDDKRQFDSAWQEMLNHATQRVMEAEQTKTRSELVHKETAARYNAAMGRMRQLEKKLKRAINKSKPYFELKAKYYVQLEQLKKTVDDLQAKLTLAKGEYKMALKNLEMISDEIHERRRSSAMGPRGCGVGAEGSSTSVEDLPGSKPEPDAISVASEAFEDDSCSNFVSEDDSETQSVSSFSSGPTSPSEMPDQFPAVVRPGSLDLPSPVSLSEFGMMFPVLGPRSECSGASSPECEVERGDRAEGAENKTSDKANNNRGLSSSSGSGGSSKSQSSTSPEGQALENRMKQLSLQCSKGRDGIIADIKMVQIG

SEQ ID NO: 12394 - protein, 298 aa, Homo sapiens
MLNHATQRVMEAEQTKTRSELVHKETAARYNAAMGRMRQLEKKLKRAINKSKPYFELKAKYYVQLEQLKKTVDDLQAKLTLAKGEYKMALKNLEMISDEIHERRRSSAMGPRGCGVGAEGSSTSVEDLPGSKPEPDAISVASEAFEDDSCSNFVSEDDSETQSVSSFSSGPTSPSEMPDQFPAVVRPGSLDLPSPVSLSEFGMMFPVLGPRSECSGASSPECEVERGDRAEGAENKTSDKANNNRGLSSSSGSGGSSKSQSSTSPEGQALENRMKQLSLQCSKGRDGIIADIKMVQIG

SEQ ID NO: 12395 - protein, 100 aa, Homo sapiens
MSTSTSCPIPGGRDQLPDCYSTTPGGTLYATTPGGTRIIYDRKFLLECKNSPIARTPPCCLPQIPGVTTPPTAPLSKLEELKEQETEEEIPDDAQFEMDI

SEQ ID NO: 12396 - protein, 283 aa, Homo sapiens
MQTDSLSPSPNPVSPVPLNNPTSAPRYGTVIPNRIFVGGIDFKTNESDLRKFFSQYGSVKEVKIVNDRAGVSKGYGFVTFETQEDAQKILQEAEKLNYKDKKLNIGPAIRKQQVGIPRSSIMPAAGTMYLTTSTGYPYTYHNGVAYFHTPEVTSVPPPWPSRSVCSSPVMVAQPIYQQPAYHYQATTQYLPGQWQWSVPQPSASSAPFLYLQPSEVIYQPVEIAQDGGCVPPPLSLMETSVPEPYSDHGVQATYHQVYAPSAITMPAPVMQPEPIKTVWSIHY

SEQ ID NO: 12397 - protein, 339 aa, Homo sapiens
MQTSNQMQTDSLSPSPNPVSPVPLNNPTSAPRYGTVIPNRIFVGGIDFKTNESDLRKFFSQYGSVKEVKIVNDRAGVSKGYGFVTFETQEDAQKILQEAEKLNYKDKKLNIGPAIRKQQVGIPRSSIMPAAGTMYLTTSTGYPYTYHNGVAYFHTPEVTSVPPPWPSRSVCSSPVMVAQPIYQQPAYHYQGIKQCHTRRWMDSLLPFTKCDEATTQYLPGQWQWSVPQPSASSAPFLYLQPSEVIYQPVEIAQDGGCVPPPLSLMETSVPEPYSDHGVQATYHQVYAPSAITMPAPVMQPEPIKCGAFIIKTIGQLYSSSTDFLSNDPCVAEIQLQRTS

SEQ ID NO: 12398 - protein, 295 aa, Homo sapiens
METESGPQTSNQMQTDSLSPSPNPVSPVPLNNPTSAPRYGTVIPNRIFVGGIDFKTNESDLRKFFSQYGSVKEVKIVNDRAGVSKGYGFVTFETQEDAQKILQEAEKLNYKDKKLNIGPAIRKQQVGIPRSSIMPAAGTMYLTTSTGYPYTYHNGVAYFHTPEVTSVPPPWPSRSVCSSPVMVAQPIYQQPAYHYQATTQYLPGQWQWSVPQPSASSAPFLYLQPSEVIYQPVEIAQDGGCVPPPLSLMETSVPEPYSDHGVQATYHQVYAPSAITMPAPVMQPEPIKTVWSIHY

SEQ ID NO: 12399 - protein, 289 aa, Homo sapiens
MQTSNQMQTDSLSPSPNPVSPVPLNNPTSAPRYGTVIPNRIFVGGIDFKTNESDLRKFFSQYGSVKEVKIVNDRAGVSKGYGFVTFETQEDAQKILQEAEKLNYKDKKLNIGPAIRKQQVGIPRSSIMPAAGTMYLTTSTGYPYTYHNGVAYFHTPEVTSVPPPWPSRSVCSSPVMVAQPIYQQPAYHYQATTQYLPGQWQWSVPQPSASSAPFLYLQPSEVIYQPVEIAQDGGCVPPPLSLMETSVPEPYSDHGVQATYHQVYAPSAITMPAPVMQPEPIKTVWSIHY

SEQ ID NO: 12400 - protein, 174 aa, Homo sapiens
MTELEYPKGSSIMPAAGTMYLTTSTGYPYTYHNGVAYFHTPEVTSVPPPWPSRSVCSSPVMVAQPIYQQPAYHYQATTQYLPGQWQWSVPQPSASSAPFLYLQPSEVIYQPVEIAQDGGCVPPPLSLMETSVPEPYSDHGVQATYHQVYAPSAITMPAPVMQPEPIKTVWSIHY

SEQ ID NO: 12401 - protein, 431 aa, Homo sapiens
MSSIRFLCQRCHQALKLSGSSESRSLPAAPAPTSGQAEPGDTREPGVTTREVTDAEEQQDGASSRSPPGDGSVSKGHANIFTLLGELGAMHMLSSIQKAAGDIFDIVSGQAVVDHPLCEECTDSLLEQLDIQLALTEADSQNYQRCLETGELATSEDEAAALRAELRDLELEEARLVQELEDVDRNNARAAADLQAAQAEAAELDQQERQHYRDYSALKRQQLELLDQLGNVENQLQYARVQRDRLKEINCFTATFEIWVEGPLGVINNFRLGRLPTVRVGWNEINTAWGQAALLLLTLANTIGLQFQRYRLIPCGNHSYLKSLTDDRTELPLFCYGGQDVFLNNKYDRAMVAFLDCMQQFKEEAEKGELGLSLPYGIQVETGLMEDVGGRGECYSIRTHLNTQELWTKALKFMLINFKWSLIWVASRYQK

SEQ ID NO: 12402 - protein, 630 aa, Homo sapiens
MELQPPEASIAVVSIPRQLPGSHSEAGVQGLSAGDDSELGSHCVAQTGLELLASGDPLPSASQNAEMIETGSDCVTQAGLQLLASSDPPALASKNAEVTGTMSQDTEVDMKEVELNELEPEKQPMNAASGAAMSLAGAEKNGLVKIKVAEDEAEAAAAAKFTGLSKEELLKVAGSPGWVRTRWALLLLFWLGWLGMLAGAVVIIVRAPRCRELPAQKWWHTGALYRIGDLQAFQGHGAGNLAGLKGRLDYLSSLKVKGLVLGPIHKNQKDDVAQTDLLQIDPNFGSKEDFDSLLQSAKKKSIRVILDLTPNYRGENSWFSTQVDTVATKVKDALEFWLQAGVDGFQVRDIENLKDASSFLAEWQNITKGFSEDRLLIAGTNSSDLQQILSLLESNKDLLLTSSYLSDSGSTGEHTKSLVTQYLNATGNRWCSWSLSQARLLTSFLPAQLLRLYQLMLFTLPGTPVFSYGDEIGLDAAALPGQPMEAPVMLWDESSFPDIPGAVSANMTVKGQSEDPGSLLSLFRRLSDQRSKERSLLHGDFHAFSAGPGLFSYIRHWDQNERFLVVLNFGDVGLSAGLQASDLPASASLPAKADLLLSTQPGREEGSPLELERLKLEPHEGLLLRFPYAA

SEQ ID NO: 12403 - protein, 529 aa, Homo sapiens
MSQDTEVDMKEVELNELEPEKQPMNAASGAAMSLAGAEKNGLVKIKVAEDEAEAAAAAKFTGLSKEELLKVAGSPGWVRTRWALLLLFWLGWLGMLAGAVVIIVRAPRCRELPAQKWWHTGALYRIGDLQAFQGHGAGNLAGLKGRLDYLSSLKVKGLVLGPIHKNQKDDVAQTDLLQIDPNFGSKEDFDSLLQSAKKKSIRVILDLTPNYRGENSWFSTQVDTVATKVKDALEFWLQAGVDGFQVRDIENLKDASSFLAEWQNITKGFSEDRLLIAGTNSSDLQQILSLLESNKDLLLTSSYLSDSGSTGEHTKSLVTQYLNATGNRWCSWSLSQARLLTSFLPAQLLRLYQLMLFTLPGTPVFSYGDEIGLDAAALPGQPMEAPVMLWDESSFPDIPGAVSANMTVKGQSEDPGSLLSLFRRLSDQRSKERSLLHGDFHAFSAGPGLFSYIRHWDQNERFLVVLNFGDVGLSAGLQASDLPASASLPAKADLLLSTQPGREEGSPLELERLKLEPHEGLLLRFPYAA

SEQ ID NO: 12404 - protein, 568 aa, Homo sapiens
MELQPPEASIAVVSIPRQLPGSHSEAGVQGLSAGDDSGTMSQDTEVDMKEVELNELEPEKQPMNAASGAAMSLAGAEKNGLVKIKVAEDEAEAAAAAKFTGLSKEELLKVAGSPGWVRTRWALLLLFWLGWLGMLAGAVVIIVRAPRCRELPAQKWWHTGALYRIGDLQAFQGHGAGNLAGLKGRLDYLSSLKVKGLVLGPIHKNQKDDVAQTDLLQIDPNFGSKEDFDSLLQSAKKKSIRVILDLTPNYRGENSWFSTQVDTVATKVKDALEFWLQAGVDGFQVRDIENLKDASSFLAEWQNITKGFSEDRLLIAGTNSSDLQQILSLLESNKDLLLTSSYLSDSGSTGEHTKSLVTQYLNATGNRWCSWSLSQARLLTSFLPAQLLRLYQLMLFTLPGTPVFSYGDEIGLDAAALPGQPMEAPVMLWDESSFPDIPGAVSANMTVKGQSEDPGSLLSLFRRLSDQRSKERSLLHGDFHAFSAGPGLFSYIRHWDQNERFLVVLNFGDVGLSAGLQASDLPASASLPAKADLLLSTQPGREEGSPLELERLKLEPHEGLLLRFPYAA

SEQ ID NO: 12405 - protein, 661 aa, Homo sapiens
MELQPPEASIAVVSIPRQLPGSHSEAGVQGLSAGDDSELGSHCVAQTGLELLASGDPLPSASQNAEMIETGSDCVTQAGLQLLASSDPPALASKNAEVTETGFHHVSQADIEFLTSIDPTASASGSAGITGTMSQDTEVDMKEVELNELEPEKQPMNAASGAAMSLAGAEKNGLVKIKVAEDEAEAAAAAKFTGLSKEELLKVAGSPGWVRTRWALLLLFWLGWLGMLAGAVVIIVRAPRCRELPAQKWWHTGALYRIGDLQAFQGHGAGNLAGLKGRLDYLSSLKVKGLVLGPIHKNQKDDVAQTDLLQIDPNFGSKEDFDSLLQSAKKKSIRVILDLTPNYRGENSWFSTQVDTVATKVKDALEFWLQAGVDGFQVRDIENLKDASSFLAEWQNITKGFSEDRLLIAGTNSSDLQQILSLLESNKDLLLTSSYLSDSGSTGEHTKSLVTQYLNATGNRWCSWSLSQARLLTSFLPAQLLRLYQLMLFTLPGTPVFSYGDEIGLDAAALPGQPMEAPVMLWDESSFPDIPGAVSANMTVKGQSEDPGSLLSLFRRLSDQRSKERSLLHGDFHAFSAGPGLFSYIRHWDQNERFLVVLNFGDVGLSAGLQASDLPASASLPAKADLLLSTQPGREEGSPLELERLKLEPHEGLLLRFPYAA

SEQ ID NO: 12406 - protein, 766 aa, Homo sapiens
MIWRSRAGAELFSLMALWEWIALSLHCWVLAVAAVSDQHATSPFDWLLSDKGPFHRSQEYTDFVDRSRQGFSTRYKIYREFGRWKVNNLAVERRNFLGSPLPLAPEFFRNIRLLGRRPTLQQITENLIKKYGTHFLLSATLGGEESLTIFVDKRKLSKRAEGSDSTTNSSSVTLETLHQLAASYFIDRDSTLRRLHHIQIASTAIKVTETRTGPLGCSNYDNLDSVSSVLVQSPENKIQLQGLQVLLPDYLQERFVQAALSYIACNSEGEFICKENDCWCHCGPKFPECNCPSMDIQAMEENLLRITETWKAYNSDFEESDEFKLFMKRLPMNYFLNTSTIMHLWTMDSNFQRRYEQLENSMKQLFLKAQKIVHKLFSLSKRCHKQPLISLPRQRTSTYWLTRIQSFLYCNENGLLGSFSEETHSCTCPNDQVVCTAFLPCTVGDASACLTCAPDNRTRCGTCNTGYMLSQGLCKPEVAESTDHYIGFETDLQDLEMKYLLQKTDRRIEVHAIFISNDMRLNSWFDPSWRKRMLLTLKSNKYKSSLVHMILGLSLQICLTKNSTLEPVLAVYVNPFGGSHSESWFMPVNENSFPDWERTKLDLPLQCYNWTLTLGNKWKTFFETVHIYLRSRIKSNGPNGNESIYYEPLEFIDPSRNLGYMKINNIQVFGYSMHFDPEAIRDLILQLDYPYTQGSQDSALLQLLEIRDRVNKLSPPGQRRLDLFSCLLRHRLKLSTSEVVRIQSALQAFNAKLPNTMDYDTTKLCS

SEQ ID NO: 12407 - protein, 664 aa, Homo sapiens
MPQAPSTGSSLIRDPSIAHRNTQILWTEAGRDLAQDTRYTGEESLTIFVDKRKLSKRAEGSDSTTNSSSVTLETLHQLAASYFIDRDSTLRRLHHIQIASTAIKVTETRTGPLGCSNYDNLDSVSSVLVQSPENKIQLQGLQVLLPDYLQERFVQAALSYIACNSEGEFICKENDCWCHCGPKFPECNCPSMDIQAMEENLLRITETWKAYNSDFEESDEFKLFMKRLPMNYFLNTSTIMHLWTMDSNFQRRYEQLENSMKQLFLKAQKIVHKLFSLSKRCHKQPLISLPRQRTSTYWLTRIQSFLYCNENGLLGSFSEETHSCTCPNDQVVCTAFLPCTVGDASACLTCAPDNRTRCGTCNTGYMLSQGLCKPEVAESTDHYIGFETDLQDLEMKYLLQKTDRRIEVHAIFISNDMRLNSWFDPSWRKRMLLTLKSNKYKSSLVHMILGLSLQICLTKNSTLEPVLAVYVNPFGGSHSESWFMPVNENSFPDWERTKLDLPLQCYNWTLTLGNKWKTFFETVHIYLRSRIKSNGPNGNESIYYEPLEFIDPSRNLGYMKINNIQVFGYSMHFDPEAIRDLILQLDYPYTQGSQDSALLQLLEIRDRVNKLSPPGQRRLDLFSCLLRHRLKLSTSEVVRIQSALQAFNAKLPNTMDYDTTKLCS

SEQ ID NO: 12408 - protein, 326 aa, Homo sapiens
MHRTTRIKITELNPHLMCVLCGGYFIDATTIIECLHSFCKTCIVRYLETSKYCPICDVQVHKTRPLLNIRSDKTLQDIVYKLVPGLFKNEMKRRRDFYAAHPSADAANGSNEDRGEVADEDKRIITDDEIISLSIEFFDQNRLDRKVNKDKEKSKEEVNDKRYLRCPAAMTVMHLRKFLRSKMDIPNTFQIDVMYEEEPLKDYYTLMDIAYIYTWRRNGPLPLKYRVRPTCKRMKISHQRDGLTNAGELESDSGSDKANSPAGGIPSTSSCLPSPSTPVQSPHPQFPHISSTMNGTSNSPSGNHQSSFANRPRKSSVNGSSATSSG

SEQ ID NO: 12409 - protein, 97 aa, Homo sapiens
MEEISLANLDTNKLEAIAQEIYVDLIEDSCLGFCFEVHRAVKCGYFYLEFAETGSVKDFGIQPVEDKGACRLPLCSLPGEPGNGPDQQLQRSPPEFQ

SEQ ID NO: 12410 - protein, 494 aa, Homo sapiens
MLTSKGQGFLHGGLCLWLCVFTPFFKGCVGCATEERLFHKLFSHYNQFIRPVENVSDPVTVHFEVAITQLANVDEVNQIMETNLWLRHIWNDYKLRWDPMEYDGIETLRVPADKIWKPDIVLYNNAVGDFQVEGKTKALLKYNGMITWTPPAIFKSSCPMDITFFPFDHQNCSLKFGSWTYDKAEIDLLIIGSKVDMNDFWENSEWEIIDASGYKHDIKYNCCEEIYTDITYSFYIRRLPMFYTINLIIPCLFISFLTVLVFYLPSDCGEKVTLCISVLLSLTVFLLVITETIPSTSLVVPLVGEYLLFTMIFVTLSIVVTVFVLNIHYRTPTTHTMPRWVKTVFLKLLPQVLLMRWPLDKTRGTGSDAVPRGLARRPAKGKLASHGEPRHLKECFHCHKSNELATSKRRLSHQPLQWVVENSEHSPEVEDVINSVQFIAENMKSHNETKEVEDDWKYVAMVVDRVFLWVFIIVCVFGTAGLFLQPLLGNTGKS

SEQ ID NO: 12411 - protein, 479 aa, Homo sapiens
MLTSKGQGFLHGGLCLWLCVFTPFFKGCVGCATEERLFHKLFSHYNQFIRPVENVSDPVTVHFEVAITQLANVIWNDYKLRWDPMEYDGIETLRVPADKIWKPDIVLYNNAVGDFQVEGKTKALLKYNGMITWTPPAIFKSSCPMDITFFPFDHQNCSLKFGSWTYDKAEIDLLIIGSKVDMNDFWENSEWEIIDASGYKHDIKYNCCEEIYTDITYSFYIRRLPMFYTINLIIPCLFISFLTVLVFYLPSDCGEKVTLCISVLLSLTVFLLVITETIPSTSLVVPLVGEYLLFTMIFVTLSIVVTVFVLNIHYRTPTTHTMPRWVKTVFLKLLPQVLLMRWPLDKTRGTGSDAVPRGLARRPAKGKLASHGEPRHLKECFHCHKSNELATSKRRLSHQPLQWVVENSEHSPEVEDVINSVQFIAENMKSHNETKEVEDDWKYVAMVVDRVFLWVFIIVCVFGTAGLFLQPLLGNTGKS

SEQ ID NO: 12412 - protein, 384 aa, Homo sapiens
MAATASPQPLATEDADSENSSFYYYDYLDEVAFMLCRKDAVVSFGKVFLPVFYSLIFVLGLSGNLLLLMVLLRYVPRRRMVEIYLLNLAISNLLFLVTLPFWGISVAWHWVFGSFLCKMVSTLYTINFYSGIFFISCMSLDKYLEIVHAQPYHRLRTRAKSLLLATIVWAVSLAVSIPDMVFVQTHENPKGVWNCHADFGGHGTIWKLFLRFQQNLLGFLLPLLAMIFFYSRIGCVLVRLRPAGQGRALKIAAALVVAFFVLWFPYNLTLFLHTLLDLQVFGNCEVSQHLDYALQVTESIAFLHCCFSPILYAFSSHRFRQYLKAFLAAVLGWHLAPGTAQASLSSCSESSILTAQEEMTGMNDLGERQSENYPNKEDVGNKSA

SEQ ID NO: 12413 - protein, 362 aa, Homo sapiens
MDLHLFDYSEPGNFSDISWPCNSSDCIVVDTVMCPNMPNKSVLLYTLSFIYIFIFVIGMIANSVVVWVNIQAKTTGYDTHCYILNLAIADLWVVLTIPVWVVSLVQHNQWPMGELTCKVTHLIFSINLFGSIFFLTCMSVDRYLSITYFTNTPSSRKKMVRRVVCILVWLLAFCVSLPDTYYLKTVTSASNNETYCRSFYPEHSIKEWLIGMELVSVVLGFAVPFSIIAVFYFLLARAISASSDQEKHSSRKIIFSYVVVFLVCWLPYHVAVLLDIFSILHYIPFTCRLEHALFTALHVTQCLSLVHCCVNPVLYSFINRNYRYELMKAFIFKYSAKTGLTKLIDASRVSETEYSALEQSTK

SEQ ID NO: 12414 - protein, 350 aa, Homo sapiens
MALEQNQSTDYYYEENEMNGTYDYSQYELICIKEDVREFAKVFLPVFLTIVFVIGLAGNSMVVAIYAYYKKQRTKTDVYILNLAVADLLLLFTLPFWAVNAVHGWVLGKIMCKITSALYTLNFVSGMQFLACISIDRYVAVTKVPSQSGVGKPCWIICFCVWMAAILLSIPQLVFYTVNDNARCIPIFPRYLGTSMKALIQMLEICIGFVVPFLIMGVCYFITARTLMKMPNIKISRPLKVLLTVVIVFIVTQLPYNIVKFCRAIDIIYSLITSCNMSKRMDIAIQVTESIALFHSCLNPILYVFMGASFKNYVMKVAKKYGSWRRQRQSVEEFPFDSEGPTEPTSTFSI

SEQ ID NO: 12415 - protein, 310 aa, Homo sapiens
MNGLSLSELCCLFCCPPCPGRIAAKLAFLPPEATYSLVPEPEPGPGGAGAAPLGTLRASSGAPGRWKLHLTERADFQYSQRELDTIEVFPTKSARGNRVSCMYVRCVPGARYTVLFSHGNAVDLGQMSSFYIGLGSRLHCNIFSYDYSGYGASSGRPSERNLYADIDAAWQALRTRYGISPDSIILYGQSIGTVPTVDLASRYECAAVVLHSPLTSGMRVAFPDTKKTYCFDAFPNIEKVSKITSPVLIIHGTEDEVIDFSHGLALYERCPKAVEPLWVEGAGHNDIELYSQYLERLRRFISQELPSQRA

SEQ ID NO: 12416 - protein, 361 aa, Homo sapiens
MNGLSLSELCCLFCCPPCPGRIAAKLAFLPPEATYSLVPEPEPGPGGAGAAPLGTLRASSGAPGRWKLHLTERADFQYSQRELDTIEVFPTKSARGNRVSCMYVRCVPGARQGHQAQGGHPQLAWVGRLGDSNNPAPGGCLLGKSWGTGAALACGYIHLLARYTVLFSHGNAVDLGQMSSFYIGLGSRLHCNIFSYDYSGYGASSGRPSERNLYADIDAAWQALRTRYGISPDSIILYGQSIGTVPTVDLASRYECAAVVLHSPLTSGMRVAFPDTKKTYCFDAFPNIEKVSKITSPVLIIHGTEDEVIDFSHGLALYERCPKAVEPLWVEGAGHNDIELYSQYLERLRRFISQELPSQRA

SEQ ID NO: 12417 - protein, 236 aa, Homo sapiens
MNGLSLSELCCLFCCPPCPGRIAAKLAFLPPEATYSLVPEPEPGPGGAGAAPLGTLRASSGAPGRWKLHLTERADFQYSQRELDTIEVFPTKSARGNRVSCMYVRCVPGARYTVLFSHGNAVDLGQMSSFYIGLGSRLHCNIFSYDYSGYGASSGRPSERNLYADIDAAWQALRTRYGISPDSIILYGQSIGTVPTVDLASRYECAAVVLHSPLTSGMRVAFPDTKKTYCFDAFPK

SEQ ID NO: 12418 - protein, 176 aa, Homo sapiens
MNGLSLSELCCLFCCPPCPGRIAAKLAFLPPEATYSLVPEPEPGPGGAGAAPLGTLRASSGAPGRWKLHLTERADFQYSQRELDTIEVFPTKSARGNRVSCMYVRCVPGARYTVLFSHGNAVDLGQMSSFYIGLGSRLHCNIFSYDYSGYGASSGRPSERNLYADIDAAWQALRTR

SEQ ID NO: 12419 - protein, 560 aa, Homo sapiens
MAGPQPLALQLEQLLNPRPSEADPEADPEEATAARVIDRFDEGEDGEGDFLVVGSIRKLASASLLDTDKRYCGKTTSRKAWNEDHWEQTLPGSSDEEISDEEGSGDEDSEGLGLEEYDEDDLGAAEEQECGDHRESKKSRSHSAKTPGFSVQSISDFEKFTKGMDDLGSSEEEEDEESGMEEGDDAEDSQGESEEDRAGDRNSEDDGVVMTFSSVKVSEEVEKGRAVKNQIALWDQLLEGRIKLQKALLTTNQLPQPDVFPLFKDKGGPEFSSALKNSHKALKALLRSLVGLQEELLFQYPDTRYLVDGTKPNAGSEEISSEDDELVEEKKQQRRRVPAKRKLEMEDYPSFMAKRFADFTVYRNRTLQKWHDKTKLASGKLGKGFGAFERSILTQIDHILMDKERLLRRTQTKRSVYRVLGKPEPAAQPVPESLPGEPEILPQAPANAHLKDLDEEIFDDDDFYHQLLRELIERKTSSLDPNDQVAMGRQWLAIQKLRSKIHKKVDRKASKGRKLRFHVLSKLLSFMAPIDHTTMNDDARTELYRSLFGQLHPPDEGHGD

SEQ ID NO: 12420 - protein, 666 aa, Homo sapiens
MGESSEDIDQMFSTLLGEMDLLTQSLGVDTLPPPDPNPPRAEFNYSVGFKDLNESLNALEDQDLDALMADLVADISEAEQRTIQAQKESLQNQHHSASLQASIFSGAASLGYGTNVAATGISQYEDDLPPPPADPVLDLPLPPPPPEPLSQEEEEAQAKADKIKLALEKLKEAKVKKLVVKVHMNDNSTKSLMVDERQLARDVLDNLFEKTHCDCNVDWCLYEIYPELQIERFFEDHENVVEVLSDWTRDTENKILFLEKEEKYAVFKNPQNFYLDNRGKKESKETNEKMNAKNKESLLEESFCGTSIIVPELEGALYLKEDGKKSWKRRYFLLRASGIYYVPKGKTKTSRDLACFIQFENVNIYYGTQHKMKYKAPTDYCFVLKHPQIQKESQYIKYLCCDDTRTLNQWVMGIRIAKYGKTLYDNYQRAVAKAGLASRWTNLGTVNAAAPAQPSTGPKTGTTQPNGQIPQATHSVSAVLQEAQRHAETSKDKKPALGNHHDPAVPRAPHAPKSSLPPPPPVRRSSDTSGSPATPLKAKGTGGGGLPAPPDDFLPPPPPPPPLDDPELPPPPPDFMEPPPDFVPPPPPSYAGIAGSELPPPPPPPPAPAPAPVPDSARPPPAVAKRPPVPPKRQENPGHPGGAGGGEQDFMSDLMKALQKKRGNVS

SEQ ID NO: 12421 - protein, 172 aa, Homo sapiens
MGESSEDIDQMFSTLLGEMDLLTQSLGVDTLPPPDPNPPRAEFNYSVGFKDLNESLNALEDQDLDALMADLVADISEAEQRTIQAQKESLQNQHHSASLQASIFSGAASLGYGTNVAATGISQYEDDLPPPPADPVLDLPLPPPPPEPLSQVSMWDQRWQDHQPLLPITDVP

SEQ ID NO: 12422 - protein, 456 aa, Homo sapiens
MEGSWFHRKRFSFYLLLGFLLQGRGVTFTINCSGFGQHGADPTALNSVFNRKPFRPVTNISVPTQVNISFAMSAILDVNEQLHLLSSFLWLEMVWDNPFISWNPEECEGITKMSMAAKNLWLPDIFIIELMDVDKTPKGLTAYVSNEGRIRYKKPMKVDSICNLDIFYFPFDQQNCTLTFSSFLYTVDSMLLDMEKEVWEITDASRNILQTHGEWELLGLSKATAKLSRGGNLYDQIVFYVAIRRRPSLYVINLLVPSGFLVAIDALSFYLPVKSGNRVPFKITLLLGYNVFLLMMSDLLPTSGTPLIGVYFALCLSLMVGSLLETIFITHLLHVATTQPPPLPRWLHSLLLHCNSPGRCCPTAPQKENKGPGLTPTHLPGVKEPEVSAGQMPGPAEAELTGGSEWTRAQREHEAQKQHSVELWLQFSHAMDAMLFRLYLLFMASSIITVICLWNT

SEQ ID NO: 12423 - protein, 441 aa, Homo sapiens
MEGSWFHRKRFSFYLLLGFLLQGRGVTFTINCSGFGQHGADPTALNSVFNRKPFRPVTNISVPTQVNISFAMSAILDVVWDNPFISWNPEECEGITKMSMAAKNLWLPDIFIIELMDVDKTPKGLTAYVSNEGRIRYKKPMKVDSICNLDIFYFPFDQQNCTLTFSSFLYTVDSMLLDMEKEVWEITDASRNILQTHGEWELLGLSKATAKLSRGGNLYDQIVFYVAIRRRPSLYVINLLVPSGFLVAIDALSFYLPVKSGNRVPFKITLLLGYNVFLLMMSDLLPTSGTPLIGVYFALCLSLMVGSLLETIFITHLLHVATTQPPPLPRWLHSLLLHCNSPGRCCPTAPQKENKGPGLTPTHLPGVKEPEVSAGQMPGPAEAELTGGSEWTRAQREHEAQKQHSVELWLQFSHAMDAMLFRLYLLFMASSIITVICLWNT

SEQ ID NO: 12424 - protein, 471 aa, Homo sapiens
MLAFILSRATPRPALGPLSYREHRVALLHLTHSMSTTGRGVTFTINCSGFGQHGADPTALNSVFNRKPFRPVTNISVPTQVNISFAMSAILDVNEQLHLLSSFLWLEMVWDNPFISWNPEECEGITKMSMAAKNLWLPDIFIIELMDVDKTPKGLTAYVSNEGRIRYKKPMKVDSICNLDIFYFPFDQQNCTLTFSSFLYTVDSMLLDMEKEVWEITDASRNILQTHGEWELLGLSKATAKLSRGGNLYDQIVFYVAIRRRPSLYVINLLVPSGFLVAIDALSFYLPVKSGNRVPFKITLLLGYNVFLLMMSDLLPTSGTPLIGVYFALCLSLMVGSLLETIFITHLLHVATTQPPPLPRWLHSLLLHCNSPGRCCPTAPQKENKGPGLTPTHLPGVKEPEVSAGQMPGPAEAELTGGSEWTRAQREHEAQKQHSVELWLQFSHAMDAMLFRLYLLFMASSIITVICLWNT

SEQ ID NO: 12425 - protein, 456 aa, Homo sapiens
MLAFILSRATPRPALGPLSYREHRVALLHLTHSMSTTGRGVTFTINCSGFGQHGADPTALNSVFNRKPFRPVTNISVPTQVNISFAMSAILDVVWDNPFISWNPEECEGITKMSMAAKNLWLPDIFIIELMDVDKTPKGLTAYVSNEGRIRYKKPMKVDSICNLDIFYFPFDQQNCTLTFSSFLYTVDSMLLDMEKEVWEITDASRNILQTHGEWELLGLSKATAKLSRGGNLYDQIVFYVAIRRRPSLYVINLLVPSGFLVAIDALSFYLPVKSGNRVPFKITLLLGYNVFLLMMSDLLPTSGTPLIGVYFALCLSLMVGSLLETIFITHLLHVATTQPPPLPRWLHSLLLHCNSPGRCCPTAPQKENKGPGLTPTHLPGVKEPEVSAGQMPGPAEAELTGGSEWTRAQREHEAQKQHSVELWLQFSHAMDAMLFRLYLLFMASSIITVICLWNT

SEQ ID NO: 12426 - protein, 482 aa, Homo sapiens
MLAFILSRATPRPALGPLSYREHRVALLHLTHSMSTTGRGVTFTINCSGFGQHGADPTALNSVFNRKPFRPVTNISVPTQVNISFAMSAILDVVWDNPFISWNPEECEGITKMSMAAKNLWLPDIFIIELCVSRAGQREVPSPGSHRDHSLPLGPLMDVDKTPKGLTAYVSNEGRIRYKKPMKVDSICNLDIFYFPFDQQNCTLTFSSFLYTVDSMLLDMEKEVWEITDASRNILQTHGEWELLGLSKATAKLSRGGNLYDQIVFYVAIRRRPSLYVINLLVPSGFLVAIDALSFYLPVKSGNRVPFKITLLLGYNVFLLMMSDLLPTSGTPLIGVYFALCLSLMVGSLLETIFITHLLHVATTQPPPLPRWLHSLLLHCNSPGRCCPTAPQKENKGPGLTPTHLPGVKEPEVSAGQMPGPAEAELTGGSEWTRAQREHEAQKQHSVELWLQFSHAMDAMLFRLYLLFMASSIITVICLWNT

SEQ ID NO: 12427 - protein, 478 aa, Homo sapiens
MLLWVQQALLALLLPTLLAQGEARRSRNTTRPALLRLSDYLLTNYRKGVRPVRDWRKPTTVSIDVIVYAILNVDEKNQVLTTYIWYRQYWTDEFLQWNPEDFDNITKLSIPTDSIWVPDILINEFVDVGKSPNIPYVYIRHQGEVQNYKPLQVVTACSLDIYNFPFDVQNCSLTFTSWLHTIQDINISLWRLPEKVKSDRSVFMNQGEWELLGVLPYFREFSMESSNYYAEMKFYVVIRRRPLFYVVSLLLPSIFLMVMDIVGFYLPPNSGERVSFKITLLLGYSVFLIIVSDTLPATAIGTPLIGVYFVVCMALLVISLAETIFIVRLVHKQDLQQPVPAWLRHLVLERIAWLLCLREQSTSQRPPATSQATKTDDCSAMGNHCSHMGGPQDFEKSPRDRCSPPPPPREASLAVCGLLQELSSIRQFLEKRDEIREVARDWLRVGSVLDKLLFHIYLLAVLAYSITLVMLWSIWQYA

SEQ ID NO: 12428 - protein, 510 aa, Homo sapiens
MLLWVQQALLALLLPTLLAQGEARRSRNTTRPALLRLSDYLLTNYRKGVRPVRDWRKPTTVSIDVIVYAILNVDEKNQVLTTYIWYRQYWTDEFLQWNPEDFDNITKLSIPTDSIWVPDILINEFVDVGKSPNIPYVYIRHQGEVQNYKPLQVVTACSLDIYNFPFDVQNCSLTFTSWLHTIQDINISLWRLPEKVKSDRSVFMNQGEWELLGVLPYFREFSMESSNYYAEMKFYVVIRRRPLFYVVSLLLPSIFLMVMDIVGFYLPPNSGERVSFKITLLLGYSVFLIIVSDTLPATAIGTPLIGKAPPGSRAQSGEKPAPSHLLHVSLASALGCTGVYFVVCMALLVISLAETIFIVRLVHKQDLQQPVPAWLRHLVLERIAWLLCLREQSTSQRPPATSQATKTDDCSAMGNHCSHMGGPQDFEKSPRDRCSPPPPPREASLAVCGLLQELSSIRQFLEKRDEIREVARDWLRVGSVLDKLLFHIYLLAVLAYSITLVMLWSIWQYA

SEQ ID NO: 12429 - protein, 463 aa, Homo sapiens
MHRSFLQARRSRNTTRPALLRLSDYLLTNYRKGVRPVRDWRKPTTVSIDVIVYAILNVDEKNQVLTTYIWYRQYWTDEFLQWNPEDFDNITKLSIPTDSIWVPDILINEFVDVGKSPNIPYVYIRHQGEVQNYKPLQVVTACSLDIYNFPFDVQNCSLTFTSWLHTIQDINISLWRLPEKVKSDRSVFMNQGEWELLGVLPYFREFSMESSNYYAEMKFYVVIRRRPLFYVVSLLLPSIFLMVMDIVGFYLPPNSGERVSFKITLLLGYSVFLIIVSDTLPATAIGTPLIGVYFVVCMALLVISLAETIFIVRLVHKQDLQQPVPAWLRHLVLERIAWLLCLREQSTSQRPPATSQATKTDDCSAMGNHCSHMGGPQDFEKSPRDRCSPPPPPREASLAVCGLLQELSSIRQFLEKRDEIREVARDWLRVGSVLDKLLFHIYLLAVLAYSITLVMLWSIWQYA

SEQ ID NO: 12430 - protein, 484 aa, Homo sapiens
MLGKLAMLLWVQQALLALLLPTLLAQGEARRSRNTTRPALLRLSDYLLTNYRKGVRPVRDWRKPTTVSIDVIVYAILNVDEKNQVLTTYIWYRQYWTDEFLQWNPEDFDNITKLSIPTDSIWVPDILINEFVDVGKSPNIPYVYIRHQGEVQNYKPLQVVTACSLDIYNFPFDVQNCSLTFTSWLHTIQDINISLWRLPEKVKSDRSVFMNQGEWELLGVLPYFREFSMESSNYYAEMKFYVVIRRRPLFYVVSLLLPSIFLMVMDIVGFYLPPNSGERVSFKITLLLGYSVFLIIVSDTLPATAIGTPLIGVYFVVCMALLVISLAETIFIVRLVHKQDLQQPVPAWLRHLVLERIAWLLCLREQSTSQRPPATSQATKTDDCSAMGNHCSHMGGPQDFEKSPRDRCSPPPPPREASLAVCGLLQELSSIRQFLEKRDEIREVARDWLRVGSVLDKLLFHIYLLAVLAYSITLVMLWSIWQYA

SEQ ID NO: 12431 - protein, 516 aa, Homo sapiens
MLGKLAMLLWVQQALLALLLPTLLAQGEARRSRNTTRPALLRLSDYLLTNYRKGVRPVRDWRKPTTVSIDVIVYAILNVDEKNQVLTTYIWYRQYWTDEFLQWNPEDFDNITKLSIPTDSIWVPDILINEFVDVGKSPNIPYVYIRHQGEVQNYKPLQVVTACSLDIYNFPFDVQNCSLTFTSWLHTIQDINISLWRLPEKVKSDRSVFMNQGEWELLGVLPYFREFSMESSNYYAEMKFYVVIRRRPLFYVVSLLLPSIFLMVMDIVGFYLPPNSGERVSFKITLLLGYSVFLIIVSDTLPATAIGTPLIGKAPPGSRAQSGEKPAPSHLLHVSLASALGCTGVYFVVCMALLVISLAETIFIVRLVHKQDLQQPVPAWLRHLVLERIAWLLCLREQSTSQRPPATSQATKTDDCSAMGNHCSHMGGPQDFEKSPRDRCSPPPPPREASLAVCGLLQELSSIRQFLEKRDEIREVARDWLRVGSVLDKLLFHIYLLAVLAYSITLVMLWSIWQYA

SEQ ID NO: 12432 - protein, 412 aa, Homo sapiens
MPIMGSSVYITVELAIAVLAILGNVLVCWAVWLNSNLQNVTNYFVVSLAAADIAVGVLAIPFAITISTGFCAACHGCLFIACFVLVLTQSSIFSLLAIAIDRYIAIRIPLRYNGLVTGTRAKGIIAICWVLSFAIGLTPMLGWNNCGQPKEGKNHSQGCGEGQVACLFEDVVPMNYMVYFNFFACVLVPLLLMLGVYLRIFLAARRQLKQMESQPLPGERARSTLQKEVHAAKSLAIIVGLFALCWLPLHIINCFTFFCPDCSHAPLWLMYLAIVLSHTNSVVNPFIYAYRIREFRQTFRKIIRSHVLRQQEPFKAAGTSARVLAAHGSDGEQVSLRLNGHPPGVWANGSAPHPERRPNGYALGLVSGGSAQESQGNTGLPDVELLSHELKGVCPEPPGLDDPLAQDGAGVS

SEQ ID NO: 12433 - protein, 458 aa, Homo sapiens
MAGSGRLVLRPWIRELILGSETPSSPRAGQLLEVLQDAEAAVAGPSHAPDTSDVGATLLVSDGTHSVRCLVTREALDTSDWEEKEFGFRGTEGRLLLLQDCGVHVQVAEGGAPAEFYLQVDRFSLLPTEQPRLRVPGCNQDLDVQKKLYDCLEEHLSESTSSNAGLSLSQLLDEMREDQEHQGALVCLAESCLTLEGPCTAPPVTHWAASRCKATGEAVYTVPSSMLCISENDQLILSSLGPCQRTQGPELPPPDPALQDLSLTLIASPPSSPSSSGTPALPGHMSSEESGTSISLLPALSLAAPDPGQRSSSQPSPAICSAPATLTPRSPHASRTPSSPLQSCTPSLSPRSHVPSPHQALVTRPQKPSLEFKEFVGLPCKNRPPFPRTGATRGAQEPCSVWEPPKRHRDGSAFQYEYEPPCTSLCARVQAVRLPPQLMAWALHFLMDAQPGSEPTPM

SEQ ID NO: 12434 - protein, 455 aa, Homo sapiens
MAGSGRLVLRPWIRELILGSETPSSPRAGQLLEDAEAAVAGPSHAPDTSDVGATLLVSDGTHSVRCLVTREALDTSDWEEKEFGFRGTEGRLLLLQDCGVHVQVAEGGAPAEFYLQVDRFSLLPTEQPRLRVPGCNQDLDVQKKLYDCLEEHLSESTSSNAGLSLSQLLDEMREDQEHQGALVCLAESCLTLEGPCTAPPVTHWAASRCKATGEAVYTVPSSMLCISENDQLILSSLGPCQRTQGPELPPPDPALQDLSLTLIASPPSSPSSSGTPALPGHMSSEESGTSISLLPALSLAAPDPGQRSSSQPSPAICSAPATLTPRSPHASRTPSSPLQSCTPSLSPRSHVPSPHQALVTRPQKPSLEFKEFVGLPCKNRPPFPRTGATRGAQEPCSVWEPPKRHRDGSAFQYEYEPPCTSLCARVQAVRLPPQLMAWALHFLMDAQPGSEPTPM

SEQ ID NO: 12435 - protein, 411 aa, Homo sapiens
MNAETCVSYCESPAAAMDAYYSPVSQSREGSSPFRAFPGGDKFGTTFLSAAAKAQGFGDAKSRARYGAGQQDLATPLESGAGARGSFNKFQPQPSTPQPQPPPQPQPQQQQPQPQPPAQPHLYLQRGACKTPPDGSLKLQEGSSGHSAALQVPCYAKESSLGEPELPPDSDTVGMDSSYLSVKEAGVKGPQDRASSDLPSPLEKADSESNKGKKRRNRTTFTSYQLEELEKVFQKTHYPDVYAREQLAMRTDLTEARVQVWFQNRRAKWRKRERFGQMQQVRTHFSTAYELPLLTRAENYAQIQNPSWLGNNGAASPVPACVVPCDPVPACMSPHAHPPGSGASSVTDFLSVSGAGSHVGQTHMGSLFGAASLSPGLNGYELNGEPDRKTSSIAALRMKAKEHSAAISWAT

SEQ ID NO: 12436 - protein, 83 aa, Homo sapiens
MSGPNGDLGMPVEAGAEGEEDGFGEAEYAAINSMLDQINSCLDHLEEKNDHLHARLQELLESNRQTRLEFQQQLGEAPSDASP

SEQ ID NO: 12437 - protein, 1459 aa, Homo sapiens
MVSSGCRMRSLWFIIVISFLPNTEGFSRAALPFGLVRRELSCEGYSIDLRCPGSDVIMIESANYGRTDDKICDADPFQMENTDCYLPDAFKIMTQRCNNRTQCIVVTGSDVFPDPCPGTYKYLEVQYECVPYIFVCPGTLKAIVDSPCIYEAEQKAGAWCKDPLQAADKIYFMPWTPYRTDTLIEYASLEDFQNSRQTTTYKLPNRVDGTGFVVYDGAVFFNKERTRNIVKFDLRTRIKSGEAIINYANYHDTSPYRWGGKTDIDLAVDENGLWVIYATEQNNGMIVISQLNPYTLRFEATWETVYDKRAASNAFMICGVLYVVRSVYQDNESETGKNSIDYIYNTRLNRGEYVDVPFPNQYQYIAAVDYNPRDNQLYVWNNNFILRYSLEFGPPDPAQVPTTAVTITSSAELFKTIISTTSTTSQKGPMSTTVAGSQEGSKGTKPPPAVSTTKIPPITNIFPLPERFCEALDSKGIKWPQTQRGMMVERPCPKGTRGTASYLCMISTGTWNPKGPDLSNCTSHWVNQLAQKIRSGENAASLANELAKHTKGPVFAGDVSSSVRLMEQLVDILDAQLQELKPSEKDSAGRSYNKLQKREKTCRAYLKAIVDTVDNLLRPEALESWKHMNSSEQAHTATMLLDTLEEGAFVLADNLLEPTRVSMPTENIVLEVAVLSTEGQIQDFKFPLGIKGAGSSIQLSANTVKQNSRNGLAKLVFIIYRSLGQFLSTENATIKLGADFIGRNSTIAVNSHVISVSINKESSRVYLTDPVLFTLPHIDPDNYFNANCSFWNYSERTMMGYWSTQGCKLVDTNKTRTTCACSHLTNFAILMAHREIAYKDGVHELLLTVITWVGIVISLVCLAICIFTFCFFRGLQSDRNTIHKNLCINLFIAEFIFLIGIDKTKYAIACPIFAGLLHFFFLAAFAWMCLEGVQLYLMLVEVFESEYSRKKYYYVAGYLFPATVVGVSAAIDYKSYGTEKACWLHVDNYFIWSFIGPVTFIILLNIIFLVITLCKMVKHSNTLKPDSSRLENIKSWVLGAFALLCLLGLTWSFGLLFINEETIVMAYLFTIFNAFQGVFIFIFHCALQKKVRKEYGKCFRHSYCCGGLPTESPHSSVKASTTRTSARYSSGTQSRIRRMWNDTVRKQSESSFISGDINSTSTLNQGMTGNYLLTNPLLRPHGTNNPYNTLLAETVVCNAPSAPVFNSPGHSLNNARDTSAMDTLPLNGNFNNSYSLHKGDYNDSVQVVDCGLSLNDTAFEKMIISELVHNNLRGSSKTHNLELTLPVKPVIGGSSSEDDAIVADASSLMHSDNPGLELHHKELEAPLIPQRTHSLLYQPQKKVKSEGTDSYVSQLTAEAEDHLQSPNRDSLYTSMPNLRDSPYPESSPDMEEDLSPSRRSENEDIYYKSMPNLGAGHQLQMCYQISRGNSDGYIIPINKEGCIPEGDVREGQMQLVTSL

SEQ ID NO: 12438 - protein, 1403 aa, Homo sapiens
MVSSGCRMRSLWFIIVISFLPNTEGFSRAALPFGLVRRELSCEGYSIDLRCPGSDVIMIESANYGRTDDKICDADPFQMENTDCYLPDAFKIMTQRCNNRTQCIVVTGSDVFPDPCPGTYKYLEVQYECVPYIFVCPGTLKAIVDSPCIYEAEQKAGAWCKDPLQAADKIYFMPWTPYRTDTLIEYASLEDFQNSRQTTTYKLPNRVDGTGFVVYDGAVFFNKERTRNIVKFDLRTRIKSGEAIINYANYHDTSPYRWGGKTDIDLAVDENGLWVIYATEQNNGMIVISQLNPYTLRFEATWETVYDKRAASNAFMICGVLYVVRSVYQDNESETGKNSIDYIYNTRLNRGEYVDVPFPNQYQYIAAVDYNPRDNQLYVWNNNFILRYSLEFGPPDPAQVPTTAVTITSSAELFKTIISTTSTTSQKGPMSTTVAGSQEGSKGTKPPPAVSTTKIPPITNIFPLPERFCEALDSKGIKWPQTQRGMMVERPCPKGTRGTASYLCMISTGTWNPKGPDLSNCTSHWVNQLAQKIRSGENAASLANELAKHTKGPVFAGDVSSSVRLMEQLVDILDAQLQELKPSEKDSAGRSYNKAIVDTVDNLLRPEALESWKHMNSSEQAHTATMLLDTLEEGAFVLADNLLEPTRVSMPTENIVLEVAVLSTEGQIQDFKFPLGIKGAGSSIQLSANTVKQNSRNGLAKLVFIIYRSLGQFLSTENATIKLGADFIGRNSTIAVNSHVISVSINKESSRVYLTDPVLFTLPHIDPDNYFNANCSFWNYSERTMMGYWSTQGCKLVDTNKTRTTCACSHLTNFAILMAHREIAYKDGVHELLLTVITWVGIVISLVCLAICIFTFCFFRGLQSDRNTIHKNLCINLFIAEFIFLIGIDKTKYAIACPIFAGLLHFFFLAAFAWMCLEGVQLYLMLVEVFESEYSRKKYYYVAGYLFPATVVGVSAAIDYKSYGTEKACWLHVDNYFIWSFIGPVTFIILLNIIFLVITLCKMVKHSNTLKPDSSRLENIKSWVLGAFALLCLLGLTWSFGLLFINEETIVMAYLFTIFNAFQGVFIFIFHCALQKKVRKEYGKCFRHSYCCGGLPTESPHSSVKASTTRTSARYSSGTQSRIRRMWNDTVRKQSESSFISGDINSTSTLNQGHSLNNARDTSAMDTLPLNGNFNNSYSLHKGDYNDSVQVVDCGLSLNDTAFEKMIISELVHNNLRGSSKTHNLELTLPVKPVIGGSSSEDDAIVADASSLMHSDNPGLELHHKELEAPLIPQRTHSLLYQPQKKVKSEGTDSYVSQLTAEAEDHLQSPNRDSLYTSMPNLRDSPYPESSPDMEEDLSPSRRSENEDIYYKSMPNLGAGHQLQMCYQISRGNSDGYIIPINKEGCIPEGDVREGQMQLVTSL

SEQ ID NO: 12439 - protein, 1123 aa, Homo sapiens
MVSSGCRMRSLWFIIVISFLPNTEGFSRAALPFGLVRRELSCEGYSIDLRCPGSDVIMIESANYGRTDDKICDADPFQMENTDCYLPDAFKIMTQRCNNRTQCIVVTGSDVFPDPCPGTYKYLEVQYECVPYIFVCPGTLKAIVDSPCIYEAEQKAGAWCKDPLQAADKIYFMPWTPYRTDTLIEYASLEDFQNSRQTTTYKLPNRVDGTGFVVYDGAVFFNKERTRNIVKFDLRTRIKSGEAIINYANYHDTSPYRWGGKTDIDLAVDENGLWVIYATEQNNGMIVISQLNPYTLRFEATWETVYDKRAASNAFMICGVLYVVRSVYQDNESETGKNSIDYIYNTRLNRGEYVDVPFPNQYQYIAAVDYNPRDNQLYVWNNNFILRYSLEFGPPDPAQVPTTAVTITSSAELFKTIISTTSTTSQKGPMSTTVAGSQEGSKGTKPPPAVSTTKIPPITNIFPLPERFCEALDSKGIKWPQTQRGMMVERPCPKGTRGTASYLCMISTGTWNPKGPDLSNCTSHWVNQLAQKIRSGENAASLANELAKHTKGPVFAGDVSSSVRLMEQLVDILDAQLQELKPSEKDSAGRSYNKAIVDTVDNLLRPEALESWKHMNSSEQAHTATMLLDTLEEGAFVLADNLLEPTRVSMPTENIVLEVAVLSTEGQIQDFKFPLGIKGAGSSIQLSANTVKQNSRNGLAKLVFIIYRSLGQFLSTENATIKLGADFIGRNSTIAVNSHVISVSINKESSRVYLTDPVLFTLPHIDPDNYFNANCSFWNYSERTMMGYWSTQGCKLVDTNKTRTTCACSHLTNFAILMAHREIAYKDGVHELLLTVITWVGIVISLVCLAICIFTFCFFRGLQSDRNTIHKNLCINLFIAEFIFLIGIDKTKYAIACPIFAGLLHFFFLAAFAWMCLEGVQLYLMLVEVFESEYSRKKYYYVAGYLFPATVVGVSAAIDYKSYGTEKACWLHVDNYFIWSFIGPVTFIILLNIIFLVITLCKMVKHSNTLKPDSSRLENIKSWVLGAFALLCLLGLTWSFGLLFINEETIVMAYLFTIFNAFQGVFIFIFHCALQKKVRKEYGKCFRHSYCCGGLPTESPHSSVKASTTRTSARYSSGTQDIH

SEQ ID NO: 12440 - protein, 1177 aa, Homo sapiens
MVSSGCRMRSLWFIIVISFLPNTEGFSRAALPFGLVRRELSCEGYSIDLRCPGSDVIMIESANYGRTDDKICDADPFQMENTDCYLPDAFKIMTQRCNNRTQCIVVTGSDVFPDPCPGTYKYLEVQYECVPYIFVCPGTLKAIVDSPCIYEAEQKAGAWCKDPLQAADKIYFMPWTPYRTDTLIEYASLEDFQNSRQTTTYKLPNRVDGTGFVVYDGAVFFNKERTRNIVKFDLRTRIKSGEAIINYANYHDTSPYRWGGKTDIDLAVDENGLWVIYATEQNNGMIVISQLNPYTLRFEATWETVYDKRAASNAFMICGVLYVVRSVYQDNESETGKNSIDYIYNTRLNRGEYVDVPFPNQYQYIAAVDYNPRDNQLYVWNNNFILRYSLEFGPPDPAQVPTTAVTITSSAELFKTIISTTSTTSQKGPMSTTVAGSQEGSKGTKPPPAVSTTKIPPITNIFPLPERFCEALDSKGIKWPQTQRGMMVERPCPKGTRGTASYLCMISTGTWNPKGPDLSNCTSHWVNQLAQKIRSGENAASLANELAKHTKGPVFAGDVSSSVRLMEQLVDILDAQLQELKPSEKDSAGRSYNKAIVDTVDNLLRPEALESWKHMNSSEQAHTATMLLDTLEEGAFVLADNLLEPTRVSMPTENIVLEVAVLSTEGQIQDFKFPLGIKGAGSSIQLSANTVKQNSRNGLAKLVFIIYRSLGQFLSTENATIKLGADFIGRNSTIAVNSHVISVSINKESSRVYLTDPVLFTLPHIDPDNYFNANCSFWNYSERTMMGYWSTQGCKLVDTNKTRTTCACSHLTNFAILMAHREIAYKDGVHELLLTVITWVGIVISLVCLAICIFTFCFFRGLQSDRNTIHKNLCINLFIAEFIFLIGIDKTKYAIACPIFAGLLHFFFLAAFAWMCLEGVQLYLMLVEVFESEYSRKKYYYVAGYLFPATVVGVSAAIDYKSYGTEKACWLHVDNYFIWSFIGPVTFIILLNIIFLVITLCKMVKHSNTLKPDSSRLENIKSWVLGAFALLCLLGLTWSFGLLFINEETIVMAYLFTIFNAFQGVFIFIFHCALQKKVRKEYGKCFRHSYCCGGLPTESPHSSVKASTTRTSARYSSGTQSRIRRMWNDTVRKQSESSFISGDINSTSTLNQGLTSHGLRAHLQDLYHLELLLGQIA

SEQ ID NO: 12441 - protein, 1416 aa, Homo sapiens
MVSSGCRMRSLWFIIVISFLPNTEGFSRAALPFGLVRRELSCEGYSIDLRCPGSDVIMIESANYGRTDDKICDADPFQMENTDCYLPDAFKIMTQRCNNRTQCIVVTGSDVFPDPCPGTYKYLEVQYECVPYIFVCPGTLKAIVDSPCIYEAEQKAGAWCKDPLQAADKIYFMPWTPYRTDTLIEYASLEDFQNSRQTTTYKLPNRVDGTGFVVYDGAVFFNKERTRNIVKFDLRTRIKSGEAIINYANYHDTSPYRWGGKTDIDLAVDENGLWVIYATEQNNGMIVISQLNPYTLRFEATWETVYDKRAASNAFMICGVLYVVRSVYQDNESETGKNSIDYIYNTRLNRGEYVDVPFPNQYQYIAAVDYNPRDNQLYVWNNNFILRYSLEFGPPDPAQVPTTAVTITSSAELFKTIISTTSTTSQKGPMSTTVAGSQEGSKGTKPPPAVSTTKIPPITNIFPLPERFCEALDSKGIKWPQTQRGMMVERPCPKGTRGTASYLCMISTGTWNPKGPDLSNCTSHWVNQLAQKIRSGENAASLANELAKHTKGPVFAGDVSSSVRLMEQLVDILDAQLQELKPSEKDSAGRSYNKLQKREKTCRAYLKAIVDTVDNLLRPEALESWKHMNSSEQAHTATMLLDTLEEGAFVLADNLLEPTRVSMPTENIVLEVAVLSTEGQIQDFKFPLGIKGAGSSIQLSANTVKQNSRNGLAKLVFIIYRSLGQFLSTENATIKLGADFIGRNSTIAVNSHVISVSINKESSRVYLTDPVLFTLPHIDPDNYFNANCSFWNYSERTMMGYWSTQGCKLVDTNKTRTTCACSHLTNFAILMAHREIAYKDGVHELLLTVITWVGIVISLVCLAICIFTFCFFRGLQSDRNTIHKNLCINLFIAEFIFLIGIDKTKYAIACPIFAGLLHFFFLAAFAWMCLEGVQLYLMLVEVFESEYSRKKYYYVAGYLFPATVVGVSAAIDYKSYGTEKACWLHVDNYFIWSFIGPVTFIILLNIIFLVITLCKMVKHSNTLKPDSSRLENIKSWVLGAFALLCLLGLTWSFGLLFINEETIVMAYLFTIFNAFQGVFIFIFHCALQKKVRKEYGKCFRHSYCCGGLPTESPHSSVKASTTRTSARYSSGTQSRIRRMWNDTVRKQSESSFISGDINSTSTLNQGHSLNNARDTSAMDTLPLNGNFNNSYSLHKGDYNDSVQVVDCGLSLNDTAFEKMIISELVHNNLRGSSKTHNLELTLPVKPVIGGSSSEDDAIVADASSLMHSDNPGLELHHKELEAPLIPQRTHSLLYQPQKKVKSEGTDSYVSQLTAEAEDHLQSPNRDSLYTSMPNLRDSPYPESSPDMEEDLSPSRRSENEDIYYKSMPNLGAGHQLQMCYQISRGNSDGYIIPINKEGCIPEGDVREGQMQLVTSL

SEQ ID NO: 12442 - protein, 1474 aa, Homo sapiens
MVSSGCRMRSLWFIIVISFLPNTEGFSRAALPFGLVRRELSCEGYSIDLRCPGSDVIMIESANYGRTDDKICDADPFQMENTDCYLPDAFKIMTQRCNNRTQCIVVTGSDVFPDPCPGTYKYLEVQYECVPYIFVCPGTLKAIVDSPCIYEAEQKAGAWCKDPLQAADKIYFMPWTPYRTDTLIEYASLEDFQNSRQTTTYKLPNRVDGTGFVVYDGAVFFNKERTRNIVKFDLRTRIKSGEAIINYANYHDTSPYRWGGKTDIDLAVDENGLWVIYATEQNNGMIVISQLNPYTLRFEATWETVYDKRAASNAFMICGVLYVVRSVYQDNESETGKNSIDYIYNTRLNRGEYVDVPFPNQYQYIAAVDYNPRDNQLYVWNNNFILRYSLEFGPPDPAQVPTTAVTITSSAELFKTIISTTSTTSQKGPMSTTVAGSQEGSKGTKPPPAVSTTKIPPITNIFPLPERFCEALDSKGIKWPQTQRGMMVERPCPKGTRGTASYLCMISTGTWNPKGPDLSNCTSHWVNQLAQKIRSGENAASLANELAKHTKGPVFAGDVSSSVRLMEQLVDILDAQLQELKPSEKDSAGRSYNKLQKREKTCRAYLKAIVDTVDNLLRPEALESWKHMNSSEQAHTATMLLDTLEEGAFVLADNLLEPTRVSMPTENIVLEVAVLSTEGQIQDFKFPLGIKGAGSSIQLSANTVKQNSRNGLAKLVFIIYRSLGQFLSTENATIKLGADFIGRNSTIAVNSHVISVSINKESSRVYLTDPVLFTLPHIDPDNYFNANCSFWNYSERTMMGYWSTQGCKLVDTNKTRTTCACSHLTNFAILMAHREIAYKDGVHELLLTVITWVGIVISLVCLAICIFTFCFFRGLQSDRNTIHKNLCINLFIAEFIFLIGIDKTKYAIACPIFAGLLHFFFLAAFAWMCLEGVQLYLMLVEVFESEYSRKKYYYVAGYLFPATVVGVSAAIDYKSYGTEKACWLHVDNYFIWSFIGPVTFIILLNIIFLVITLCKMVKHSNTLKPDSSRLENINNYRVCDGYYNTDLPGSWVLGAFALLCLLGLTWSFGLLFINEETIVMAYLFTIFNAFQGVFIFIFHCALQKKVRKEYGKCFRHSYCCGGLPTESPHSSVKASTTRTSARYSSGTQSRIRRMWNDTVRKQSESSFISGDINSTSTLNQGMTGNYLLTNPLLRPHGTNNPYNTLLAETVVCNAPSAPVFNSPGHSLNNARDTSAMDTLPLNGNFNNSYSLHKGDYNDSVQVVDCGLSLNDTAFEKMIISELVHNNLRGSSKTHNLELTLPVKPVIGGSSSEDDAIVADASSLMHSDNPGLELHHKELEAPLIPQRTHSLLYQPQKKVKSEGTDSYVSQLTAEAEDHLQSPNRDSLYTSMPNLRDSPYPESSPDMEEDLSPSRRSENEDIYYKSMPNLGAGHQLQMCYQISRGNSDGYIIPINKEGCIPEGDVREGQMQLVTSL

SEQ ID NO: 12443 - protein, 1461 aa, Homo sapiens
MVSSGCRMRSLWFIIVISFLPNTEGFSRAALPFGLVRRELSCEGYSIDLRCPGSDVIMIESANYGRTDDKICDADPFQMENTDCYLPDAFKIMTQRCNNRTQCIVVTGSDVFPDPCPGTYKYLEVQYECVPYIFVCPGTLKAIVDSPCIYEAEQKAGAWCKDPLQAADKIYFMPWTPYRTDTLIEYASLEDFQNSRQTTTYKLPNRVDGTGFVVYDGAVFFNKERTRNIVKFDLRTRIKSGEAIINYANYHDTSPYRWGGKTDIDLAVDENGLWVIYATEQNNGMIVISQLNPYTLRFEATWETVYDKRAASNAFMICGVLYVVRSVYQDNESETGKNSIDYIYNTRLNRGEYVDVPFPNQYQYIAAVDYNPRDNQLYVWNNNFILRYSLEFGPPDPAQVPTTAVTITSSAELFKTIISTTSTTSQKGPMSTTVAGSQEGSKGTKPPPAVSTTKIPPITNIFPLPERFCEALDSKGIKWPQTQRGMMVERPCPKGTRGTASYLCMISTGTWNPKGPDLSNCTSHWVNQLAQKIRSGENAASLANELAKHTKGPVFAGDVSSSVRLMEQLVDILDAQLQELKPSEKDSAGRSYNKAIVDTVDNLLRPEALESWKHMNSSEQAHTATMLLDTLEEGAFVLADNLLEPTRVSMPTENIVLEVAVLSTEGQIQDFKFPLGIKGAGSSIQLSANTVKQNSRNGLAKLVFIIYRSLGQFLSTENATIKLGADFIGRNSTIAVNSHVISVSINKESSRVYLTDPVLFTLPHIDPDNYFNANCSFWNYSERTMMGYWSTQGCKLVDTNKTRTTCACSHLTNFAILMAHREIAYKDGVHELLLTVITWVGIVISLVCLAICIFTFCFFRGLQSDRNTIHKNLCINLFIAEFIFLIGIDKTKYAIACPIFAGLLHFFFLAAFAWMCLEGVQLYLMLVEVFESEYSRKKYYYVAGYLFPATVVGVSAAIDYKSYGTEKACWLHVDNYFIWSFIGPVTFIILLNIIFLVITLCKMVKHSNTLKPDSSRLENINNYRVCDGYYNTDLPGSWVLGAFALLCLLGLTWSFGLLFINEETIVMAYLFTIFNAFQGVFIFIFHCALQKKVRKEYGKCFRHSYCCGGLPTESPHSSVKASTTRTSARYSSGTQSRIRRMWNDTVRKQSESSFISGDINSTSTLNQGMTGNYLLTNPLLRPHGTNNPYNTLLAETVVCNAPSAPVFNSPGHSLNNARDTSAMDTLPLNGNFNNSYSLHKGDYNDSVQVVDCGLSLNDTAFEKMIISELVHNNLRGSSKTHNLELTLPVKPVIGGSSSEDDAIVADASSLMHSDNPGLELHHKELEAPLIPQRTHSLLYQPQKKVKSEGTDSYVSQLTAEAEDHLQSPNRDSLYTSMPNLRDSPYPESSPDMEEDLSPSRRSENEDIYYKSMPNLGAGHQLQMCYQISRGNSDGYIIPINKEGCIPEGDVREGQMQLVTSL

SEQ ID NO: 12444 - protein, 1447 aa, Homo sapiens
MWPSQLLIFMMLLAPIIHAFSRAPIPMAVVRRELSCESYPIELRCPGTDVIMIESANYGRTDDKICDSDPAQMENIRCYLPDAYKIMSQRCNNRTQCAVVAGPDVFPDPCPGTYKYLEVQYECVPYKVEQKVFLCPGLLKGVYQSEHLFESDHQSGAWCKDPLQASDKIYYMPWTPYRTDTLTEYSSKDDFIAGRPTTTYKLPHRVDGTGFVVYDGALFFNKERTRNIVKFDLRTRIKSGEAIIANANYHDTSPYRWGGKSDIDLAVDENGLWVIYATEQNNGKIVISQLNPYTLRIEGTWDTAYDKRSASNAFMICGILYVVKSVYEDDDNEATGNKIDYIYNTDQSKDSLVDVPFPNSYQYIAAVDYNPRDNLLYVWNNYHVVKYSLDFGPLDSRSGQAHHGQVSYISPPIHLDSELERPSVKDISTTGPLGMGSTTTSTTLRTTTLSPGRSTTPSVSGRRNRSTSTPSPAVEVLDDMTTHLPSASSQIPALEESCEAVEAREIMWFKTRQGQIAKQPCPAGTIGVSTYLCLAPDGIWDPQGPDLSNCSSPWVNHITQKLKSGETAANIARELAEQTRNHLNAGDITYSVRAMDQLVGLLDVQLRNLTPGGKDSAARSLNKAMVETVNNLLQPQALNAWRDLTTSDQLRAATMLLHTVEESAFVLADNLLKTDIVRENTDNIKLEVARLSTEGNLEDLKFPENMGHGSTIQLSANTLKQNGRNGEIRVAFVLYNNLGPYLSTENASMKLGTEALSTNHSVIVNSPVITAAINKEFSNKVYLADPVVFTVKHIKQSEENFNPNCSFWSYSKRTMTGYWSTQGCRLLTTNKTHTTCSCNHLTNFAVLMAHVEVKHSDAVHDLLLDVITWVGILLSLVCLLICIFTFCFFRGLQSDRNTIHKNLCISLFVAELLFLIGINRTDQPIACAVFAALLHFFFLAAFTWMFLEGVQLYIMLVEVFESEHSRRKYFYLVGYGMPALIVAVSAAVDYRSYGTDKVCWLRLDTYFIWSFIGPATLIIMLNVIFLGIALYKMFHHTAILKPESGCLDNIKSWVIGAIALLCLLGLTWAFGLMYINESTVIMAYLFTIFNSLQGMFIFIFHCVLQKKVRKEYGKCLRTHCCSGKSTESSIGSGKTSGSRTPGRYSTGSQSRIRRMWNDTVRKQSESSFITGDINSSASLNREGLLNNARDTSVMDTLPLNGNHGNSYSIASGEYLSNCVQIIDRGYNHNETALEKKILKELTSNYIPSYLNNHERSSEQNRNLMNKLVNNLGSGREDDAIVLDDATSFNHEESLGLELIHEESDAPLLPPRVYSTENHQPHHYTRRRIPQDHSESFFPLLTNEHTEDLQSPHRDSLYTSMPTLAGVAATESVTTSTQTEPPPAKCGDAEDVYYKSMPNLGSRNHVHQLHTYYQLGRGSSDGFIVPPNKDGTPPEGSSKGPAHLVTSL

SEQ ID NO: 12445 - protein, 1240 aa, Homo sapiens
MWPSQLLIFMMLLAPIIHAFSRAPIPMAVVRRELSCESYPIELRCPGTDVIMIESANYGRTDDKICDSDPAQMENIRCYLPDAYKIMSQRCNNRTQCAVVAGPDVFPDPCPGTYKYLEVQYECVPYKVEQKVFLCPGLLKGVYQSEHLFESDHQSGAWCKDPLQASDKIYYMPWTPYRTDTLTEYSSKDDFIAGRPTTTYKLPHRVDGTGFVVYDGALFFNKERTRNIVKFDLRTRIKSGEAIIANANYHDTSPYRWGGKSDIDLAVDENGLWVIYATEQNNGKIVISQLNPYTLRIEGTWDTAYDKRSASNAFMICGILYVVKSVYEDDDNEATGNKIDYIYNTDQSKDSLVDVPFPNSYQYIAAVDYNPRDNLLYVWNNYHVVKYSLDFGPLDSRSGQAHHGQVSYISPPIHLDSELERPSVKDISTTGPLGMGSTTTSTTLRTTTLSPGRSTTPSVSGRRNRSTSTPSPAVEVLDDMTTHLPSASSQIPALEESCEAVEAREIMWFKTRQGQIAKQPCPAGTIGVSTYLCLAPDGIWDPQGPDLSNCSSPWVNHITQKLKSGETAANIARELAEQTRNHLNAGDITYSVRAMDQLVGLLDVQLRNLTPGGKDSAARSLNKLQKRERSCRAYVQAMVETVNNLLQPQALNAWRDLTTSDQLRAATMLLHTVEESAFVLADNLLKTDIVRENTDNIKLEVARLSTEGNLEDLKFPENMGHGSTIQLSANTLKQNGRNGEIRVAFVLYNNLGPYLSTENASMKLGTEALSTNHSVIVNSPVITAAINKEFSNKVYLADPVVFTVKHIKQSEENFNPNCSFWSYSKRTMTGYWSTQGCRLLTTNKTHTTCSCNHLTNFAVLMAHVEVKHSDAVHDLLLDVITWVGILLSLVCLLICIFTFCFFRGLQSDRNTIHKNLCISLFVAELLFLIGINRTDQPIACAVFAALLHFFFLAAFTWMFLEGVQLYIMLVEVFESEHSRRKYFYLVGYGMPALIVAVSAAVDYRSYGTDKVCWLRLDTYFIWSFIGPATLIIMLNVIFLGIALYKMFHHTAILKPESGCLDNINYEDNRPFIKSWVIGAIALLCLLGLTWAFGLMYINESTVIMAYLFTIFNSLQGMFIFIFHCVLQKKVRKEYGKCLRTHCCSGKSTESSIGSGKTSGSRTPGRYSTGSQSRIRRMWNDTVRKQSESSFITGDINSSASLNREPYRETSMGVKLNIAYQIGASEQCQGYKCHGYSTTEW

SEQ ID NO: 12446 - protein, 707 aa, Homo sapiens
MWPSQLLIFMMLLAPIIHAFSRAPIPMAVVRRELSCESYPIELRCPGTDVIMIESANYGRTDDKICDSDPAQMENIRCYLPDAYKIMSQRCNNRTQCAVVAGPDVFPDPCPGTYKYLEVQYECVPYKVEQKVFLCPGLLKGVYQSEHLFESDHQSGAWCKDPLQASDKIYYMPWTPYRTDTLTEYSSKDDFIAGRPTTTYKLPHRVDGTGFVVYDGALFFNKERTRNIVKFDLRTRIKSGEAIIANANYHDTSPYRWGGKSDIDLAVDENGLWVIYATEQNNGKIVISQLNPYTLRIEGTWDTAYDKRSASNAFMICGILYVVKSVYEDDDNEATGNKIDYIYNTDQSKDSLVDVPFPNSYQYIAAVDYNPRDNLLYVWNNYHVVKYSLDFGPLDSRSGQAHHGQVSYISPPIHLDSELERPSVKDISTTGPLGMGSTTTSTTLRTTTLSPGRSTTPSVSGRRNRSTSTPSPAVEVLDDMTTHLPSASSQIPALEESCEAVEAREIMWFKTRQGQIAKQPCPAGTIGVSTYLCLAPDGIWDPQGPDLSNCSSPWVNHITQKLKSGETAANIARELAEQTRNHLNAGDITYSVRAMDQLVGLLDVQLRNLTPGGKDSAARSLNKAMVETVNNLLQPQALNAWRDLTTSDQLRAATMLLHTVEESAFVLVLQVCLPVREQSFLPFFSFFIFFFSFLPFIPLKFRLAKNK

SEQ ID NO: 12447 - protein, 1469 aa, Homo sapiens
MWPSQLLIFMMLLAPIIHAFSRAPIPMAVVRRELSCESYPIELRCPGTDVIMIESANYGRTDDKICDSDPAQMENIRCYLPDAYKIMSQRCNNRTQCAVVAGPDVFPDPCPGTYKYLEVQYECVPYKVEQKVFLCPGLLKGVYQSEHLFESDHQSGAWCKDPLQASDKIYYMPWTPYRTDTLTEYSSKDDFIAGRPTTTYKLPHRVDGTGFVVYDGALFFNKERTRNIVKFDLRTRIKSGEAIIANANYHDTSPYRWGGKSDIDLAVDENGLWVIYATEQNNGKIVISQLNPYTLRIEGTWDTAYDKRSASNAFMICGILYVVKSVYEDDDNEATGNKIDYIYNTDQSKDSLVDVPFPNSYQYIAAVDYNPRDNLLYVWNNYHVVKYSLDFGPLDSRSGQAHHGQVSYISPPIHLDSELERPSVKDISTTGPLGMGSTTTSTTLRTTTLSPGRSTTPSVSGRRNRSTSTPSPAVEVLDDMTTHLPSASSQIPALEESCEAVEAREIMWFKTRQGQIAKQPCPAGTIGVSTYLCLAPDGIWDPQGPDLSNCSSPWVNHITQKLKSGETAANIARELAEQTRNHLNAGDITYSVRAMDQLVGLLDVQLRNLTPGGKDSAARSLNKLQKRERSCRAYVQAMVETVNNLLQPQALNAWRDLTTSDQLRAATMLLHTVEESAFVLADNLLKTDIVRENTDNIKLEVARLSTEGNLEDLKFPENMGHGSTIQLSANTLKQNGRNGEIRVAFVLYNNLGPYLSTENASMKLGTEALSTNHSVIVNSPVITAAINKEFSNKVYLADPVVFTVKHIKQSEENFNPNCSFWSYSKRTMTGYWSTQGCRLLTTNKTHTTCSCNHLTNFAVLMAHVEVKHSDAVHDLLLDVITWVGILLSLVCLLICIFTFCFFRGLQSDRNTIHKNLCISLFVAELLFLIGINRTDQPIACAVFAALLHFFFLAAFTWMFLEGVQLYIMLVEVFESEHSRRKYFYLVGYGMPALIVAVSAAVDYRSYGTDKVCWLRLDTYFIWSFIGPATLIIMLNVIFLGIALYKMFHHTAILKPESGCLDNINYEDNRPFIKSWVIGAIALLCLLGLTWAFGLMYINESTVIMAYLFTIFNSLQGMFIFIFHCVLQKKVRKEYGKCLRTHCCSGKSTESSIGSGKTSGSRTPGRYSTGSQSRIRRMWNDTVRKQSESSFITGDINSSASLNREGLLNNARDTSVMDTLPLNGNHGNSYSIASGEYLSNCVQIIDRGYNHNETALEKKILKELTSNYIPSYLNNHERSSEQNRNLMNKLVNNLGSGREDDAIVLDDATSFNHEESLGLELIHEESDAPLLPPRVYSTENHQPHHYTRRRIPQDHSESFFPLLTNEHTEDLQSPHRDSLYTSMPTLAGVAATESVTTSTQTEPPPAKCGDAEDVYYKSMPNLGSRNHVHQLHTYYQLGRGSSDGFIVPPNKDGTPPEGSSKGPAHLVTSL

SEQ ID NO: 12448 - protein, 487 aa, Homo sapiens
MAGTNALLMLENFIDGKFLPCSSYIDSYDPSTGEVYCRVPNSGKDEIEAAVKAAREAFPSWSSRSPQERSRVLNQVADLLEQSLEEFAQAESKDQGKTLALARTMDIPRSVQNFRFFASSSLHHTSECTQMDHLGCMHYTVRAPVGVAGLISPWNLPLYLLTWKIAPAMAAGNTVIAKPSELTSVTAWMLCKLLDKAGVPPGVVNIVFGTGPRVGEALVSHPEVPLISFTGSQPTAERITQLSAPHCKKLSLELGGKNPAIIFEDANLDECIPATVRSSFANQGEICLCTSRIFVQKSIYSEFLKRFVEATRKWKVGIPSDPLVSIGALISKAHLEKVRSYVKRALAEGAQIWCGEGVDKLSLPARNQAGYFMLPTVITDIKDESCCMTEEIFGPVTCVVPFDSEEEVIERANNVKYGLAATVWSSNVGRVHRVAKKLQSGLVWTNCWLIRELNLPFGGMKSSGIGREGAKDSYDFFTEIKTITVKH

SEQ ID NO: 12449 - protein, 433 aa, Homo sapiens
MAGTNALLMLENFIDGKFLPCSSYIDSYDPSTGEVYCRVPNSGKDEIEAAVKAAREAFPSWSSRSPQERSRVLNQVADLLEQSLEEFAQAESKDQGKTLALARTMDIPRSVQNFRFFASSSLHHTSECTQMDHLGCMHYTVRAPVGVAGLISPWNLPLYLLTWKIAPAMAAGNTVIAKPSELTSVTAWMLCKLLDKAGVPPGVVNIVFGTGPRVGEALVSHPEVPLISFTGSQPTAERITQLSAPHCKKLSLELGGKNPAIIFEDANLDECIPATVRSSFANQVRSYVKRALAEGAQIWCGEGVDKLSLPARNQAGYFMLPTVITDIKDESCCMTEEIFGPVTCVVPFDSEEEVIERANNVKYGLAATVWSSNVGRVHRVAKKLQSGLVWTNCWLIRELNLPFGGMKSSGIGREGAKDSYDFFTEIKTITVKH

SEQ ID NO: 12450 - protein, 160 aa, Homo sapiens
MAGTNALLMLENFIDGKFLPCSSYIDSYDPSTGEVYCRVPNSGKDEIEAAVKAAREAFPSWSSRSPQERSRVLNQVADLLEQSLEEFAQAESKDQGKTLALARTMDIPRSVQNFRFFASSSLHHTSECTQMDHLGCMHYTVRAPVGVVPGYTCRTCRFVT

SEQ ID NO: 12451 - protein, 437 aa, Homo sapiens
MAGTNALLMLENFIDGKFLPCSSYIDSYDPSTGEVYCRVPNSGKDEIEAAVKAAREAFPSWSSRSPQERSRVLNQVADLLEQSLEEFAQAESKDQGKTLALARTMDIPRSVQNFRFFASSSLHHTSECTQMDHLGCMHYTVRAPVGVGVPPGVVNIVFGTGPRVGEALVSHPEVPLISFTGSQPTAERITQLSAPHCKKLSLELGGKNPAIIFEDANLDECIPATVRSSFANQGEICLCTSRIFVQKSIYSEFLKRFVEATRKWKVGIPSDPLVSIGALISKAHLEKVRSYVKRALAEGAQIWCGEGVDKLSLPARNQAGYFMLPTVITDIKDESCCMTEEIFGPVTCVVPFDSEEEVIERANNVKYGLAATVWSSNVGRVHRVAKKLQSGLVWTNCWLIRELNLPFGGMKSSGIGREGAKDSYDFFTEIKTITVKH

SEQ ID NO: 12452 - protein, 323 aa, Homo sapiens
MDPKYQRVELNDGHFMPVLGFGTYAPPEVPRNRAVEVTKLAIEAGFRHIDSAYLYNNEEQVGLAIRSKIADGSVKREDIFYTSKLWCTFFQPQMVQPALESSLKKLQLDYVDLYLLHFPMALKPGETPLPKDENGKVIFDTVDLSATWEVMEKCKDAGLAKSIGVSNFNCRQLEMILNKPGLKYKPVCNQVECHPYLNQSKLLDFCKSKDIVLVAHSALGTQRHKLWVDPNSPVLLEDPVLCALAKKHKQTPALIALRYQLQRGVVVLAKSYNEQRIRENIQVFEFQLTSEDMKVLDGLNRNYRYVVMDFLMDHPDYPFSDEY

SEQ ID NO: 12453 - protein, 197 aa, Homo sapiens
MSETQNSTSQKAMDEDNKAASQTMPNTQDKNYEDELTQVALALVEDVINYAVKIVEEERNPLKNIKWMTHGEFTVEKGLKQIDEYFSKCVSKKCWAHGVEFVERKDLIHSFLYIYYVHWSISTADLPVARISAGTYFTMKVSKTKPPDAPIVVSYVGDHQALVHRPGMVRFRENWQKNLTDAKYSFMESFPFLFNRV

SEQ ID NO: 12454 - protein, 137 aa, Homo sapiens
MSETQNSTSQKAMDEDNKAASQTMPNTQDKNYEDELTQVALALVEDVINYAVKIVEEERNPLKNIKWMTHGEFTVEKGLKQIDEYFSDAPIVVSYVGDHQALVHRPGMVRFRENWQKNLTDAKYSFMESFPFLFNRV

SEQ ID NO: 12455 - protein, 89 aa, Homo sapiens
MSETQNSTSQKAMDEDNKAASQTMPNTQDKNYEDELTQVALALVEDVINYAVKIVEEERNPLKNIKWMTHGEFTVEKGLKQIDEYFSVS

SEQ ID NO: 12456 - protein, 853 aa, Homo sapiens
MSEKVDWLQSQNGVCKVDVYSPGDNQAQDWKMDTSTDPVRVLSWLRRDLEKSTAEFQDVRFKPGESFGGETSNSGDPHKGFSVDYYNTTTKGTPERLHFEMTHKEIPCQGPRAQLGNGSSVDEVSFYANRLTNLVIAMARKEINEKIDGSENKCVYQSLYMGNEPTPTKSLSKIASELVNETVSACSRNAAPDKAPGSGDRVSGSSQSPPNLKYKSTLKIKESTKERQGPDDKPPSKKSFFYKEVFESRNGDYAREGGRFFPRERKRFRGQERPDDFTASVSEGIMTYANSVVSDMMVSIMKTLKIQVKDTTIATILLKKVLLKHAKEVVSDLIDSFLRNLHSVTGTLMTDTQFVSAVKRTVFSHGSQKATDIMDAMLRKLYNVMFAKKVPEHVRKAQDKAESYSLISMKGMGDPKNRNVNFAMKSETKLREKMYSEPKSEEETCAKTLGEHIIKEGLTLWHKTQQKECKSLGFQHAAFEAPNTQRKPASDISFEYPEDIGNLSLPPYPPEKPENFMYDSDSWAEDLIVSALLLIQYHLAQGGRRDARSFVEAAGTTNFPANEPPVAPDESCLKSAPIVGDQEQAEKKDLRSVFFNFIRNLLSETIFKRDQSPEPKVPEQPVKEDRKLCERPLASSPPRLYEDDETPGALSGLTKMAVSQIDGHMSGQMVEHLMNSVMKLCVIIAKSCDASLAELGDDKSGDASRLTSAFPDSLYECLPAKGTGSAEAVLQNAYQAIHNEMRGTSGQPPEGCAAPTVIVSNHNLTDTVQNKQLQAVLQWVAASELNVPILYFAGDDEGIQEKLLQLSAAAVDKGCSVGEVLQSVLRYEKERQLNEAVGNVTPLQLLDWLMVNL

SEQ ID NO: 12457 - protein, 662 aa, Homo sapiens
MRGAGPSPRQSPRTLRPDPGPAMSFFRRKVKGKEQEKTSDVKSIKASISVHSPQKSTKNHALLEAAGPSHVAINAISANMDSFSSSRTATLKKQPSHMEAAHFGDLGRSCLDYQTQETKSSLSKTLEQVLHDTIVLPYFIQFMELRRMEHLVKFWLEAESFHSTTWSRIRAHSLNTVKQSSLAEPVSPSKKHETTASFLTDSLDKRLEDSGSAQLFMTHSEGIDLNNRTNSTQNHLLLSQECDSAHSLRLEMARAGTHQVSMETQESSSTLTVASRNSPASPLKELSGKLMKSIEQDAVNTFTKYISPDAAKPIPITEAMRNDIIARICGEDGQVDPNCFVLAQSIVFSAMEQEHFSEFLRSHHFCKYQIEVLTSGTVYLADILFCESALFYFSEYMEKEDAVNILQFWLAADNFQSQLAAKKGQYDGQEAQNDAMILYDKYFSLQATHPLGFDDVVRLEIESNICREGGPLPNCFTTPLRQAWTTMEKVFLPGFLSSNLYYKYLNDLIHSVRGDEFLGGNVSLTAPGSVGPPDESHPGSSDSSASQSSVKKASIKILKNFDEAIIVDAASLDPESLYQRTYAGKMTFGRVSDLGQFIRESEPEPDVRKSKGSMFSQAMKKWVQGNTDEAQEELAWKIAKMIVSDIMQQAQYDQPLEKSTKL

SEQ ID NO: 12458 - protein, 2319 aa, Homo sapiens
MLTMSVTLSPLRSQDLDPMATDASPMAINMTPTVEQGEGEEAMKDMDSDQQYEKPPPLHTGADWKIVLHLPEIETWLRMTSERVRDLTYSVQQDSDSKHVDVHLVQLKDICEDISDHVEQIHALLETEFSLKLLSYSVNVIVDIHAVQLLWHQLRVSVLVLRERILQGLQDANGNYTRQTDILQAFSEETKEGRLDSLTEVDDSGQLTIKCSQNYLSLDCGITAFELSDYSPSEDLLSGLGDMTSSQVKTKPFDSWSYSEMEKEFPELIRSVGLLTVAADSISTNGSEAVTEEVSQVSLSVDDKGGCEEDNASAVEEQPGLTLGVSSSSGEALTNAAQPSSETVQQESSSSSHHDAKNQQPVPCENATPKRTIRDCFNYNEDSPTQPTLPKRGLFLKEETFKNDLKGNGGKRQMVDLKPEMSRSTPSLVDPPDRSKLCLVLQSSYPNSPSAASQSYECLHKVGNGNLENTVKFHIKEISSSLGRLNDCYKEKSRLKKPHKTSEEVPPCRTPKRGTGSGKQAKNTKSSAVPNGELSYTSKAIEGPQTNSASTSSLEPCNQRSWNAKLQLQSETSSSPAFTQSSESSVGSDNIMSPVPLLSKHKSKKGQASSPSHVTRNGEVVEAWYGSDEYLALPSHLKQTEVLALKLENLTKLLPQKPRGETIQNIDDWELSEMNSDSEIYPTYHVKKKHTRLGRVSPSSSSDIASSLGESIESGPLSDILSDEESSMPLAGMKKYADEKSERASSSEKNESHSATKSALIQKLMQDIQHQDNYEAIWEKIEGFVNKLDEFIQWLNEAMETTENWTPPKAEMDDLKLYLETHLSFKLNVDSHCALKEAVEEEGHQLLELIASHKAGLKDMLRMIASQWKELQRQIKRQHSWILRALDTIKAEILATDVSVEDEEGTGSPKAEVQLCYLEAQRDAVEQMSLKLYSEQYTSSSKRKEEFADMSKVHSVGSNGLLDFDSEYQELWDWLIDMESLVMDSHDLMMSEEQQQHLYKRYSVEMSIRHLKKTELLSKVEALKKGGVLLPNDLLEKVDSINEKWELLGKTLGEKIQDTMAGHSGSSPRDLLSPESGSLVRQLEVRIKELKGWLRDTELFIFNSCLRQEKEGTMNTEKQLQYFKSLCREIKQRRRGVASILRLCQHLLDDRETCNLNADHQPMQLIIVNLERRWEAIVMQAVQWQTRLQKKMGKESETLNVIDPGLMDLNGMSEDALEWDEMDISNKLISLNEESNDLDQELQPVIPSLKLGETSNEDPGYDEEADNHGGSQYASNITAPSSPHIYQVYSLHNVELYEDNHMPFLKNNPKVTGMTQPNVLTKSLSKDSSFSSTKSLPDLLGGSNLVKPCACHGGDMSQNSGSESGIVSEGDTETTTNSEMCLLNAVDGSPSNLETEHLDPQMGDAVNVLKQKFTDEGESIKLPNSSQSSISPVGCVNGKVGDLNSITKHTPDCLGEELQGKHDVFTFYDYSYLQGSKLKLPMIMKQSQSEKAHVEDPLLRGFYFDKKSCKSKHQTTELQPDVPPHERILASASHEMDRISYKSGNIEKTFTGMQNAKQLSLLSHSSSIESLSPGGDLFGLGIFKNGSDSLQRSTSLESWLTSYKSNEDLFSCHSSGDISVSSGSVGELSKRTLDLLNRLENIQSPSEQKIKRSVSDITLQSSSQKMSFTGQMSLDIASSINEDSAASLTELSSSDELSLCSEDIVLHKNKIPESNASFRKRLTRSVADESDVNVSMIVNVSCTSACTDDEDDSDLLSSSTLTLTEEELCIKDEDDDSSIATDDEIYEDCTLMSGLDYIKNELQTWIRPKLSLTRDKKRCNVSDEMKGSKDISSSEMTNPSDTLNIETLLNGSVKRVSENNGNGKNSSHTHELGTKRENKKTIFKVNKDPYVADMENGNIEGIPERQKGKPNVTSKVSENLGSHGKEISESEHCKCKALMDSLDDSNTAGKEFVSQDVRHLPKKCPNHHHFENQSTASTPTEKSFSELALETRFNNRQDSDALKSSDDAPSMAGKSAGCCLALEQNGTEENASISNISCCNCEPDVFHQKDAEDCSVHNFVKEIIDMASTALKSKSQPENEVAAPTSLTQIKEKVLEHSHRPIQLRKGDFYSYLSLSSHDSDCGEVTNYIEEKSSTPLPLDTTDSGLDDKEDIECFFEACVEGDSDGEEPCFSSAPPNESAVPSEAAMPLQATACSSEFSDSSLSADDADTVALSSPSSQERAEVGKEVNGLPQTSSGCAENLEFTPSKLDSEKESSGKPGESGMPEEHNAASAKSKVQDLSLKANQPTDKAALHPSPKTLTCEENLLNLHEKRHRNMHR

SEQ ID NO: 12459 - protein, 1075 aa, Homo sapiens
MLTMSVTLSPLRSQDLDPMATDASPMAINMTPTVEQGEGEEAMKDMDSDQQYEKPPPLHTGADWKIVLHLPEIETWLRMTSERVRDLTYSVQQDSDSKHVDVHLVQLKDICEDISDHVEQIHALLETEFSLKLLSYSVNVIVDIHAVQLLWHQLRVSVLVLRERILQGLQDANGNYTRQTDILQAFSEETKEGRLDSLTEVDDSGQLTIKCSQNYLSLDCGITAFELSDYSPSEDLLSGLGDMTSSQVKTKPFDSWSYSEMEKEFPELIRSVGLLTVAADSISTNGSEAVTEEVSQVSLSVDDKGGCEEDNASAVEEQPGLTLGVSSSSGEALTNAAQPSSETVQQESSSSSHHDAKNQQPVPCENATPKRTIRDCFNYNEDSPTQPTLPKRGLFLKEETFKNDLKGNGGKRQMVDLKPEMSRSTPSLVDPPDRSKLCLVLQSSYPNSPSAASQSYECLHKVGNGNLENTVKFHIKEISSSLGRLNDCYKEKSRLKKPHKTSEEVPPCRTPKRGTGSGKQAKNTKSSAVPNGELSYTSKAIEGPQTNSASTSSLEPCNQRSWNAKLQLQSETSSSPAFTQSSESSVGSDNIMSPVPLLSKHKSKKGQASSPSHVTRNGEVVEAWYGSDEYLALPSHLKQTEVLALKLENLTKLLPQKPRGETIQNIDDWELSEMNSDSEIYPTYHVKKKHTRLGRVSPSSSSDIASSLGESIESGPLSDILSDEESSMPLAGMKKYADEKSERASSSEKNESHSATKSALIQKLMQDIQHQDNYEAIWEKIEGFVNKLDEFIQWLNEAMETTENWTPPKAEMDDLKLYLETHLSFKLNVDSHCALKEAVEEEGHQLLELIASHKAGLKDMLRMIASQWKELQRQIKRQHSWILRALDTIKAEILATDVSVEDEEGTGSPKAEVQLCYLEAQRDAVEQMSLKLYSEQYTSSSKRKEEFADMSKVHSVGSNGLLDFDSEYQELWDWLIDMESLVMDSHDLMMSEEQQQHLYKRYSVEMSIRHLKKTELLSKVEALKKGGVLLPNDLLEKVDSINEKWELLGVFAFLLLFVGYVYIFCVVKYSVRFLI

SEQ ID NO: 12460 - protein, 1251 aa, Homo sapiens
MELSDVRCLTGSEELYTIHPTPPAGDGRSASRPQRLLWQTAVRHITEQRFIHGHRGGSGSGSGGSGKASDPAGGGPNHHAPQLSGDSALPLYSLGPGERAHSTCGTKVFPERSGSGSASGSGGGGDLGFLHLDCAPSNSDFFLNGGYSYRGVIFPTLRNSFKSRDLERLYQRYFLGQRRKSEVVMNVLDVLTKLTLLVLHLSLASAPMDPLKGILLGFFTGIEVVICALVVVRKDTTSHTYLQYSGVVTWVAMTTQILAAGLGYGLLGDGIGYVLFTLFATYSMLPLPLTWAILAGLGTSLLQVILQVVIPRLAVISINQVVAQAVLFMCMNTAGIFISYLSDRAQRQAFLETRRCVEARLRLETENQRQERLVLSVLPRFVVLEMINDMTNVEDEHLQHQFHRIYIHRYENVSILFADVKGFTNLSTTLSAQELVRMLNELFARFDRLAHEHHCLRIKILGDCYYCVSGLPEPRQDHAHCCVEMGLSMIKTIRYVRSRTKHDVDMRIGIHSGSVLCGVLGLRKWQFDVWSWDVDIANKLESGGIPGRIHISKATLDCLNGDYNVEEGHGKERNEFLRKHNIETYLIKQPEDSLLSLPEDIVKESVSSSDRRNSGATFTEGSWSPELPFDNIVGKQNTLAALTRNSINLLPNHLAQALHVQSGPEEINKRIEHTIDLRSGDKLRREHIKPFSLMFKDSSLEHKYSQMRDEVFKSNLVCAFIVLLFITAIQSLLPSSRVMPMTIQFSILIMLHSALVLITTAEDYKCLPLILRKTCCWINETYLARNVIIFASILINFLGAILNILWCDFDKSIPLKNLTFNSSAVFTDICSYPEYFVFTGVLAMVTCAVFLRLNSVLKLAVLLIMIAIYALLTETVYAGLFLRYDNLNHSGEDFLGTKEVSLLLMAMFLLAVFYHGQQLEYTARLDFLWRVQAKEEINEMKELREHNENMLRNILPSHVARHFLEKDRDNEELYSQSYDAVGVMFASIPGFADFYSQTEMNNQGVECLRLLNEIIADFDELLGEDRFQDIEKIKTIGSTYMAVSGLSPEKQQCEDKWGHLCALADFSLALTESIQEINKHSFNNFELRIGISHGSVVAGVIGAKKPQYDIWGKTVNLASRMDSTGVSGRIQVPEETYLILKDQGFAFDYRGEIYVKGISEQEGKIKTYFLLGRVQPNPFILPPRRLPGQYSLAAVVLGLVQSLNRQRQKQLLNENNNTGIIKGHYNRRTLLSPSGTEPGAQAEGTDKSDLP

SEQ ID NO: 12461 - protein, 1050 aa, Homo sapiens
MAAVKKEGGALSEAMSLEGDEWELSKENVQPLRQGRIMSTLQGALAQESACNNTLQQQKRAFEYEIRFYTGNDPLDVWDRYISWTEQNYPQGGKESNMSTLLERAVEALQGEKRYYSDPRFLNLWLKLGRLCNEPLDMYSYLHNQGIGVSLAQFYISWAEEYEARENFRKADAIFQEGIQQKAEPLERLQSQHRQFQARVSRQTLLALEKEEEEEVFESSVPQRSTLAELKSKGKKTARAPIIRVGGALKAPSQNRGLQNPFPQQMQNNSRITVFDENADEASTAELSKPTVQPWIAPPMPRAKENELQAGPWNTGRSLEHRPRGNTASLIAVPAVLPSFTPYVEETARQPVMTPCKIEPSINHILSTRKPGKEEGDPLQRVQSHQQASEEKKEKMMYCKEKIYAGVGEFSFEEIRAEVFRKKLKEQREAELLTSAEKRAEMQKQIEEMEKKLKEIQTTQQERTGDQQEETMPTKETTKLQIASESQKIPGMTLSSSVCQVNCCARETSLAENIWQEQPHSKGPSVPFSIFDEFLLSEKKNKSPPADPPRVLAQRRPLAVLKTSESITSNEDVSPDVCDEFTGIEPLSEDAIITGFRNVTICPNPEDTCDFARAARFVSTPFHEIMSLKDLPSDPERLLPEEDLDVKTSEDQQTACGTIYSQTLSIKKLSPIIEDSREATHSSGFSGSSASVASTSSIKCLQIPEKLELTNETSENPTQSPWCSQYRRQLLKSLPELSASAELCIEDRPMPKLEIEKEIELGNEDYCIKREYLICEDYKLFWVAPRNSAELTVIKVSSQPVPWDFYINLKLKERLNEDFDHFCSCYQYQDGCIVWHQYINCFTLQDLLQHSEYITHEITVLIIYNLLTIVEMLHKAEIVHGDLSPRCLILRNRIHDPYDCNKNNQALKIVDFSYSVDLRVQLDVFTLSGFRTVQILEGQKILANCSSPYQVDLFGIADLAHLLLFKEHLQVFWDGSFWKLSQNISELKDGELWNKFFVRILNANDEATVSVLGELAAEMNGVFDTTFQSHLNKALWKVGKLTSPGALLFQ

SEQ ID NO: 12462 - protein, 933 aa, Homo sapiens
MAAVKKEGGALSEAMSLEGDEWELSKENVQPLRQGRIMSTLQGALAQESACNNTLQQQKRAFEYEIRFYTGNDPLDVWDRYISWTEQNYPQGGKESNMSTLLERAVEALQGENFRKADAIFQEGIQQKAEPLERLQSQHRQFQARVSRQTLLALEKEEEEEVFESSVPQRSTLAELKSKGKKTARAPIIRVGGALKAPSQNRGLQNPFPQQMQNNSRITVFDENADEASTAELSKPTVQPWIAPPMPRAKENELQAGPWNTGRSLEHRPRGNTASLIAVPAVLPSFTPYVEETARQPVMTPCKIEPSINHILSTRKPGKEEGDPLQRVQSHQQASEEKKEKMMYCKEKIYAGVGEFSFEEIRAEVFRKKLKEQREAELLTSAEKRAEMQKQIEEMEKKLKEIQTTQQERTGDQQEETMPTKETTKLQIASESQKIPGMTLSSSVCQVNCCARETSLAENIWQEQPHSKVSLSLGPSVPFSIFDEFLLSEKKNKSPPADPPRVLAQRRPLAVLKTSESITSNEDVSPDVCDEFTGIEPLSEDAIITGFRNVTICPNPEDSREATHSSGFSGSSASVASTSSIKCLQIPEKLELTNETSENPTQSPWCSQYRRQLLKSLPELSASAELCIEDRPMPKLEIEKEIELGNEDYCIKREYLICEDYKLFWVAPRNSAELTVIKVSSQPVPWDFYINLKLKERLNEDFDHFCSCYQYQDGCIVWHQYINCFTLQDLLQHSEYITHEITVLIIYNLLTIVEMLHKAEIVHGDLSPRCLILRNRIHDPYDCNKNNQALKIVDFSYSVDLRVQLDVFTLSGFRTVQILEGQKILANCSSPYQVDLFGIADLAHLLLFKEHLQVFWDGSFWKLSQNISELKDGELWNKFFVRILNANDEATVSVLGELAAEMNGVFDTTFQSHLNKALWKVGKLTSPGALLFQ

SEQ ID NO: 12463 - protein, 1064 aa, Homo sapiens
MAAVKKEGGALSEAMSLEGDEWELSKENVQPLRQGRIMSTLQGALAQESACNNTLQQQKRAFEYEIRFYTGNDPLDVWDRWVFLFHKDNRNINRYISWTEQNYPQGGKESNMSTLLERAVEALQGEKRYYSDPRFLNLWLKLGRLCNEPLDMYSYLHNQGIGVSLAQFYISWAEEYEARENFRKADAIFQEGIQQKAEPLERLQSQHRQFQARVSRQTLLALEKEEEEEVFESSVPQRSTLAELKSKGKKTARAPIIRVGGALKAPSQNRGLQNPFPQQMQNNSRITVFDENADEASTAELSKPTVQPWIAPPMPRAKENELQAGPWNTGRSLEHRPRGNTASLIAVPAVLPSFTPYVEETARQPVMTPCKIEPSINHILSTRKPGKEEGDPLQRVQSHQQASEEKKEKMMYCKEKIYAGVGEFSFEEIRAEVFRKKLKEQREAELLTSAEKRAEMQKQIEEMEKKLKEIQTTQQERTGDQQEETMPTKETTKLQIASESQKIPGMTLSSSVCQVNCCARETSLAENIWQEQPHSKGPSVPFSIFDEFLLSEKKNKSPPADPPRVLAQRRPLAVLKTSESITSNEDVSPDVCDEFTGIEPLSEDAIITGFRNVTICPNPEDTCDFARAARFVSTPFHEIMSLKDLPSDPERLLPEEDLDVKTSEDQQTACGTIYSQTLSIKKLSPIIEDSREATHSSGFSGSSASVASTSSIKCLQIPEKLELTNETSENPTQSPWCSQYRRQLLKSLPELSASAELCIEDRPMPKLEIEKEIELGNEDYCIKREYLICEDYKLFWVAPRNSAELTVIKVSSQPVPWDFYINLKLKERLNEDFDHFCSCYQYQDGCIVWHQYINCFTLQDLLQHSEYITHEITVLIIYNLLTIVEMLHKAEIVHGDLSPRCLILRNRIHDPYDCNKNNQALKIVDFSYSVDLRVQLDVFTLSGFRTVQILEGQKILANCSSPYQVDLFGIADLAHLLLFKEHLQVFWDGSFWKLSQNISELKDGELWNKFFVRILNANDEATVSVLGELAAEMNGVFDTTFQSHLNKALWKVGKLTSPGALLFQ

SEQ ID NO: 12464 - protein, 450 aa, Homo sapiens
MAADQRPKADTLALRQRLISSSCRLFFPEDPVKIVRAQGQYMYDEQGAEYIDCISNVAHVGHCHPLVVQAAHEQNQVLNTNSRYLHDNIVDYAQRLSETLPEQLCVFYFLNSGSEANDLALRLARHYTGHQDVVVLDHAYHGHLSSLIDISPYKFRNLDGQKEWVHVAPLPDTYRGPYREDHPNPAMAYANEVKRVVSSAQEKGRKIAAFFAESLPSVGGQIIPPAGYFSQVAEHIRKAGGVFVADEIQVGFGRVGKHFWAFQLQGKDFVPDIVTMGKSIGNGHPVACVAATQPVARAFEATGVEYFNTFGGSPVSCAVGLAVLNVLEKEQLQDHATSVGSFLMQLLGQQKIKHPIVGDVRGVGLFIGVDLIKDEATRTPATEEAAYLVSRLKENYVLLSTDGPGRNILKFKPPMCFSLDNARQVVAKLDAILTDMEEKVRSCETLRLQP

SEQ ID NO: 12465 - protein, 107 aa, Homo sapiens
MQLLGQQKIKHPIVGDVRGVGLFIGVDLIKDEATRTPATEEAAYLVSRLKENYVLLSTDGPGRNILKFKPPMCFSLDNARQVVAKLDAILTDMEEKVRSCETLRLQP

SEQ ID NO: 12466 - protein, 175 aa, Homo sapiens
MGKSIGNGHPVACVAATQPVARAFEATGVEYFNTFGGSPVSCAVGLAVLNVLEKEQLQDHATSVGSFLMQLLGQQKIKHPIVGDVRGVGLFIGVDLIKDEATRTPATEEAAYLVSRLKENYVLLSTDGPGRNILKFKPPMCFSLDNARQVVAKLDAILTDMEEKVRSCETLRLQP

SEQ ID NO: 12467 - protein, 282 aa, Homo sapiens
MSLLATLGLELDRALLPASGLGWLVDYGKLPPAPAPLAPYEVLGGALEGGLPVGGEPLAGDGFSDWMTERVDFTALLPLEPPLPPGTLPQPSPTPPDLEAMASLLKKELEQMEDFFLDAPPLPPPSPPPLPPPPLPPAPSLPLSLPSFDLPQPPVLDTLDLLAIYCRNEAGQEEVGMPPLPPPQQPPPPSPPQPSRLAPYPHPATTRGDRKQKKRDQNKSAALRYRQRKRAEGEALEGECQGLEARNRELKERAESVEREIQYVKDLLIEVYKARSQRTRSC

SEQ ID NO: 12468 - protein, 347 aa, Homo sapiens
MKMEEMSLSGLDNSKLEAIAQEIYADLVEDSCLGFCFEVHRAVKCGYFFLDDTDPDSMKDFEIVDQPGLDIFGQVFNQWKSKECVCPNCSRSIAASRFAPHLEKCLGMGRNSSRIANRRIANSNNMNKSESDQEDNDDINDNDWSYGSEKKAKKRKSDKNPNSPRRSKSLKHKNGELSNSDPFKYNNSTGISYETLGPEELRSLLTTQCGVISEHTKKMCTRSLRCPQHTDEQRRTVRIYFLGPSAVLPEVESSLDNDSFDMTDSQALISRLQWDGSSDLSPSDSGSSKTSENQGWGLGTNSSESRKTKKKKSHLSLVGTASGLGSNKKKKPKPPAPPTPSIYDDIN

SEQ ID NO: 12469 - protein, 354 aa, Homo sapiens
MKMEEMSLSGLDNSKLEAIAQEIYADLVEDSCLGFCFEVHRAVKCGYFFLDDTDPDSMKDFEIVDQPGLDIFGQVFNQWKSKECVCPNCSRSIAASRFAPHLEKCLGMGRNSSRIANRRIANSNNMNKSESDQEDNDDINDNDWSYGSEKKAKKRKSDKLWYLPFQNPNSPRRSKSLKHKNGELSNSDPFKYNNSTGISYETLGPEELRSLLTTQCGVISEHTKKMCTRSLRCPQHTDEQRRTVRIYFLGPSAVLPEVESSLDNDSFDMTDSQALISRLQWDGSSDLSPSDSGSSKTSENQGWGLGTNSSESRKTKKKKSHLSLVGTASGLGSNKKKKPKPPAPPTPSIYDDIN

SEQ ID NO: 12470 - protein, 172 aa, Homo sapiens
METRKPAERLALPYSLRTAPLGVPGTLPGLPRRDPLRVALRLDAACWEWARSGCARGWQYLPVPLDSAFEPAFLRKRNERERQRVRCVNEGYARLRDHLPRELADKRLSKVETLRAAIDYIKHLQELLERQAWGLEGAAGAVPQRRAECNSDGESKASSAPSPSSEPEEGGS

SEQ ID NO: 12471 - protein, 1013 aa, Homo sapiens
MGDKKDDKDSPKKNKGKERRDLDDLKKEVAMTEHKMSVEEVCRKYNTDCVQGLTHSKAQEILARDGPNALTPPPTTPEWVKFCRQLFGGFSILLWIGAILCFLAYGIQAGTEDDPSGDNLYLGIVLAAVVIITGCFSYYQEAKSSKIMESFKNMVPQQALVIREGEKMQVNAEEVVVGDLVEIKGGDRVPADLRIISAHGCKVDNSSLTGESEPQTRSPDCTHDNPLETRNITFFSTNCVEGTARGVVVATGDRTVMGRIATLASGLEVGKTPIAIEIEHFIQLITGVAVFLGVSFFILSLILGYTWLEAVIFLIGIIVANVPEGLLATVTVCLTLTAKRMARKNCLVKNLEAVETLGSTSTICSDKTGTLTQNRMTVAHMWFDNQIHEADTTEDQSGTSFDKSSHTWVALSHIAGLCNRAVFKGGQDNIPVLKRDVAGDASESALLKCIELSSGSVKLMRERNKKVAEIPFNSTNKYQLSIHETEDPNDNRYLLVMKGAPERILDRCSTILLQGKEQPLDEEMKEAFQNAYLELGGLGERVLGFCHYYLPEEQFPKGFAFDCDDVNFTTDNLCFVGLMSMIDPPRAAVPDAVGKCRSAGIKVIMVTGDHPITAKAIAKGVGIISEGNETVEDIAARLNIPVSQVNPRDAKACVIHGTDLKDFTSEQIDEILQNHTEIVFARTSPQQKLIIVEGCQRQGAIVAVTGDGVNDSPALKKADIGVAMGIAGSDVSKQAADMILLDDNFASIVTGVEEGRLIFDNLKKSIAYTLTSNIPEITPFLLFIMANIPLPLGTITILCIDLGTDMVPAISLAYEAAESDIMKRQPRNPRTDKLVNERLISMAYGQIGMIQALGGFFSYFVILAENGFLPGNLVGIRLNWDDRTVNDLEDSYGQQWTYEQRKVVEFTCHTAFFVSIVVVQWADLIICKTRRNSVFQQGMKNKILIFGLFEETALAAFLSYCPGMDVALRMYPLKPSWWFCAFPYSFLIFVYDEIRKLILRRNPGGWVEKETYY

SEQ ID NO: 12472 - protein, 1024 aa, Homo sapiens
MGGWEEERNRRATDKKDDKDSPKKNKGKERRDLDDLKKEVAMTEHKMSVEEVCRKYNTDCVQGLTHSKAQEILARDGPNALTPPPTTPEWVKFCRQLFGGFSILLWIGAILCFLAYGIQAGTEDDPSGDNLYLGIVLAAVVIITGCFSYYQEAKSSKIMESFKNMVPQQALVIREGEKMQVNAEEVVVGDLVEIKGGDRVPADLRIISAHGCKVDNSSLTGESEPQTRSPDCTHDNPLETRNITFFSTNCVEGTARGVVVATGDRTVMGRIATLASGLEVGKTPIAIEIEHFIQLITGVAVFLGVSFFILSLILGYTWLEAVIFLIGIIVANVPEGLLATVTVCLTLTAKRMARKNCLVKNLEAVETLGSTSTICSDKTGTLTQNRMTVAHMWFDNQIHEADTTEDQSGTSFDKSSHTWVALSHIAGLCNRAVFKGGQDNIPVLKRDVAGDASESALLKCIELSSGSVKLMRERNKKVAEIPFNSTNKYQLSIHETEDPNDNRYLLVMKGAPERILDRCSTILLQGKEQPLDEEMKEAFQNAYLELGGLGERVLGFCHYYLPEEQFPKGFAFDCDDVNFTTDNLCFVGLMSMIDPPRAAVPDAVGKCRSAGIKVIMVTGDHPITAKAIAKGVGIISEGNETVEDIAARLNIPVSQVNPRDAKACVIHGTDLKDFTSEQIDEILQNHTEIVFARTSPQQKLIIVEGCQRQGAIVAVTGDGVNDSPALKKADIGVAMGIAGSDVSKQAADMILLDDNFASIVTGVEEGRLIFDNLKKSIAYTLTSNIPEITPFLLFIMANIPLPLGTITILCIDLGTDMVPAISLAYEAAESDIMKRQPRNPRTDKLVNERLISMAYGQIGMIQALGGFFSYFVILAENGFLPGNLVGIRLNWDDRTVNDLEDSYGQQWTYEQRKVVEFTCHTAFFVSIVVVQWADLIICKTRRNSVFQQGMKNKILIFGLFEETALAAFLSYCPGMDVALRMYPLKPSWWFCAFPYSFLIFVYDEIRKLILRRNPGGWVEKETYY

SEQ ID NO: 12473 - protein, 1026 aa, Homo sapiens
MGSGGSDSYRIATSQDKKDDKDSPKKNKGKERRDLDDLKKEVAMTEHKMSVEEVCRKYNTDCVQGLTHSKAQEILARDGPNALTPPPTTPEWVKFCRQLFGGFSILLWIGAILCFLAYGIQAGTEDDPSGDNLYLGIVLAAVVIITGCFSYYQEAKSSKIMESFKNMVPQQALVIREGEKMQVNAEEVVVGDLVEIKGGDRVPADLRIISAHGCKVDNSSLTGESEPQTRSPDCTHDNPLETRNITFFSTNCVEGTARGVVVATGDRTVMGRIATLASGLEVGKTPIAIEIEHFIQLITGVAVFLGVSFFILSLILGYTWLEAVIFLIGIIVANVPEGLLATVTVCLTLTAKRMARKNCLVKNLEAVETLGSTSTICSDKTGTLTQNRMTVAHMWFDNQIHEADTTEDQSGTSFDKSSHTWVALSHIAGLCNRAVFKGGQDNIPVLKRDVAGDASESALLKCIELSSGSVKLMRERNKKVAEIPFNSTNKYQLSIHETEDPNDNRYLLVMKGAPERILDRCSTILLQGKEQPLDEEMKEAFQNAYLELGGLGERVLGFCHYYLPEEQFPKGFAFDCDDVNFTTDNLCFVGLMSMIDPPRAAVPDAVGKCRSAGIKVIMVTGDHPITAKAIAKGVGIISEGNETVEDIAARLNIPVSQVNPRDAKACVIHGTDLKDFTSEQIDEILQNHTEIVFARTSPQQKLIIVEGCQRQGAIVAVTGDGVNDSPALKKADIGVAMGIAGSDVSKQAADMILLDDNFASIVTGVEEGRLIFDNLKKSIAYTLTSNIPEITPFLLFIMANIPLPLGTITILCIDLGTDMVPAISLAYEAAESDIMKRQPRNPRTDKLVNERLISMAYGQIGMIQALGGFFSYFVILAENGFLPGNLVGIRLNWDDRTVNDLEDSYGQQWTYEQRKVVEFTCHTAFFVSIVVVQWADLIICKTRRNSVFQQGMKNKILIFGLFEETALAAFLSYCPGMDVALRMYPLKPSWWFCAFPYSFLIFVYDEIRKLILRRNPGGWVEKETYY

SEQ ID NO: 12474 - protein, 1029 aa, Homo sapiens
MGLWGKKGTVAPHDQSPRRRPKKGLIKKKMVKREKQKRNMEELKKEVVMDDHKLTLEELSTKYSVDLTKGHSHQRAKEILTRGGPNTVTPPPTTPEWVKFCKQLFGGFSLLLWTGAILCFVAYSIQIYFNEEPTKDNLYLSIVLSVVVIVTGCFSYYQEAKSSKIMESFKNMVPQQALVIRGGEKMQINVQEVVLGDLVEIKGGDRVPADLRLISAQGCKVDNSSLTGESEPQSRSPDFTHENPLETRNICFFSTNCVEGTARGIVIATGDSTVMGRIASLTSGLAVGQTPIAAEIEHFIHLITVVAVFLGVTFFALSLLLGYGWLEAIIFLIGIIVANVPEGLLATVTVCLTLTAKRMARKNCLVKNLEAVETLGSTSTICSDKTGTLTQNRMTVAHMWFDMTVYEADTTEEQTGKTFTKSSDTWFMLARIAGLCNRADFKANQEILPIAKRATTGDASESALLKFIEQSYSSVAEMREKNPKVAEIPFNSTNKYQMSIHLREDSSQTHVLMMKGAPERILEFCSTFLLNGQEYSMNDEMKEAFQNAYLELGGLGERVLGFCFLNLPSSFSKGFPFNTDEINFPMDNLCFVGLISMIDPPRAAVPDAVSKCRSAGIKVIMVTGDHPITAKAIAKGVGIISEGTETAEEVAARLKIPISKVDASAAKAIVVHGAELKDIQSKQLDQILQNHPEIVFARTSPQQKLIIVEGCQRLGAVVAVTGDGVNDSPALKKADIGIAMGISGSDVSKQAADMILLDDNFASIVTGVEEGRLIFDNLKKSIMYTLTSNIPEITPFLMFIILGIPLPLGTITILCIDLGTDMVPAISLAYESAESDIMKRLPRNPKTDNLVNHRLIGMAYGQIGMIQALAGFFTYFVILAENGFRPVDLLGIRLHWEDKYLNDLEDSYGQQWTYEQRKVVEFTCQTAFFVTIVVVQWADLIISKTRRNSLFQQGMRNKVLIFGILEETLLAAFLSYTPGMDVALRMYPLKITWWLCAIPYSILIFVYDEIRKLLIRQHPDGWVERETYY

SEQ ID NO: 12475 - protein, 165 aa, Homo sapiens
MIQALAGFFTYFVILAENGFRPVDLLGIRLHWEDKYLNDLEDSYGQQWTYEQRKVVEFTCQTAFFVTIVVVQWADLIISKTRRNSLFQQGMRNKVLIFGILEETLLAAFLSYTPGMDVALRMYPLKITWWLCAIPYSILIFVYDEIRKLLIRQHPDGWVERETYY

SEQ ID NO: 12476 - protein, 758 aa, Homo sapiens
MAQRKNAKSSGNSSSSGSGSGSTSAGSSSPGARRETKHGGHKNGRKGGLSGTSFFTWFMVIALLGVWTSVAVVWFDLVDYEEVLGKLGIYDADGDGDFDVDDAKVLLGLKERSTSEPAVPPEEAEPHTEPEEQVPVEAEPQNIEDEAKEQIQSLLHEMVHAEHVEGEDLQQEDGPTGEPQQEDDEFLMATDVDDRFETLEPEVSHEETEHSYHVEETVSQDCNQDMEEMMSEQENPDSSEPVVEDERLHHDTDDVTYQVYEEQAVYEPLENEGIEITEVTAPPEDNPVEDSQVIVEEVSIFPVEEQQEVPPETNRKTDDPEQKAKVKKKKPKLLNKFDKTIKAELDAAEKLRKRGKIEEAVNAFKELVRKYPQSPRARYGKAQCEDDLAEKRRSNEVLRGAIETYQEVASLPDVPADLLKLSLKRRSDRQQFLGHMRGSLLTLQRLVQLFPNDTSLKNDLGVGYLLIGDNDNAKKVYEEVLSVTPNDGFAKVHYGFILKAQNKIAESIPYLKEGIESGDPGTDDGRFYFHLGDAMQRVGNKEAYKWYELGHKRGHFASVWQRSLYNVNGLKAQPWWTPKETGYTELVKSLERNWKLIRDEGLAVMDKAKGLFLPEDENLREKGDWSQFTLWQQGRRNENACKGAPKTCTLLEKFPETTGCRRGQIKYSIMHPGTHVWPHTGPTNCRLRMHLGLVIPKEGCKIRCANETKTWEEGKVLIFDDSFEHEVWQDASSFRLIFIVDVWHPELTPQQRRSLPAI

SEQ ID NO: 12477 - protein, 313 aa, Homo sapiens
MAQRKNAKSSGNSSSSGSGSGSTSAGSSSPGARRETKHGGHKNGRKGGLSGTSFFTWFMVIALLGVWTSVAVVWFDLVDYEEVLGKLGIYDADGDGDFDVDDAKVLLGLKERSTSEPAVPPEEAEPHTEPEEQVPVEAEPQNIEDEAKEQIQSLLHEMVHAEHVEGEDLQQEDGPTGEPQQEDDEFLMATDVDDRFETLEPEVSHEETEHSYHVEETVSQDCNQDMEEMMSEQENPDSSEPVVEDERLHHDTDDVTYQVYEEQAVYEPLENEGIEITEVTAPPEDNPVEDSQVIVEEVSIFPVEEQQEVPPDT

SEQ ID NO: 12478 - protein, 225 aa, Homo sapiens
MAEDKETKHGGHKNGRKGGLSGTSFFTWFMVIALLGVWTSVAVVWFDLVDYEEVLAKAKDFRYNLSEVLQGKLGIYDADGDGDFDVDDAKVLLEGPSGVAKRKTKAKVKELTKEELKKEKEKPESRKESKNEERKKGKKEDVRKDKKIADADLSRKESPKGKKDREKEKVDLEKSAKTKENRKKSTNMKDVSSKMASRDKDDRKESRSSTRYAHLTKGNTQKRNG

SEQ ID NO: 12479 - protein, 210 aa, Homo sapiens
MAEDKETKHGGHKNGRKGGLSGTSFFTWFMVIALLGVWTSVAVVWFDLVDYEEVLGKLGIYDADGDGDFDVDDAKVLLEGPSGVAKRKTKAKVKELTKEELKKEKEKPESRKESKNEERKKGKKEDVRKDKKIADADLSRKESPKGKKDREKEKVDLEKSAKTKENRKKSTNMKDVSSKMASRDKDDRKESRSSTRYAHLTKGNTQKRNG

SEQ ID NO: 12480 - protein, 298 aa, Homo sapiens
MAEDKETKHGGHKNGRKGGLSGTSFFTWFMVIALLGVWTSVAVVWFDLVDYEEVLAKAKDFRYNLSEVLQGKLGIYDADGDGDFDVDDAKVLLGLKERSTSEPAVPPEEAEPHTEPEEQVPVEAEPQNIEDEAKEQIQSLLHEMVHAEHVEGEDLQQEDGPTGEPQQEDDEFLMATDVDDRFETLEPEVSHEETEHSYHVEETVSQDCNQDMEEMMSEQENPDSSEPVVEDERLHHDTDDVTYQVYEEQVYEPLENEGIEITEVTAPPEDNPVEDSQVIVEEVSIFPVEEQQEVPPDT

SEQ ID NO: 12481 - protein, 729 aa, Homo sapiens
MAEDKETKHGGHKNGRKGGLSGTSFFTWFMVIALLGVWTSVAVVWFDLVDYEEVLGKLGIYDADGDGDFDVDDAKVLLGLKERSTSEPAVPPEEAEPHTEPEEQVPVEAEPQNIEDEAKEQIQSLLHEMVHAEHVEGEDLQQEDGPTGEPQQEDDEFLMATDVDDRFETLEPEVSHEETEHSYHVEETVSQDCNQDMEEMMSEQENPDSSEPVVEDERLHHDTDDVTYQVYEEQAVYEPLENEGIEITEVTAPPEDNPVEDSQVIVEEVSIFPVEEQQEVPPETNRKTDDPEQKAKVKKKKPKLLNKFDKTIKAELDAAEKLRKRGKIEEAVNAFKELVRKYPQSPRARYGKAQCEDDLAEKRRSNEVLRGAIETYQEVASLPDVPADLLKLSLKRRSDRQQFLGHMRGSLLTLQRLVQLFPNDTSLKNDLGVGYLLIGDNDNAKKVYEEVLSVTPNDGFAKVHYGFILKAQNKIAESIPYLKEGIESGDPGTDDGRFYFHLGDAMQRVGNKEAYKWYELGHKRGHFASVWQRSLYNVNGLKAQPWWTPKETGYTELVKSLERNWKLIRDEGLAVMDKAKGLFLPEDENLREKGDWSQFTLWQQGRRNENACKGAPKTCTLLEKFPETTGCRRGQIKYSIMHPGTHVWPHTGPTNCRLRMHLGLVIPKEGCKIRCANETKTWEEGKVLIFDDSFEHEVWQDASSFRLIFIVDVWHPELTPQQRRSLPAI

SEQ ID NO: 12482 - protein, 270 aa, Homo sapiens
MAQRKNAKSSGNSSSSGSGSGSTSAGSSSPGARRETKHGGHKNGRKGGLSGTSFFTWFMVIALLGVWTSVAVVWFDLVDYEEVLGKLGIYDADGDGDFDVDDAKVLLGLKERSTSEPAVPPEEAEPHTEPEEQVPVEAEPQNIEDEAKEQIQSLLHEMVHAEHETEHSYHVEETVSQDCNQDMEEMMSEQENPDSSEPVVEDERLHHDTDDVTYQVYEEQAVYEPLENEGIEITEVTAPPEDNPVEDSQVIVEEVSIFPVEEQQEVPPDT

SEQ ID NO: 12483 - protein, 203 aa, Homo sapiens
MAQRKNAKSSGNSSSSGSGSGSTSAGSSSPGARRETKHGGHKNGRKGGLSGTSFFTWFMVIALLGVWTSVAVVWFDLVDYEEVLAKAKDFRYNLSEVLQGKLGIYDADGDGDFDVDDAKVLLGLTKDGSNENIDSLEEVLNILAEESSDWFYGFLSFLYDIMTPFEMLEEEEEESETADGVDGTSQNEGVQGKTCVILDLHNQ

SEQ ID NO: 12484 - protein, 299 aa, Homo sapiens
MAEDKETKHGGHKNGRKGGLSGTSFFTWFMVIALLGVWTSVAVVWFDLVDYEEVLAKAKDFRYNLSEVLQGKLGIYDADGDGDFDVDDAKVLLGLKERSTSEPAVPPEEAEPHTEPEEQVPVEAEPQNIEDEAKEQIQSLLHEMVHAEHVEGEDLQQEDGPTGEPQQEDDEFLMATDVDDRFETLEPEVSHEETEHSYHVEETVSQDCNQDMEEMMSEQENPDSSEPVVEDERLHHDTDDVTYQVYEEQAVYEPLENEGIEITEVTAPPEDNPVEDSQVIVEEVSIFPVEEQQEVPPDT

SEQ ID NO: 12485 - protein, 256 aa, Homo sapiens
MAEDKETKHGGHKNGRKGGLSGTSFFTWFMVIALLGVWTSVAVVWFDLVDYEEVLAKAKDFRYNLSEVLQGKLGIYDADGDGDFDVDDAKVLLGLKERSTSEPAVPPEEAEPHTEPEEQVPVEAEPQNIEDEAKEQIQSLLHEMVHAEHETEHSYHVEETVSQDCNQDMEEMMSEQENPDSSEPVVEDERLHHDTDDVTYQVYEEQAVYEPLENEGIEITEVTAPPEDNPVEDSQVIVEEVSIFPVEEQQEVPPDT

SEQ ID NO: 12486 - protein, 294 aa, Homo sapiens
MAQRKNAKSSGNSSSSGSGSGSTSAGSSSPGARRETKHGGHKNGRKGGLSGTSFFTWFMVIALLGVWTSVAVVWFDLVDYEEVLGKLGIYDADGDGDFDVDDAKVLLGLKERSTSEPAVPPEEAEPHTEPEEQVPVEAEPQNIEDEAKEQIQSLLHEMVHAEHVEGEDLQQEDGPTGEPQQEDDEFLMATDVDDRFETLEPEVSHEETEHSYHVEETDSSEPVVEDERLHHDTDDVTYQVYEEQAVYEPLENEGIEITEVTAPPEDNPVEDSQVIVEEVSIFPVEEQQEVPPDT

SEQ ID NO: 12487 - protein, 3477 aa, Homo sapiens
MANRRVGRGCWEVSPTERRPPAGLRGPAAEEEASSPPVLSLSHFCRSPFLCFGDVLLGASRTLSLALDNPNEEVAEVKISHFPAADLGFSVSQRCFVLQPKEKIVISVNWTPLKEGRVREIMTFLVNDVLKHQAILLGNAEEQKKKKRSLWDTIKKKKISASTSHNRRVSNIQNVNKTFSVSQKVDRVRSPLQACENLAMNEGGPPTENNSLILEENKIPISPISPAFNECHGATCLPLSVRRSTTYSSLHASENRELLNVHSANVSKVSFNEKAVTETSFNSVNVNGQRGENSKLSLTPNCSSTLNITQSQIHFLSPDSFVNNSHGANNELELVTCLSSDMFMKDNSQPVHLESTIAHEIYQKILSPDSFIKDNYGLNQDLESESVNPILSPNQFLKDNMAYMCTSQQTCKVPLSNENSQVPQSPEDWRKSEVSPRIPECQGSKSPKAIFEELVEMKSNYYSFIKQNNPKFSAVQDISSHSHNKQPKRRPILSATVTKRKATCTRENQTEINKPKAKRCLNSAVGEHEKVINNQKEKEDFHSYLPIIDPILSKSKSYKNEVTPSSTTASVARKRKSDGSMEDANVRVAITEHTEVREIKRIHFSPSEPKTSAVKKTKNVTTPISKRISNREKLNLKKKTDLSIFRTPISKTNKRTKPIIAVAQSSLTFIKPLKTDIPRHPMPFAAKNMFYDERWKEKQEQGFTWWLNFILTPDDFTVKTNISEVNAATLLLGIENQHKISVPRAPTKEEMSLRAYTARCRLNRLRRAACRLFTSEKMVKAIKKLEIEIEARRLIVRKDRHLWKDVGERQKVLNWLLSYNPLWLRIGLETTYGELISLEDNSDVTGLAMFILNRLLWNPDIAAEYRHPTVPHLYRDGHEEALSKFTLKKLLLLVCFLDYAKISRLIDHDPCLFCKDAEFKASKEILLAFSRDFLSGEGDLSRHLGLLGLPVNHVQTPFDEFDFAVTNLAVDLQCGVRLVRTMELLTQNWDLSKKLRIPAISRLQKMHNVDIVLQVLKSRGIELSDEHGNTILSKDIVDRHREKTLRLLWKIAFAFQVDISLNLDQLKEEIAFLKHTKSIKKTISLLSCHSDDLINKKKGKRDSGSFEQYSENIKLLMDWVNAVCAFYNKKVENFTVSFSDGRVLCYLIHHYHPCYVPFDAICQRTTQTVECTQTGSVVLNSSSESDDSSLDMSLKAFDHENTSELYKELLENEKKNFHLVRSAVRDLGGIPAMINHSDMSNTIPDEKVVITYLSFLCARLLDLRKEIRAARLIQTTWRKYKLKTDLKRHQEREKAARIIQLAVINFLAKQRLRKRVNAALVIQKYWRRVLAQRKLLMLKKEKLEKVQNKAASLIQGYWRRYSTRQRFLKLKYYSIILQSRIRMIIAVTSYKRYLWATVTIQRHWRAYLRRKQDQQRYEMLKSSTLIIQSMFRKWKQRKMQSQVKATVILQRAFREWHLRKQAKEENSAIIIQSWYRMHKELRKYIYIRSCVVIIQKRFRCFQAQKLYKRRKESILTIQKYYKAYLKGKIERTNYLQKRAAAIQLQAAFRRLKAHNLCRQIRAACVIQSYWRMRQDRVRFLNLKKTIIKFQAHVRKHQQRQKYKKMKKAAVIIQTHFRAYIFAMKVLASYQKTRSAVIVLQSAYRGMQARKMYIHILTSVIKIQSYYRAYVSKKEFLSLKNATIKLQSTVKMKQTRKQYLHLRAAALFIQQCYRSKKIAAQKREEYMQMRESCIKLQAFVRGYLVRKQMRLQRKAVISLQSYFRMRKARQYYLKMYKAIIVIQNYYHAYKAQVNQRKNFLQVKKAATCLQAAYRGYKVRQLIKQQSIAALKIQSAFRGYNKRVKYQSVLQSIIKIQRWYRAYKTLHDTRTHFLKTKAAVISLQSAYRGWKVRKQIRREHQAALKIQSAFRMAKAQKQFRLFKTAALVIQQNFRAWTAGRKQCMEYIELRHAVLVLQSMWKGKTLRRQLQRQHKCAIIIQSYYRMHVQQKKWKIMKKAALLIQKYYRAYSIGREQNHLYLKTKAAVVTLQSAYRGMKVRKRIKDCNKAAVTIQSKYRAYKTKKKYATYRASAIIIQRWYRGIKITNHQHKEYLNLKKTAIKIQSVYRGIRVRRHIQHMHRAATFIKAMFKMHQSRISYHTMRKAAIVIQVRCRAYYQGKMQREKYLTILKAVKVLQASFRGVRVRRTLRKMQTAATLIQSNYRRYRQQTYFNKLKKITKTVQQRYWAMKERNIQFQRYNKLRHSVIYIQAIFRGKKARRHLKMMHIAATLIQRRFRTLMMRRRFLSLKKTAILIQRKYRAHLCTKHHLQFLQVQNAVIKIQSSYRRWMIRKRMREMHRAATFIQSTFRMHRLHMRYQALKQASVVIQQQYQANRAAKLQRQHYLRQRHSAVILQAAFRGMKTRRHLKSMHSSATLIQSRFRSLLVRRRFISLKKATIFVQRKYRATICAKHKLYQFLHLRKAAITIQSSYRRLMVKKKLQEMQRAAVLIQATFRMYRTYITFQTWKHASILIQQHYRTYRAAKLQRENYIRQWHSAVVIQAAYKGMKARQLLREKHKASIVIQSTYRMYRQYCFYQKLQWATKIIQEKYRANKKKQKVFQHNELKKETCVQAGFQDMNIKKQIQEQHQAAIIIQKHCKAFKIRKHYLHLRATVVSIQRRYRKLTAVRTQAVICIQSYYRGFKVRKDIQNMHRAATLIQSFYRMHRAKVDYETKKTAIVVIQNYYRLYVRVKTERKNFLAVQKSVRTIQAAFRGMKVRQKLKNVSEEKMAAIVNQSALCCYRSKTQYEAVQSEGVMIQEWYKASGLACSQEAEYHSQSRAAVTIQKAFCRMVTRKLETQKCAALRIQFFLQMAVYRRRFVQQKRAAITLQHYFRTWQTRKQFLLYRKAAVVLQNHYRAFLSAKHQRQVYLQIRSSVIIIQARSKGFIQKRKFQEIKNSTIKIQAMWRRYRAKKYLCKVKAACKIQAWYRCWRAHKEYLAILKAVKIIQGCFYTKLERTRFLNVRASAIIIQRKWRAILPAKIAHEHFLMIKRHRAACLIQAHYRGYKGRQVFLRQKSAALIIQKYIRAREAGKHERIKYIEFKKSTVILQALVRGWLVRKRFLEQRAKIRLLHFTAAAYYHLNAVRIQRAYKLYLAVKNANKQVNSVICIQRWFRARLQEKRFIQKYHSIKKIEHEGQECLSQRNRAASVIQKAVRHFLLRKKQEKFTSGIIKIQALWRGYSWRKKNDCTKIKAIRLSLQVVNREIREENKLYKRTALALHYLLTYKHLSAILEALKHLEVVTRLSPLCCENMAQSGAISKIFVLIRSCNRSIPCMEVIRYAVQVLLNVSKYEKTTSAVYDVENCIDILLELLQIYREKPGNKVADKGGSIFTKTCCLLAILLKTTNRASDVRSRSKVVDRIYSLYKLTAHKHKMNTERILYKQKKNSSISIPFIPETPVRTRIVSRLKPDWVLRRDNMEEITNPLQAIQMVMDTLGIPY

SEQ ID NO: 12488 - protein, 1892 aa, Homo sapiens
MANRRVGRGCWEVSPTERRPPAGLRGPAAEEEASSPPVLSLSHFCRSPFLCFGDVLLGASRTLSLALDNPNEEVAEVKISHFPAADLGFSVSQRCFVLQPKEKIVISVNWTPLKEGRVREIMTFLVNDVLKHQAILLGNAEEQKKKKRSLWDTIKKKKISASTSHNRRVSNIQNVNKTFSVSQKVDRVRSPLQACENLAMNEGGPPTENNSLILEENKIPISPISPAFNECHGATCLPLSVRRSTTYSSLHASENRELLNVHSANVSKVSFNEKAVTETSFNSVNVNGQRGENSKLSLTPNCSSTLNITQSQIHFLSPDSFVNNSHGANNELELVTCLSSDMFMKDNSQPVHLESTIAHEIYQKILSPDSFIKDNYGLNQDLESESVNPILSPNQFLKDNMAYMCTSQQTCKVPLSNENSQVPQSPEDWRKSEVSPRIPECQGSKSPKAIFEELVEMKSNYYSFIKQNNPKFSAVQDISSHSHNKQPKRRPILSATVTKRKATCTRENQTEINKPKAKRCLNSAVGEHEKVINNQKEKEDFHSYLPIIDPILSKSKSYKNEVTPSSTTASVARKRKSDGSMEDANVRVAITEHTEVREIKRIHFSPSEPKTSAVKKTKNVTTPISKRISNREKLNLKKKTDLSIFRTPISKTNKRTKPIIAVAQSSLTFIKPLKTDIPRHPMPFAAKNMFYDERWKEKQEQGFTWWLNFILTPDDFTVKTNISEVNAATLLLGIENQHKISVPRAPTKEEMSLRAYTARCRLNRLRRAACRLFTSEKMVKAIKKLEIEIEARRLIVRKDRHLWKDVGERQKVLNWLLSYNPLWLRIGLETTYGELISLEDNSDVTGLAMFILNRLLWNPDIAAEYRHPTVPHLYRDGHEEALSKFTLKKLLLLVCFLDYAKISRLIDHDPCLFCKDAEFKASKEILLAFSRDFLSGEGDLSRHLGLLGLPVNHVQTPFDEFDFAVTNLAVDLQCGVRLVRTMELLTQNWDLSKKLRIPAISRLQKMHNVDIVLQVLKSRGIELSDEHGNTILSKDIVDRHREKTLRLLWKIAFAFQVDISLNLDQLKEEIAFLKHTKSIKKTISLLSCHSDDLINKKKGKRDSGSFEQYSENIKLLMDWVNAVCAFYNKKVENFTVSFSDGRVLCYLIHHYHPCYVPFDAICQRTTQTVECTQTGSVVLNSSSESDDSSLDMSLKAFDHENTSELYKELLENEKKNFHLVRSAVRDLGGIPAMINHSDMSNTIPDEKVVITYLSFLCARLLDLRKEIRAARLIQTTWRKYKLKTDLKRHQEREKAARIIQLAVINFLAKQRLRKRVNAALVIQKYWRRVLAQRKLLMLKKEKLEKVQNKAASLIQAMWRRYRAKKYLCKVKAACKIQAWYRCWRAHKEYLAILKAVKIIQGCFYTKLERTRFLNVRASAIIIQRKWRAILPAKIAHEHFLMIKRHRAACLIQAHYRGYKGRQVFLRQKSAALIIQKYIRAREAGKHERIKYIEFKKSTVILQALVRGWLVRKRFLEQRAKIRLLHFTAAAYYHLNAVRIQRAYKLYLAVKNANKQVNSVICIQRWFRARLQEKRFIQKYHSIKKIEHEGQECLSQRNRAASVIQKAVRHFLLRKKQEKFTSGIIKIQALWRGYSWRKKNDCTKIKAIRLSLQVVNREIREENKLYKRTALALHYLLTYKHLSAILEALKHLEVVTRLSPLCCENMAQSGAISKIFVLIRSCNRSIPCMEVIRYAVQVLLNVSKYEKTTSAVYDVENCIDILLELLQIYREKPGNKVADKGGSIFTKTCCLLAILLKTTNRASDVRSRSKVVDRIYSLYKLTAHKHKMNTERILYKQKKNSSISIPFIPETPVRTRIVSRLKPDWVLRRDNMEEITNPLQAIQMVMDTLGIPY

SEQ ID NO: 12489 - protein, 678 aa, Homo sapiens
MAVKVQTTKRGDPHELRNIFLQYASTEVDGERYMTPEDFVQRYLGLYNDPNSNPKIVQLLAGVADQTKDGLISYQEFLAFESVLCAPDSMFIVAFQLFDKSGNGEVTFENVKEIFGQTIIHHHIPFNWDCEFIRLHFGHNRKKHLNYTEFTQFLQELQLEHARQAFALKDKSKSGMISGLDFSDIMVTIRSHMLTPFVEENLVSAAGGSISHQVSFSYFNAFNSLLNNMELVRKIYSTLAGTRKDVEVTKEEFAQSAIRYGQVTPLEIDILYQLADLYNASGRLTLADIERIAPLAEGALPYNLAELQRQQSPGLGRPIWLQIAESAYRFTLGSVAGAVGATAVYPIDLVKTRMQNQRGSGSVVGELMYKNSFDCFKKVLRYEGFFGLYRGLIPQLIGVAPEKAIKLTVNDFVRDKFTRRDGSVPLPAEVLAGGCAGGSQVIFTNPLEIVKIRLQVAGEITTGPRVSALNVLRDLGIFGLYKGAKACFLRDIPFSAIYFPVYAHCKLLLADENGHVGGLNLLAAGAMAGVPAASLVTPADVIKTRLQVAARAGQTTYSGVIDCFRKILREEGPSAFWKGTAARVFRSSPQFGVTLVTYELLQRWFYIDFGGLKPAGSEPTPKSRIADLPPANPDHIGGYRLATATFAGIENKFGLYLPKFKSPSVAVVQPKAAVAATQ

SEQ ID NO: 12490 - protein, 571 aa, Homo sapiens
MENVKEIFGQTIIHHHIPFNWDCEFIRLHFGHNRKKHLNYTEFTQFLQELQLEHARQAFALKDKSKSGMISGLDFSDIMVTIRSHMLTPFVEENLVSAAGGSISHQVSFSYFNAFNSLLNNMELVRKIYSTLAGTRKDVEVTKEEFAQSAIRYGQVTPLEIDILYQLADLYNASGRLTLADIERIAPLAEGALPYNLAELQRQQSPGLGRPIWLQIAESAYRFTLGSVAGAVGATAVYPIDLVKTRMQNQRGSGSVVGELMYKNSFDCFKKVLRYEGFFGLYRGLIPQLIGVAPEKAIKLTVNDFVRDKFTRRDGSVPLPAEVLAGGCAGGSQVIFTNPLEIVKIRLQVAGEITTGPRVSALNVLRDLGIFGLYKGAKACFLRDIPFSAIYFPVYAHCKLLLADENGHVGGLNLLAAGAMAGVPAASLVTPADVIKTRLQVAARAGQTTYSGVIDCFRKILREEGPSAFWKGTAARVFRSSPQFGVTLVTYELLQRWFYIDFGGLKPAGSEPTPKSRIADLPPANPDHIGGYRLATATFAGIENKFGLYLPKFKSPSVAVVQPKAAVAATQ

SEQ ID NO: 12491 - protein, 94 aa, Homo sapiens
MLKNRELLKIFEQASHMMKLIEEHCICDCIWMEWEDLEAKTLDRRPPEQTRRERCSCGNGKRWAKPKITTEKKNHPDFMIDWMYFETPLSIQMK

SEQ ID NO: 12492 - protein, 161 aa, Homo sapiens
MPRAGRAPAEGGPAPGTRSSRCLRPRPLAWRRLVPNFGAWAPRKGAARVGRPVLSPRTSGAAGEPTCGAGSPGTLEEGVASGRTRRRTQSAGEVAKCRWGLGQEPLCPRGAVLLNSFSPPAWPQFPPALRLRALAWPQPRGPACGSTAQWPPRGDPTWRIS

SEQ ID NO: 12493 - protein, 112 aa, Homo sapiens
MSAEVPEAASAEEQKEMEDKVTSPEKAEEAKLKARYPHLGQKPGGSDFLRKRLQKGQKYFDSGDYNMAKAKMKNKQLPTAAPDKTEVTGDHIPTPQDLPQRKPSLVASKLAG

SEQ ID NO: 12494 - protein, 96 aa, Homo sapiens
MEDKVTSPEKAEEAKLKARYPHLGQKPGGSDFLRKRLQKGQKYFDSGDYNMAKAKMKNKQLPTAAPDKTEVTGDHIPTPQDLPQRKPSLVASKLAG

SEQ ID NO: 12495 - protein, 210 aa, Homo sapiens
MFESFNVPGLYIAVQAVLALAASWTSRQVGERTLTGIVIDSGDGVTHVIPVAEGYVIGSCIKHIPIAGRDITYFIQQLLREREVGIPPEQSLETAKAIKEKYCYICPDIVKEFAKYDVDPQKWIKQYTGINAINQKKFVIDVGYERFLGPEIFFHPEFANPDSMESISDVVDEVIQNCPIDVRRPLYKMEQIPLSYPQGHGFHPLSPPFH

SEQ ID NO: 12496 - protein, 47 aa, Homo sapiens
MESISDVVDEVIQNCPIDVRRPLYKMEQIPLSYPQGHGFHPLSPPFH

SEQ ID NO: 12497 - protein, 1117 aa, Homo sapiens
MEILWKTLTWILSLIMASSEFHSDHRLSYSSQEEFLTYLEHYQLTIPIRVDQNGAFLSFTVKNDKHSRRRRSMDPIDPQQAVSKLFFKLSAYGKHFHLNLTLNTDFVSKHFTVEYWGKDGPQWKHDFLDNCHYTGYLQDQRSTTKVALSNCVGLHGVIATEDEEYFIEPLKNTTEDSKHFSYENGHPHVIYKKSALQQRHLYDHSHCGVSDFTRSGKPWWLNDTSTVSYSLPINNTHIHHRQKRSVSIERFVETLVVADKMMVGYHGRKDIEHYILSVMNIVAKLYRDSSLGNVVNIIVARLIVLTEDQPNLEINHHADKSLDSFCKWQKSILSHQSDGNTIPENGIAHHDNAVLITRYDICTYKNKPCGTLGLASVAGMCEPERSCSINEDIGLGSAFTIAHEIGHNFGMNHDGIGNSCGTKGHEAAKLMAAHITANTNPFSWSACSRDYITSFLDSGRGTCLDNEPPKRDFLYPAVAPGQVYDADEQCRFQYGATSRQCKYGEVCRELWCLSKSNRCVTNSIPAAEGTLCQTGNIEKGWCYQGDCVPFGTWPQSIDGGWGPWSLWGECSRTCGGGVSSSLRHCDSPAPSGGGKYCLGERKRYRSCNTDPCPLGSRDFREKQCADFDNMPFRGKYYNWKPYTGGGVKPCALNCLAEGYNFYTERAPAVIDGTQCNADSLDICINGECKHVGCDNILGSDAREDRCRVCGGDGSTCDAIEGFFNDSLPRGGYMEVVQIPRGSVHIEVREVAMSKNYIALKSEGDDYYINGAWTIDWPRKFDVAGTAFHYKRPTDEPESLEALGPTSENLIVMVLLQEQNLGIRYKFNVPITRTGSGDNEVGFTWNHQPWSECSATCAGGVQRQEVVCKRLDDNSIVQNNYCDPDSKPPENQRACNTEPCPPEWFIGDWLECSKTCDGGMRTRAVLCIRKIGPSEEETLDYSGCLTHRPVEKEPCNNQSCPPQWVALDWSECTPKCGPGFKHRIVLCKSSDLSKTFPAAQCPEESKPPVRIRCSLGRCPPPRWVTGDWGQCSAQCGLGQQMRTVQCLSYTGQASSDCLETVRPPSMQQCESKCDSTPISNTEECKDVNKVAYCPLVLKFKFCSRAYFRQMCCKTCQGH

SEQ ID NO: 12498 - protein, 860 aa, Homo sapiens
MEILWKTLTWILSLIMASSEFHSDHRLSYSSQEEFLTYLEHYQLTIPIRVDQNGAFLSFTVKNDKHSRRRRSMDPIDPQQAVSKLFFKLSAYGKHFHLNLTLNTDFVSKHFTVEYWGKDGPQWKHDFLDNCHYTGYLQDQRSTTKVALSNCVGLHGVIATEDEEYFIEPLKNTTEDSKHFSYENGHPHVIYKKSALQQRHLYDHSHCGVSDFTRSGKPWWLNDTSTVSYSLPINNTHIHHRQKRSVSIERFVETLVVADKMMVGYHGRKDIEHYILSVMNIVAKLYRDSSLGNVVNIIVARLIVLTEDQPNLEINHHADKSLDSFCKWQKSILSHQSDGNTIPENGIAHHDNAVLITRYDICTYKNKPCGTLGLASVAGMCEPERSCSINEDIGLGSAFTIAHEIGHNFGMNHDGIGNSCGRKVMKQQNYGSSHYCEYQSFFLVCLQSRFHHQLFREVCRELWCLSKSNRCVTNSIPAAEGTLCQTGNIEKGWCYQGDCVPFGTWPQSIDGGWGPWSLWGECSRTCGGGVSSSLRHCDSPAPSGGGKYCLGERKRYRSCNTDPCPLGSRDFREKQCADFDNMPFRGKYYNWKPYTGGGVKPCALNCLAEGYNFYTERAPAVIDGTQCNADSLDICINGECKHVGCDNILGSDAREDRCRVCGGDGSTCDAIEGFFNDSLPRGGYMEVVQIPRGSVHIEVREVAMSKNYIALKSEGDDYYINGAWTIDWPRKFDVAGTAFHYKRPTDEPESLEALGPTSENLIVMVLLQEQNLGIRYKFNVPITRTGSGDNEVGFTWNHQPWSECSATCAGGKMPTRQPTQRARWRTKHILSYALCLLKKLIGNISCRFASSCNLAKETLL

SEQ ID NO: 12499 - protein, 468 aa, Homo sapiens
MEILWKTLTWILSLIMASSEFHSDHRLSYSSQEEFLTYLEHYQLTIPIRVDQNGAFLSFTVKNDKHSRRRRSMDPIDPQQAVSKLFFKLSAYGKHFHLNLTLNTDFVSKHFTVEYWGKDGPQWKHDFLDNCHYTGYLQDQRSTTKVALSNCVGLHGVIATEDEEYFIEPLKNTTEDSKHFSYENGHPHVIYKKSALQQRHLYDHSHCGVSDFTRSGKPWWLNDTSTVSYSLPINNTHIHHRQKRSVSIERFVETLVVADKMMVGYHGRKDIEHYILSVMNIVAKLYRDSSLGNVVNIIVARLIVLTEDQPNLEINHHADKSLDSFCKWQKSILSHQSDGNTIPENGIAHHDNAVLITRYDICTYKNKPCGTLGLASVAGMCEPERSCSINEDIGLGSAFTIAHEIGHNFGMNHDGIGNSCGTKGHEAAKLMAAHITANTNPFSWSACSRDYITSFLEFLKLGDSISGS

SEQ ID NO: 12500 - protein, 292 aa, Homo sapiens
MEILWKTLTWILSLIMASSEFHSDHRLSYSSQEEFLTYLEHYQLTIPIRVDQNGAFLSFTVKNDKHSRRRRSMDPIDPQQAVSKLFFKLSAYGKHFHLNLTLNTDFVSKHFTVEYWGKDGPQWKHDFLDNCHYTGYLQDQRSTTKVALSNCVGLHGVIATEDEEYFIEPLKNTTEDSKHFSYENGHPHVIYKKSALQQRHLYDHSHCGVSDFTRSGKPWWLNDTSTVSYSLPINNTHIHHRQKRSVSIERFVETLVVADKMMVGYHGRKDIEHYILSVMNIVRLPNFTVIPA

SEQ ID NO: 12501 - protein, 282 aa, Homo sapiens
MNSSTSTMSEEPDALSVVNQLRDLAADPLNRRAIVQDQGCLPGLILFMDHPNPPVVHSALLALRYLAECRANREKMKGELGMMLSLQNVIQKTTTPGETKLLASEIYDILQSSNMADGDSFNEMNSRRRKAQFFLGTTNKRAKTVVLHIDGLDDTSRRNLCEEALLKIKGVISFTFQMAVQRCVVRIRSDLKAEALASAIASTKVMKAQQVVKSESGEEMLVPFQDTPVEVEQNTELPDYLPEDESPTKEQDKAVSRVGSHPEGGASWLSTAANFLSRSFYW

SEQ ID NO: 12502 - protein, 180 aa, Homo sapiens
MSAWPYFIYGPSQPSSRPLRFACSSILGRMPCKQRKDERRTGYDVELTKCYTESRRNLCEEALLKIKGVISFTFQMAVQRCVVRIRSDLKAEALASAIASTKVMKAQQVVKSESGEEMLVPFQDTPVEVEQNTELPDYLPEDESPTKEQDKAVSRVGSHPEGGASWLSTAANFLSRSFYW

SEQ ID NO: 12503 - protein, 607 aa, Homo sapiens
MAANVFPFRDARAAPDPVLEAGPVAHGPLPVPLVLDNGSFQVRAGWACPGQDPGPEPRLQFRAVCARGRGGARGASGPQVGNALGSLEPLRWMLRSPFDRNVPVNLELQELLLDYSFQHLGVSSQGCVDHPIVLTEAVCNPLYSRQMMSELLFECYGIPKVAYGIDSLFSFYHNKPKNSMCSGLIISSGYQCTHVLPILEGRLDAKNCKRINLGGSQAAGYLQRLLQLKYPGHLAAITLSRMEEILHEHSYIAEDYVEELHKWRCPDYYENNVHKMQLPFSSKLLGSTLTSEEKQERRQQQLRRLQELNARRREEKLQLDQERLDRLLYVQELLEDGQMDQFHKALIELNMDSPEELQSYIQKLSIAVEQAKQKILQAEVNLEVDVVDSKPETPDLEQLEPSLEDVESMNDFDPLFSEETPGVEKPVTTVQPVFNLAAYHQLFVGTERIRAPEIIFQPSLIGEEQAGIAETLQYILDRYPKDIQEMLVQNVFLTGGNTMYPGMKARMEKELLEMRPFRSSFQVQLASNPVLDAWYGARDWALNHLDDNEVWITRKEYEEKGGEYLKEHCASNIYVPIRLPKQASRSSDAQASSKGSAAGGGGAGEQA

SEQ ID NO: 12504 - protein, 593 aa, Homo sapiens
MRSAARRGRAAPAARDSLPVLLFLCLLLKTCEPKTANAFKPNILLIMADDLGTGDLGCYGNNTLRTPNIDQLAEEGVRLTQHLAAAPLCTPSRAAFLTGRHSFRSGMDASNGYRALQWNAGSGGLPENETTFARILQQHGYATGLIGKWHQGVNCASRGDHCHHPLNHGFDYFYGMPFTLTNDCDPGRPPEVDAALRAQLWGYTQFLALGILTLAAGQTCGFFSVSARAVTGMAGVGCLFFISWYSSFGFVRRWNCILMRNHDVTEQPMVLEKTASLMLKEAVSYIERHKHGPFLLFLSLLHVHIPLVTTSAFLGKSQHGLYGDNVEEMDWLIGKVLNAIEDNGLKNSTFTYFTSDHGGHLEARDGHSQLGGWNGIYKGGKGMGGWEGGIRVPGIFHWPGVLPAGRVIGEPTSLMDVFPTVVQLVGGEVPQDRVIDGHSLVPLLQGAEARSAHEFLFHYCGQHLHAARWHQKDSGSVWKVHYTTPQFHPEGAGACYGRGVCPCSGEGVTHHRPPLLFDLSRDPSEARPLTPDSEPLYHAVIARVGAAVSEHRQTLSPVPQQFSMSNILWKPWLQPCCGHFPFCSCHEDGDGTP

SEQ ID NO: 12505 - protein, 382 aa, Homo sapiens
MRSAARRGRAAPAARDSLPVLLFLCLLLKTCEPKTANAFKPNILLIMADDLGTGDLGCYGNNTLRTPNIDQLAEEGVRLTQHLAAAPLCTPSRAAFLTGRHSFRSGMDASNGYRALQWNAGSGGLPENETTFARILQQHGYATGLIGKWHQGVNCASRGDHCHHPLNHGFDYFYGMPFTLTNDCDPGRPPEVDAALRAQLWGYTQFLALGILTLAAGQTCGFFSVSARAVTGMAGVGCLFFISWYSSFGFVRRWNCILMRNHDVTEQPMVLEKTASLMLKEAVSYIERHKHGPFLLFLSLLHVHIPLVTTSAFLGKSQHGLYGDNVEEMDWLIASDFMSSSEVTESEAIKLMFRTMQRRCLPSMAFKKPWRGPVRLQILKRA

SEQ ID NO: 12506 - protein, 503 aa, Homo sapiens
MRSAARRGRAAPAARDSLPVLLFLCLLLKTCEPKTANAFKPNILLIMADDLGTGDLGCYGNNTLRTPNIDQLAEEGVRLTQHLAAAPLCTPSRAAFLTGRHSFRSGMDASNGYRALQWNAGSGGLPENETTFARILQQHGYATGLIGKWHQGVNCASRGDHCHHPLNHGFDYFYGMPFTLTNDCDPGRPPEVDAALRAQLWGYTQFLALGILTLAAGQTCGFFSVSARAVTGMAGVGCLFFISWYSSFGFVRRWNCILMRNHDVTEQPMVLEKTASLMLKEAVSYIERHKHGPFLLFLSLLHVHIPLVTTSAFLGKSQHGLYGDNVEEMDWLIGKVLNAIEDNGLKNSTFTYFTSDHGGHLEARDGHSQLGGWNGIYKGGKGMGGWEGGIRVPGIFHWPGVLPAGRVIGEPTSLMDVFPTVVQLVGGEVPQDRVIDGHSLVPLLQGAEARSAHEFLFHYCGQHLHAARWHQKDSGSVWKVHYTTPQFHPEGAGACYGRGVCPC

SEQ ID NO: 12507 - protein, 590 aa, Homo sapiens
MRPRRPLVFMSLVCALLNTCQAHRVHDDKPNIVLIMVDDLGIGDLGCYGNDTMRTPHIDRLAREGVRLTQHISAASLCSPSRSAFLTGRYPIRSGMVSSGNRRVIQNLAVPAGLPLNETTLAALLKKQGYSTGLIGKWHQGLNCDSRSDQCHHPYNYGFDYYYGMPFTLVDSCWPDPSRNTELAFESQLWLCVQLVAIAILTLTFGKLSGWVSVPWLLIFSMILFIFLLGYAWFSSHTSPLYWDCLLMRGHEITEQPMKAERAGSIMVKEAISFLERHSKETFLLFFSFLHVHTPLPTTDDFTGTSKHGLYGDNVEEMDSMVGKILDAIDDFGLRNNTLVYFTSDHGGHLEARRGHAQLGGWNGIYKGGKGMGGWEGGIRVPGIVRWPGKVPAGRLIKEPTSLMDILPTVASVSGGSLPQDRVIDGRDLMPLLQGNVRHSEHEFLFHYCGSYLHAVRWIPKDDSGSVWKAHYVTPVFQPPASGGCYVTSLCRCFGEQVTYHNPPLLFDLSRDPSESTPLTPATEPLHDFVIKKVANALKEHQETIVPVTYQLSELNQGRTWLKPCCGVFPFCLCDKEEEVSQPRGPNEKR

SEQ ID NO: 12508 - protein, 599 aa, Homo sapiens
MAPRGCAGHPPPPSPQACVCPGKMLAMGALAGFWILCLLTYGYLSWGQALEEEEEGALLAQAGEKLEPSTTSTSQPHLIFILADDQGFRDVGYHGSEIKTPTLDKLAAEGVKLENYYVQPICTPSRSQFITGKYQIHTGLQHSIIRPTQPNCLPLDNATLPQKLKEVGYSTHMVGKWHLGFYRKECMPTRRGFDTFFGSLLGSGDYYTHYKCDSPGMCGYDLYENDNAAWDYDNGIYSTQMYTQRVQQILASHNPTKPIFLYIAYQAVHSPLQAPGRYFEHYRSIININRRRYAAMLSCLDEAINNVTLALKTYGFYNNSIIIYSSDNGGQPTAGGSNWPLRGSKGTYWEGGIRAVGFVHSPLLKNKGTVCKELVHITDWYPTLISLAEGQIDEDIQLDGYDIWETISEGLRSPRVDILHNIDPIYTKAKNGSWAAGYGIWNTAIQSAIRVQHWKLLTGNPGYSDWVPPQSFSNLGPNRWHNERITLSTGKSVWLFNITADPYERVDLSNRYPGIVKKLLRRLSQFNKTAVPVRYPPKDPRSNPRLNGGVWGPWYKEETKKKKPSKNQAEKKQKKSKKKKKKQQKAVSGSTCHSGVTCG

SEQ ID NO: 12509 - protein, 441 aa, Homo sapiens
MAVVPASLSGQDVGSFAYLTIKDRIPQILTKVIDTLHRHKSEFFEKHGEEGVEAEKKAISLLSKLRNELQTDKPFIPLVEKFVDTDIWNQYLEYQQSLLNESDGKSRWFYSPWLLVECYMYRRIHEAIIQSPPIDYFDVFKESKEQNFYGSQESIIALCTHLQQLIRTIEDLDENQLKDEFFKLLQISLWGNKCDLSLSGGESSSQNTNVLNSLEDLKPFILLNDMEHLWSLLSNCKKTREKASATRVYIVLDNSGFELVTDLILADFLLSSELATEVHFYGKTIPWFVSDTTIHDFNWLIEQVKHSNHKWMSKCGADWEEYIKMGKWVYHNHIFWTLPHEYCAMPQVAPDLYAELQKAHLILFKGDLNYRKLTGDRKWEFSVPFHQALNGFHPAPLCTIRTLKAEIQVGLQPGQGEQLLASEPSWWTTGKYGIFQYDGPL

SEQ ID NO: 12510 - protein, 379 aa, Homo sapiens
MGYARKVGWVTAGLVIGAGACYCIYRLTRGRKQNKEKMAEGGSGDVDDAGDCSGARYNDWSDDDDDSNESKSIVWYPPWARIGTEAGTRARARARARATRARRAVQKRASPNSDDTVLSPQELQKVLCLVEMSEKPYILEAALIALGNNAAYAFNRDIIRDLGGLPIVAKILNTRDPIVKEKALIVLNNLSVNAENQRRLKVYMNQVCDDTITSRLNSSVQLAGLRLLTNMTVTNEYQHMLANSISDFFRLFSAGNEETKLQVLKLLLNLAENPAMTRELLRAQVPSSLGSLFNKKENKEVILKLLVIFENINDNFKWEENEPTQNQFGEGSLFFFLKEFQVCADKVLGIESHHDFLVKVKVGKFMAKLAEHMFPKSQE

SEQ ID NO: 12511 - protein, 632 aa, Homo sapiens
MNRYTTIRQLGDGTYGSVLLGRSIESGELIAIKKMKRKFYSWEECMNLREVKSLKKLNHANVVKLKEVIRENDHLYFIFEYMKENLYQLIKERNKLFPESAIRNIMYQILQGLAFIHKHGFFHRDLKPENLLCMGPELVKIADFGLAREIRSKPPYTDYVSTRWYRAPEVLLRSTNYSSPIDVWAVGCIMAEVYTLRPLFPGASEIDTIFKICQVLGTPKKTDWPEGYQLSSAMNFRWPQCVPNNLKTLIPNASSEAVQLLRDMLQWDPKKRPTASQALRYPYFQVGHPLGSTTQNLQDSEKPQKGILEKAGPPPYIKPVPPAQPPAKPHTRISSRQHQASQPPLHLTYPYKAEVSRTDHPSHLQEDKPSPLLFPSLHNKHPQSKITAGLEHKNGEIKPKSRRRWGLISRSTKDSDDWADLDDLDFSPSLSRIDLKNKKRQSDDTLCRFESVLDLKPSEPVGTGNSAPTQTSYQRRDTPTLRSAAKQHYLKHSRYLPGISIRNGILSNPGKEFIPPNPWSSSGLSGKSSGTMSVISKVNSVGSSSTSSSGLTGNYVPSFLKKEIGSAMQRVHLAPIPDPSPGYSSLKAMRPHPGRPFFHTQPRSTPGLIPRPPAAQPVHGRTDWASKYASRR

SEQ ID NO: 12512 - protein, 292 aa, Homo sapiens
MNRYTTIRQLGDGTYGSVLLGRSIESGELIAIKKMKRKFYSWEECMNLREVKSLKKLNHANVVKLKEVIRENDHLYFIFEYMKENLYQLIKERNKLFPESAIRNIMYQILQGLAFIHKHGFFHRDLKPENLLCMGPELVKIADFGLAREIRSKPPYTDYVSTRWYRAPEVLLRSTNYSSPIDVWAVGCIMAEVYTLRPLFPGASEIDTIFKICQVLGTPKKTDWPEGYQLSSAMNFRWPQCVPNNLKTLIPNASSEAVQLLRDMLQWDPKKRPTASQVFFHFLVITFISNSE

SEQ ID NO: 12513 - protein, 121 aa, Homo sapiens
MFNKCSFHSSIYRPAADNSASSLCAIICFLNLVIECDLETNSEINKLIIYLFSQNNRIRFSKLLLKILFYISIFSYPELMCEQYVTFIKPGIHYGQVSKKHIIYSTFLSKNFKFQLLRVCW

SEQ ID NO: 12514 - protein, 204 aa, Homo sapiens
MEPKASCPAAAPLMERKFHVLVGVTGSVAALKLPLLVSKLLDIPGLEVAVVTTERAKHFYSPQDIPVTLYSDADEWEIWKSRSDPVLHIDLRRWADLLLVAPLDANTLGKVASGICDNLLTCVMRAWDRSKPLLFCPAMNTAMWEHPITAQQVDQLKAFGYVEIPCVAKKLVCGDEGLGAMAEVGTIVDKVKEVLFQHSGFQQS

SEQ ID NO: 12515 - protein, 127 aa, Homo sapiens
MWKSRSDPVLHIDLRRWADLLLVAPLDANTLGKVASGICDNLLTCVMRAWDRSKPLLFCPAMNTAMWEHPITAQQVDQLKAFGYVEIPCVAKKLVCGDEGLGAMAEVGTIVDKVKEVLFQHSGFQQS

SEQ ID NO: 12516 - protein, 290 aa, Homo sapiens
MPLLTLYLLLFWLSGYSIVTQITGPTTVNGLERGSLTVQCVYRSGWETYLKWWCRGAIWRDCKILVKTSGSEQEVKRDRVSIKDNQKNRTFTVTMEDLMKTDADTYWCGIEKTGNDLGVTVQVTIDPAPVTQEETSSSPTLTGHHLDNRHKLLKLSVLLPLIFTILLLLLVAASLLAWRMMKYQQKAAGMSPEQVLQPLEGDLCYADLTLQLAGTSPQKATTKLSSAQVDQVEVEYVTMASLPKEDISYASLTLGAEDQEPTYCNMGHLSSHLPGRGPEEPTEYSTISRP

SEQ ID NO: 12517 - protein, 239 aa, Homo sapiens
MWLPQLDLMRVISAKSQGYSIVTQITGPTTVNGLERGSLTVQCVYRSGWETYLKWWCRGAIWRDCKILVKTSGSEQEVKRDRVSIKDNQKNRTFTVTMEDLMKTDADTYWCGIEKTGNDLGVTVQVTIDPASTPAPTTPTSTTFTAPVTQEETSSSPTLTGHHLDNRHKLLKLSVLLPLIFTILLLLLVAASLLAWRMMKYQQKGTAAPGGRPLLCRPDPAAGRNLPAKGYHEAFLCPG

SEQ ID NO: 12518 - protein, 165 aa, Homo sapiens
MWLPQLDLMRVISAKSQGYSIVTQITGPTTVNGLERGSLTVQCVYRSGWETYLKWWCRGAIWRDCKILVKTSGSEQEVKRDRVSIKDNQKNRTFTVTMEDLMKTDADTYWCGIEKTGNDLGVTVQVTIDPAPVTQEETSSSPTLTGHHLDNRYCSPWRATSAMQT

SEQ ID NO: 12519 - protein, 194 aa, Homo sapiens
MWLPQLDLMRVISAKSQGYSIVTQITGPTTVNGLERGSLTVQCVYRSGWETYLKWWCRGAIWRDCKILVKTSGSEQEVKRDRVSIKDNQKNRTFTVTMEDLMKTDADTYWCGIEKTGNDLGVTVQVTIDPAPVTQEETSSSPTLTGHHLDNSSRDVPRAGTAAPGGRPLLCRPDPAAGRNLPAKGYHEAFLCPG

SEQ ID NO: 12520 - protein, 244 aa, Homo sapiens
MPLLTLYLLLFWLSGYSIVTQITGPTTVNGLERGSLTVQCVYRSGWETYLKWWCRGAIWRDCKILVKTSGSEQEVKRDRVSIKDNQKNRTFTVTMEDLMKTDADTYWCGIEKTGNDLGVTVQVTIDPAPVTQEETSSSPTLTGHHLDNRSEGSQAANYRPAAHQAQAPEAQCPPAPHLHHIAAAFGGRLTLGLEDDEVPAESSRDVPRAGTAAPGGRPLLCRPDPAAGRNLPAKGYHEAFLCPG

SEQ ID NO: 12521 - protein, 293 aa, Homo sapiens
MWLPQLDLMRVISAKSQGYSIVTQITGPTTVNGLERGSLTVQCVYRSGWETYLKWWCRGAIWRDCKILVKTSGSEQEVKRDRVSIKDNQKNRTFTVTMEDLMKTDADTYWCGIEKTGNDLGVTVQVTIDPAPVTQEETSSSPTLTGHHLDNRHKLLKLSVLLPLIFTILLLLLVAASLLAWRMMKYQQKAAGMSPEQVLQPLEGDLCYADLTLQLAGTSPQKATTKLSSAQVDQVEVEYVTMASLPKEDISYASLTLGAEDQEPTYCNMGHLSSHLPGRGPEEPTEYSTISRP

SEQ ID NO: 12522 - protein, 575 aa, Homo sapiens
MSQDTKVKTTESSPPAPSKARKLLPVLDPSGDYYYWWLNTMVFPVMYNLIILVCRACFPDLQHGYLVAWLVLDYTSDLLYLLDMVVRFHTGFLEQGILVVDKGRISSRYVRTWSFFLDLASLMPTDVVYVRLGPHTPTLRLNRFLRAPRLFEAFDRTETRTAYPNAFRIAKLMLYIFVVIHWNSCLYFALSRYLGFGRDAWVYPDPAQPGFERLRRQYLYSFYFSTLILTTVGDTPPPAREEEYLFMVGDFLLAVMGFATIMGSMSSVIYNMNTADAAFYPDHALVKKYMKLQHVNRKLERRVIDWYQHLQINKKMTNEVAILQHLPERLRAEVAVSVHLSTLSRVQIFQNCEASLLEELVLKLQPQTYSPGEYVCRKGDIGQEMYIIREGQLAVVADDGITQYAVLGAGLYFGEISIINIKGNMSGNRRTANIKSLGYSDLFCLSKEDLREVLSEYPQAQTIMEEKGREILLKMNKLDVNAEAAEIALQEATESRLRGLDQQLDDLQTKFARLLAELESSALKIAYRIERLEWQTREWPMPEDLAEADDEGEPEEGTSKDEEGRASQEGPPGPE

SEQ ID NO: 12523 - protein, 416 aa, Homo sapiens
MVFPVMYNLIILVCRACFPDLQHGYLVAWLVLDYTSDLLYLLDMVVRFHTGFLEQGILVVDKGRISSRYVRTWSFFLDLASLMPTDVVYVRLGPHTPTLRLNRFLRAPRLFEAFDRTETRTAYPNAFRIAKLMLYIFVVIHWNSCLYFALSRYLGFGRDAWVYPDPAQPGFERLRRQYLYSFYFSTLILTTVGDTPPPAREEEYLFMVGDFLLAVMGFATIMGSMSSVIYNMNTADAAFYPDHALVKKYMKLQHVNRKLERRVIDWYQHLQINKKMTNEVAILQHLPERLRAEVAVSVHLSTLSRVQIFQNCEASLLEELVLKLQPQTYSPGEYVCRKGDIGQEMYIIREGQLAVVADDGITQYAVLGAGLYFGEISIINIKGGYPSICSRDKDGWGRGEQQSPVLGPDSTSGLNF

SEQ ID NO: 12524 - protein, 194 aa, Homo sapiens
MWLSPSLLLLILPGYSIAAKITGPTTVNGSEQGSLTVQCAYGSGWETYLKWRCQGADWNYCNILVKTNGSEQEVKKNRVSIRDNQKNHVFTVTMENLKRDDADSYWCGTERPGIDLGVKVQVTINPGTQTAVSEWTTTTASLAFTAAATQKTSSPLTRSPLKSTHFLFLFLLELPLLLSMLGTVLWVNRPQRRS

SEQ ID NO: 12525 - protein, 248 aa, Homo sapiens
MAELDPFGAPAGAPGGPALGNGVAGAGEEDPAAAFLAQQESEIAGIENDEAFAILDGGAPGPQPHGEPPGGPDAVDGVMNGEYYQESNGPTDSYAAISQVDRLQSEPESIRKWREEQMERLEALDANSRKQEAEWKEKAIKELEEWYARQDEQLQKTKANNRVADEAFYKQPFADVIGYVTNINHPCYSLEQAAEEAFVNDIDESSPGTEWERVARLCDFNPKSSKQAKDVSRMRSVLISLKQAPLVH

SEQ ID NO: 12526 - protein, 218 aa, Homo sapiens
MAELDPFGAPAGAPGGPALGNGVAGAGEEDPAAAFLAQQESEIAGIENDEAFAILDGGAPGPQPHGEPPGGPDAVDGVMNGEYYQESNGPTDSYAAISQVDRLQSEPESIRKWREEQMERLEALDANSRKQEAEWKEKAIKELEEWYARQDEQLQKTKANNRAAEEAFVNDIDESSPGTEWERVARLCDFNPKSSKQAKDVSRMRSVLISLKQAPLVH

SEQ ID NO: 12527 - protein, 236 aa, Homo sapiens
MAELDPFGAPAGAPGGPALGNGVAGAGEEDPAAAFLAQQESEIAGIENDEAFAILDGGAPGPQPHGEPPGGPDAVDGVMNGEYYQESNGPTDSYAAISQVDRLQSEPESIRKWREEQMERLEALDANSRKQEAEWKEKAIKELEEWYARQDEQLQKTKANNRVADEAFYKQPFADVIGYVAAEEAFVNDIDESSPGTEWERVARLCDFNPKSSKQAKDVSRMRSVLISLKQAPLVH

SEQ ID NO: 12528 - protein, 230 aa, Homo sapiens
MAELDPFGAPAGAPGGPALGNGVAGAGEEDPAAAFLAQQESEIAGIENDEAFAILDGGAPGPQPHGEPPGGPDAVDGVMNGEYYQESNGPTDSYAAISQVDRLQSEPESIRKWREEQMERLEALDANSRKQEAEWKEKAIKELEEWYARQDEQLQKTKANNSTNINHPCYSLEQAAEEAFVNDIDESSPGTEWERVARLCDFNPKSSKQAKDVSRMRSVLISLKQAPLVH

SEQ ID NO: 12529 - protein, 166 aa, Homo sapiens
MAELDPFGAPAGAPGGPALGNGVAGAGEEDPAAAFLAQQESEIAGIENDEAFAILDGGAPGPQPHGEPPGGPDANSRKQEAEWKEKAIKELEEWYARQDEQLQKTKANNRAAEEAFVNDIDESSPGTEWERVARLCDFNPKSSKQAKDVSRMRSVLISLKQAPLVH

SEQ ID NO: 12530 - protein, 1147 aa, Homo sapiens
MADQIPLYPVRSAAAAAANRKRAAYYSAAGPRPGADRHSRYQLEDESAHLDEMPLMMSEEGFENEESDYHTLPRARIMQRKRGLEWFVCDGWKFLCTSCCGWLINICRRKKELKARTVWLGCPEKCEEKHPRNSIKNQKYNVFTFIPGVLYEQFKFFLNLYFLVISCSQFVPALKIGYLYTYWAPLGFVLAVTMTREAIDEFRRFQRDKEVNSQLYSKLTVRGKVQVKSSDIQVGDLIIVEKNQRIPSDMVFLRTSEKAGSCFIRTDQLDGETDWKLKVAVSCTQQLPALGDLFSISAYVYAQKPQMDIHSFEGTFTREDSDPPIHESLSIENTLWASTIVASGTVIGVVIYTGKETRSVMNTSNPKNKVGLLDLELNRLTKALFLALVALSIVMVTLQGFVGPWYRNLFRFLLLFSYIIPISLRVNLDMGKAVYGWMMMKDENIPGTVVRTSTIPEELGRLVYLLTDKTGTLTQNEMIFKRLHLGTVSYGADTMDEIQSHVRDSYSQMQSQAGGNNTGSTPLRKAQSSAPKVRKSVSSRIHEAVKAIVLCHNVTPVYESRAGVTEETEFAEADQDFSDENRTYQASSPDEVALVQWTESVGLTLVSRDLTSMQLKTPSGQVLSFCILQLFPFTSESKRMGVIVRDESTAEITFYMKGADVAMSPIVQYNDWLEEECGNMAREGLRTLVVAKKALTEEQYQDFESRYTQAKLSMHDRSLKVAAVVESLEREMELLCLTGVEDQLQADVRPTLEMLRNAGIKIWMLTGDKLETATCIAKSSHLVSRTQDIHIFRQVTSRGEAHLELNAFRRKHDCALVISGDSLEVCLKYYEHEFVELACQCPAVVCCRCSPTQKARIVTLLQQHTGRRTCAIGDGGNDVSMIQAADCGIGIEGKEGKQASLAADFSITQFRHIGRLLMVHGRNSYKRSAALGQFVMHRGLIISTMQAVFSSVFYFASVPLYQGFLMVGYATIYTMFPVFSLVLDQDVKPEMAMLYPELYKDLTKGRSLSFKTFLIWVLISIYQGGILMYGALVLFESEFVHVVAISFTALILTELLMVALTVRTWHWLMVVAEFLSLGCYVSSLAFLNEYFGIGRVSFGAFLDVAFITTVTFLWKVSAITVVSCLPLYVLKYLRRKLSPPSYCKLAS

SEQ ID NO: 12531 - protein, 1136 aa, Homo sapiens
MADQIPLYPVRSAAAAAANRKRAAYYSAAGPRPGADRHSRYQLEDESAHLDEMPLMMSEEGFENEESDYHTLPRARIMQRKRGLEWFVCDGWKFLCTSCCGWLINICRRKKELKARTVWLGCPEKCEEKHPRNSIKNQKYNVFTFIPGVLYEQFKFFLNLYFLVISCSQFVPALKIGYLYTYWAPLGFVLAVTMTREAIDEFRRFQRDKEVNSQLYSKLTVRGKVQVKSSDIQVGDLIIVEKNQRIPSDMVFLRTSEKAGSCFIRTDQLDGETDWKLKVAVSCTQQLPALGDLFSISAYVYAQKPQMDIHSFEGTFTREDSDPPIHESLSIENTLWASTIVASGTVIGVVIYTGKETRSVMNTSNPKNKVGLLDLELNRLTKALFLALVALSIVMVTLQGFVGPWYRNLFRFLLLFSYIIPISLRVNLDMGKAVYGWMMMKDENIPGTVVRTSTIPEELGRLVYLLTDKTGTLTQNEMIFKRLHLGTVSYGADTMDEIQSHVRDSYSQMQSQAGGNNTGSTPLRKAQSSAPKVRKSVSSRIHEAVKAIVLCHNVTPVYESRAGVTEETEFAEADQDFSDENRTYQASSPDEVALVQWTESVGLTLVSRDLTSMQLKTPSGQVLSFCILQLFPFTSESKRMGVIVRDESTAEITFYMKGADVAMSPIVQYNDWLEEECGNMAREGLRTLVVAKKALTEEQYQDFESRYTQAKLSMHDRSLKVAAVVESLEREMELLCLTGVEDQLQADVRPTLEMLRNAGIKIWMLTGDKLETATCIAKSSHLVSRTQDIHIFRQVTSRGEAHLELNAFRRKHDCALVISGDSLEVCLKYYEHEFVELACQCPAVVCCRCSPTQKARIVTLLQQHTGRRTCAIGDGGNDVSMIQAADCGIGIEGKEGKQASLAADFSITQFRHIGRLLMVHGRNSYKRSAALGQFVMHRGLIISTMQAVFSSVFYFASVPLYQGFLMVGYATIYTMFPVFSLVLDQDVKPEMAMLYPELYKDLTKGRSLSFKTFLIWVLISIYQGGILMYGALVLFESEFVHVVAISFTALILTELLMVALTVRTWHWLMVVAEFLSLGCYVSSLAFLNEYFDVAFITTVTFLWKVSAITVVSCLPLYVLKYLRRKLSPPSYCKLAS

SEQ ID NO: 12532 - protein, 538 aa, Homo sapiens
MWSGRSSFTSLVVGVFVVYVVHTCWVMYGIVYTRPCSGDANCIQPYLARRPKLQLSVYTTTRSHLGAENNIDLVLNVEDFDVESKFERTVNVSVPKKTRNNGTLYAYIFLHHAGVLPWHDGKQVHLVSPLTTYMVPKPEEINLLTGESDTQQIEAEKKPTSALDEPVSHWRPRLALNVMADNFVFDGSSLPADVHRYMKMIQLGKTVHYLPILFIDQLSNRVKDLMVINRSTTELPLTVSYDKVSLGRLRFWIHMQDAVYSLQQFGFSEKDADEVKGIFVDTNLYFLALTFFVAAFHLLFDFLAFKNDISFWKKKKSMIGMSTKAVLWRCFSTVVIFLFLLDEQTSLLVLVPAGVGAAIELWKVKKALKMTIFWRGLMPEFQFGTYSESERKTEEYDTQAMKYLSYLLYPLCVGGAVYSLLNIKYKSWYSWLINSFVNGVYAFGFLFMLPQLFVNYKLKSVAHLPWKAFTYKAFNTFIDDVFAFIITMPTSHRLACFRDDVVFLVYLYQRWLYPVDKRRVNEFGESYEEKATRAPHTD

SEQ ID NO: 12533 - protein, 502 aa, Homo sapiens
MWSGRSSFTSLVVGVFVVYVVHTCWVMYGIVYTRPCSGDANCIQPYLARRPKLQLSVYTTTRSHLGAENNIDLVLNVEDFDVESKFERTVNVSVPKKTRNNGTLYAYIFLHHAGVLPWHDGKQVHLVSPLTTYMVPKPEEINLLTGESDTQQIEAEKKPTSALDEPVSHWRPRLALNVMADNFVFDGSSLPADVHRYMKMIQLGKTVHYLPILFIDQLSNRVKDLMVINRSTTELPLTVSYDKVSLGRLRFWIHMQDAVYSLQQFGFSEKDADEVKGIFVDTNLYFLALTFFVAAFHLLFDFLAFKNDISFWKKKKSMIGMSTKLWKVKKALKMTIFWRGLMPEFQFGTYSESERKTEEYDTQAMKYLSYLLYPLCVGGAVYSLLNIKYKSWYSWLINSFVNGVYAFGFLFMLPQLFVNYKLKSVAHLPWKAFTYKAFNTFIDDVFAFIITMPTSHRLACFRDDVVFLVYLYQRWLYPVDKRRVNEFGESYEEKATRAPHTD

SEQ ID NO: 12534 - protein, 212 aa, Homo sapiens
MEAKTLGTVTPRKPVLSVSARKIKDNAADWHNLILKWETLNDAGFTTANNIANLKISLLNKDKIELDSSSPASKENEEKVCLEYNEELEKLCEELQATLDGLTKIQVKMEKLSSTTKGICELENYHYGEESKRPPLFHTWPTTHFYEVSHKLLEMYRKELLLKRTVAKELAHTGDPDLTLSYLSMWLHQPYVESDSRLHLESMLLETGHRAL

SEQ ID NO: 12535 - protein, 118 aa, Homo sapiens
MEAKTLGTVTPRKPVLSVSARKIKDNAADWHNLILKWETLNDAGFTTANNIANLKISLLNKDKIELDSSSPASKENEEKVCLEYNEELEKLCEELQATLDGLMRFRISSWRCTGRSCS

SEQ ID NO: 12536 - protein, 227 aa, Homo sapiens
MNGTIYANECQQIRHPNSKTLGTVTPRKPVLSVSARKIKDNAADWHNLILKWETLNDAGFTTANNIANLKISLLNKDKIELDSSSPASKENEEKVCLEYNEELEKLCEELQATLDGLTKIQVKMEKLSSTTKGICELENYHYGEESKRPPLFHTWPTTHFYEVSHKLLEMYRKELLLKRTVAKELAHTGDPDLTLSYLSMWLHQPYVESDSRLHLESMLLETGHRAL

SEQ ID NO: 12537 - protein, 1379 aa, Homo sapiens
METGGRARTGTPQPAAPGVWRARPAGGGGGGASSWLLDGNSWLLCYGFLYLALYAQVSQSKPCERTGSCFSGRCVNSTCLCDPGWVGDQCQHCQGRFKLTEPSGYLTDGPINYKYKTKCTWLIEGYPNAVLRLRFNHFATECSWDHMYVYDGDSIYAPLIAVLSGLIVPEIRGNETVPEVVTTSGYALLHFFSDAAYNLTGFNIFYSINSCPNNCSGHGKCTTSVSVPSQVYCECDKYWKGEACDIPYCKANCGSPDHGYCDLTGEKLCVCNDSWQGPDCSLNVPSTESYWILPNVKPFSPSVGRASHKAVLHGKFMWVIGGYTFNYSSFQMVLNYNLESSIWNVGTPSRGPLQRYGHSLALYQENIFMYGGRIETNDGNVTDELWVFNIHSQSWSTKTPTVLGHGQQYAVEGHSAHIMELDSRDVVMIIIFGYSAIYGYTSSIQEYHISSNTWLVPETKGAIVQGGYGHTSVYDEITKSIYVHGGYKALPGNKYGLVDDLYKYEVNTKTWTILKESGFARYLHSAVLINGAMLIFGGNTHNDTSLSNGAKCFSADFLAYDIACDEWKILPKPNLHRDVNRFGHSAVVINGSMYIFGGFSSVLLNDILVYKPPNCKAFRDEELCKNAGPGIKCVWNKNHCESWESGNTNNILRAKCPPKTAASDDRCYRYADCASCTANTNGCQWCDDKKCISANSNCSMSVKNYTKCHVRNEQICNKLTSCKSCSLNLNCQWDQRQQECQALPAHLCGEGWSHIGDACLRVNSSRENYDNAKLYCYNLSGNLASLTTSKEVEFVLDEIQKYTQQKVSPWVGLRKINISYWGWEDMSPFTNTTLQWLPGEPNDSGFCAYLERAAVAGLKANPCTSMANGLVCEKPVVSPNQNARPCKKPCSLRTSCSNCTSNGMECMWCSSTKRCVDSNAYIISFPYGQCLEWQTATCSPQNCSGLRTCGQCLEQPGCGWCNDPSNTGRGHCIEGSSRGPMKLIGMHHSEMVLDTNLCPKEKNYEWSFIQCPACQCNGHSTCINNNVCEQCKNLTTGKQCQDCMPGYYGDPTNGGQCTACTCSGHANICHLHTGKCFCTTKGIKGDQCQLCDSENRYVGNPLRGTCYYSLLIDYQFTFSLLQEDDRHHTAINFIANPEQSNKNLDISINASNNFNLNITWSVGSTAGTISGEETSIVSKNNIKEYRDSFSYEKFNFRSNPNITFYVYVSNFSWPIKIQIAFSQHNTIMDLVQFFVTFFSCFLSLLLVAAVVWKIKQTCWASRRREQLLRERQQMASRPFASVDVALEVGAEQTEFLRGPLEGAPKPIAIEPCAGNRAAVLTVFLCLPRGSSGAPPPGQSGLAIASALIDISQQKASDSKDKTSGVRNRKHLSTRQGTCV

SEQ ID NO: 12538 - protein, 467 aa, Homo sapiens
METGGRARTGTPQPAAPGVWRARPAGGGGGGASSWLLDGNSWLLCYGFLYLALYAQVSQSKPCERTGSCFSGRCVNSTCLCDPGWVGDQCQHCQGRFKLTEPSGYLTDGPINYKYKTKCTWLIEGYPNAVLRLRFNHFATECSWDHMYVYDGDSIYAPLIAVLSGLIVPEIRGNETVPEVVTTSGYALLHFFSDAAYNLTGFNIFYSINSCPNNCSGHGKCTTSVSVPSQVYCECDKYWKGEACDIPYCKANCGSPDHGYCDLTGEKLCVCNDSWQGPDCSLNVPSTESYWILPNVKPFSPSVGRASHKAVLHGKFMWVIGGYTFNYSSFQMVLNYNLESSIWNVGTPSRGPLQRYGHSLALYQENIFMYGGRIETNDGNVTDELWVFNIHSQSWSTKTPTVLGHGQQYAVEGHSAHIMELDSRDVVMIIIFGYSAIYGYTSSIQEYHICELLKNCNFFIDWECFSL

SEQ ID NO: 12539 - protein, 988 aa, Homo sapiens
MEQSRSQQRGGEQSWWGSDPQYQYMPFEHCTSYGLPSENGGLQHRLRKDAGPRHNVHPTQIYGHHKEQFSDREQDIGMPKKTGSSSTVDSKDEDHYSKCQDCIHRLGQVVRRKLGEDGIFLVLLGLLMALVSWSMDYVSAKSLQAYKWSYAQMQPSLPLQFLVWVTFPLVLILFSALFCHLISPQAVGSGIPEMKTILRGVVLKEYLTMKAFVAKVVALTAGLGSGIPVGKEGPFVHIASICAAVLSKFMSVFCGVYEQPYYYSDILTVGCAVGVGCCFGTPLGGVLFSIEVTSTYFAVRNYWRGFFAATFSAFVFRVLAVWNKDAVTITALFRTNFRMDFPFDLKELPAFAAIGICCGLLGAVFVYLHRQVMLGVRKHKALSQFLAKHRLLYPGIVTFVIASFTFPPGMGQFMAGELMPREAISTLFDNNTWVKHAGDPESLGQSAVWIHPRVNVVIIIFLFFVMKFWMSIVATTMPIPCGGFMPVFVLGAAFGRLVGEIMAMLFPDGILFDDIIYKILPGGYAVIGAAALTGAVSHTVSTAVICFELTGQIAHILPMMVAVILANMVAQSLQPSLYDSIIQVKKLPYLPDLGWNQLSKYTIFVEDIMVRDVKFVSASYTYGELRTLLQTTTVKTLPLVDSKDSMILLGSVERSELQALLQRHLCPERRLRAAQEMARKLSELPYDGKARLAGEGLPGAPPGRPESFAFVDEDEDEDLSGKSELPPSLALHPSTTAPLSPEEPNGPLPGHKQQPEAPEPAGQRPSIFQSLLHCLLGRARPTKKKTTQDSTDLVDNMSPEEIEAWEQEQLSQPVCFDSCCIDQSPFQLVEQTTLHKTHTLFSLLGLHLAYVTSMGKLRGVLALEELQKAIEGHTKSGVQLRPPLASFRNTTSTRKSTGAPPSSAENWNLPEDRPGATGTGDVIAASPETPVPSPSPEPPLSLAPGKVEGELEELELVESPGLEEELADILQGPSLRSTDEEDEDELIL

SEQ ID NO: 12540 - protein, 219 aa, Homo sapiens
MASAGLQLLAFILALSGVSGVLTATLLPNWKVNVDVDSNIITAIVQLHGLWMDCTWYSTGMFSCALKHSILSLPIHVQAARATMVLACVLSALGICTSTVGMKCTRLGGDRETKSHASFAGGVCFMSAGISSLISTVWYTKEIIANFLDLTVPESNKHEPGGAIYIGFISAMLLFISGMIFCTSCIKRNPEARLDPPTQQPISNTQLENNSTHNLKDYV

SEQ ID NO: 12541 - protein, 220 aa, Homo sapiens
MALVFRTVAQLAGVSLSLLGWVLSCLTNYLPHWKNLNLDLNEMENWTMGLWQTCVIQEEVGMQCKDFDSFLALPAELRVSRILMFLSNGLGFLGLLVSGFGLDCLRIGESQRDLKRRLLILGGILSWASGVTALVPVSWVAHKTVQEFWDENVPDFVPRWEFGEALFLGWFAGLSLLLGGCLLHCAACSSHAPLASGHYAVAQTQDHHQELETRNTNLKH

SEQ ID NO: 12542 - protein, 292 aa, Homo sapiens
MRTPVVMTLGMVLAPCGLLLNLTGTLAPGWRLVKGFLNQPVDVELYQGLWDMCREQSSRERECGQTDQWGYFEAQPVLVARALMVTSLAATVLGLLLASLGVRCWQDEPNFVLAGLSGVVLFVAGLLGLIPVSWYNHFLGDRDVLPAPASPVTVQVSYSLVLGYLGSCLLLLGGFSLALSFAPWCDERCRRRRKGPSAGPRRSSVSTIQVEWPEPDLAPAIKYYSDGQHRPPPAQHRKPKPKPKVGFPMPRPRPKAYTNSVDVLDGEGWESQDAPSCSTHPCDSSLPCDSDL

SEQ ID NO: 12543 - protein, 1594 aa, Homo sapiens
MPCAQRSWLANLSVVAQLLNFGALCYGRQPQPGPVRFPDRRQEHFIKGLPEYHVVGPVRVDASGHFLSYGLHYPITSSRRKRDLDGSEDWVYYRISHEEKDLFFNLTVNQGFLSNSYIMEKRYGNLSHVKMMASSAPLCHLSGTVLQQGTRVGTAALSACHGLTGFFQLPHGDFFIEPVKKHPLVEGGYHPHIVYRRQKVPETKEPTCGLKDSVNISQKQELWREKWERHNLPSRSLSRRSISKERWVETLVVADTKMIEYHGSENVESYILTIMNMVTGLFHNPSIGNAIHIVVVRLILLEEEEQGLKIVHHAEKTLSSFCKWQKSINPKSDLNPVHHDVAVLLTRKDICAGFNRPCETLGLSHLSGMCQPHRSCNINEDSGLPLAFTIAHELGHSFGIQHDGKENDCEPVGRHPYIMSRQLQYDPTPLTWSKCSEEYITRFLDRGWGFCLDDIPKKKGLKSKVIAPGVIYDVHHQCQLQYGPNATFCQEVENVCQTLWCSVKGFCRSKLDAAADGTQCGEKKWCMAGKCITVGKKPESIPGGWGRWSPWSHCSRTCGAGVQSAERLCNNPEPKFGGKYCTGERKRYRLCNVHPCRSEAPTFRQMQCSEFDTVPYKNELYHWFPIFNPAHPCELYCRPIDGQFSEKMLDAVIDGTPCFEGGNSRNVCINGICKMVGCDYEIDSNATEDRCGVCLGDGSSCQTVRKMFKQKEGSGYVDIGLIPKGARDIRVMEIEGAGNFLAIRSEDPEKYYLNGGFIIQWNGNYKLAGTVFQYDRKGDLEKLMATGPTNESVWIQLLFQVTNPGIKYEYTIQKDGLDNDVEQQMYFWQYGHWTECSVTCGTGIRRQTAHCIKKGRGMVKATFCDPETQPNGRQKKCHEKACPPRWWAGEWEACSATCGPHGEKKRTVLCIQTMVSDEQALPPTDCQHLLKPKTLLSCNRDILCPSDWTVGNWSECSVSCGGGVRIRSVTCAKNHDEPCDVTRKPNSRALCGLQQCPSSRRVLKPNKGTISNGKNPPTLKPVPPPTSRPRMLTTPTGPESMSTSTPAISSPSPTTASKEGDLGGKQWQDSSTQPELSSRYLISTGSTSQPILTSQSLSIQPSEENVSSSDTGPTSEGGLVATTTSGSGLSSSRNPITWPVTPFYNTLTKGPEMEIHSGSGEEREQPEDKDESNPVIWTKIRVPGNDAPVESTEMPLAPPLTPDLSRESWWPPFSTVMEGLLPSQRPTTSETGTPRVEGMVTEKPANTLLPLGGDHQPEPSGKTANRNHLKLPNNMNQTKSSEPVLTEEDATSLITEGFLLNASNYKQLTNGHGSAHWIVGNWSECSTTCGLGAYWRRVECSTQMDSDCAAIQRPDPAKRCHLRPCAGWKVGNWSKCSRNCSGGFKIREIQCVDSRDHRNLRPFHCQFLAGIPPPLSMSCNPEPCEAWQVEPWSQCSRSCGGGVQERGVFCPGGLCDWTKRPTSTMSCNEHLCCHWATGNWDLCSTSCGGGFQKRTVQCVPSEGNKTEDQDQCLCDHKPRPPEFKKCNQQACKKSADLLCTKDKLSASFCQTLKAMKKCSVPTVRAECCFSCPQTHITHTQRQRRQRLLQKSKEL

SEQ ID NO: 12544 - protein, 229 aa, Homo sapiens
MPCAQRSWLANLSVVAQLLNFGALCYGRQPQPGPVRFPDRRQEHFIKGLPEYHVVGPVRVDASGHFLSYGLHYPITSSRRKRDLDGSEDWVYYRISHEEKDLFFNLTVNQGFLSNSYIMEKRYGNLSHVKMMASSAPLCHLSGTVLQQGTRVGTAALSACHGLTGFFQLPHGDFFIEPVKKHPLVEGGYHPHIVYRRQKVPETKEPTCGLKGIVTHMSSWVEESVLFFW

SEQ ID NO: 12545 - protein, 1509 aa, Homo sapiens
MPCAQRSWLANLSVVAQLLNFGALCYGRQPQPGPVRFPDRRQEHFIKGLPEYHVVGPVRVDASGHFLSYGLHYPITSSRRKRDLDGSEDWVYYRISHEEKDLFFNLTVNQGFLSNSYIMEKRYGNLSHVKMMASSAPLCHLSGTVLQQGTRVGTAALSACHGLTGFFQLPHGDFFIEPVKKHPLVEGGYHPHIVYRRQKVPETKEPTCGLKDSVNISQKQELWREKWERHNLPSRSLSRRSISKERWVETLVVADTKMIEYHGSENVESYILTIMNMVTGLFHNPSIGNAIHIVVVRLILLEEEEQGLKIVHHAEKTLSSFCKWQKSINPKSDLNPVHHDVAVLLTRKDICAGFNRPCETLGLSHLSGMCQPHRSCNINEDSGLPLAFTIAHELGHSFGIQHDGKENDCEPVGRHPYIMSRQLQYDPTPLTWSKCSEEYITRFLDRGWGFCLDDIPKKKGLKSKVIAPGVIYDVHHQCQLQYGPNATFCQEVENVCQTLWCSVKGFCRSKLDAAADGTQCGEKKWCMAGKCITVGKKPESIPGGWGRWSPWSHCSRTCGAGVQSAERLCNNPEPKFGGKYCTGERKRYRLCNVHPCRSEAPTFRQMQCSEFDTVPYKNELYHWFPIFNPGYVDIGLIPKGARDIRVMEIEGAGNFLAIRSEDPEKYYLNGGFIIQWNGNYKLAGTVFQYDRKGDLEKLMATGPTNESVWIQLLFQVTNPGIKYEYTIQKDGLDNDVEQQMYFWQYGHWTECSVTCGTGIRRQTAHCIKKGRGMVKATFCDPETQPNGRQKKCHEKACPPRWWAGEWEACSATCGPHGEKKRTVLCIQTMVSDEQALPPTDCQHLLKPKTLLSCNRDILCPSDWTVGNWSECSVSCGGGVRIRSVTCAKNHDEPCDVTRKPNSRALCGLQQCPSSRRVLKPNKGTISNGKNPPTLKPVPPPTSRPRMLTTPTGPESMSTSTPAISSPSPTTASKEGDLGGKQWQDSSTQPELSSRYLISTGSTSQPILTSQSLSIQPSEENVSSSDTGPTSEGGLVATTTSGSGLSSSRNPITWPVTPFYNTLTKGPEMEIHSGSGEEREQPEDKDESNPVIWTKIRVPGNDAPVESTEMPLAPPLTPDLSRESWWPPFSTVMEGLLPSQRPTTSETGTPRVEGMVTEKPANTLLPLGGDHQPEPSGKTANRNHLKLPNNMNQTKSSEPVLTEEDATSLITEGFLLNASNYKQLTNGHGSAHWIVGNWSECSTTCGLGAYWRRVECSTQMDSDCAAIQRPDPAKRCHLRPCAGWKVGNWSKCSRNCSGGFKIREIQCVDSRDHRNLRPFHCQFLAGIPPPLSMSCNPEPCEAWQVEPWSQCSRSCGGGVQERGVFCPGGLCDWTKRPTSTMSCNEHLCCHWATGNWDLCSTSCGGGFQKRTVQCVPSEGNKTEDQDQCLCDHKPRPPEFKKCNQQACKKSADLLCTKDKLSASFCQTLKAMKKCSVPTVRAECCFSCPQTHITHTQRQRRQRLLQKSKEL

SEQ ID NO: 12546 - protein, 220 aa, Homo sapiens
MALIFRTAMQSVGLLLSLLGWILSIITTYLPHWKNLNLDLNEMENWTMGLWQTCVIQEEVGMQCKDFDSFLALPAELRVSRILMFLSNGLGFLGLLVSGFGLDCLRIGESQRDLKRRLLILGGILSWASGITALVPVSWVAHKTVQEFWDENVPDFVPRWEFGEALFLGWFAGLSLLLGGCLLNCAACSSHAPLALGHYAVAQMQTQCPYLEDGTADPQV

SEQ ID NO: 12547 - protein, 818 aa, Homo sapiens
MESEQLFHRGYYRNSYNSITSASSDEELLDGAGVIMDFQTSEDDNLLDGDTAVGTHYTMTNGGSINSSTHLLDLLDEPIPGVGTYDDFHTIDWVREKCKDRERHRRINSKKKESAWEMTKSLYDAWSGWLVVTLTGLASGALAGLIDIAADWMTDLKEGICLSALWYNHEQCCWGSNETTFEERDKCPQWKTWAELIIGQAEGPGSYIMNYIMYIFWALSFAFLAVSLVKVFAPYACGSGIPEIKTILSGFIIRGYLGKWTLMIKTITLVLAVASGLSLGKEGPLVHVACCCGNIFSYLFPKYSTNEAKKREVLSAASAAGVSVAFGAPIGGVLFSLEEVSYYFPLKTLWRSFFAALVAAFVLRSINPFGNSRLVLFYVEYHTPWYLFELFPFILLGVFGGLWGAFFIRANIAWCRRRKSTKFGKYPVLEVIIVAAITAVIAFPNPYTRLNTSELIKELFTDCGPLESSSLCDYRNDMNASKIVDDIPDRPAGIGVYSAIWQLCLALIFKIIMTVFTFGIKVPSGLFIPSMAIGAIAGRIVGIAVEQLAYYHHDWFIFKEWCEVGADCITPGLYAMVGAAACLGGVTRMTVSLVVIVFELTGGLEYIVPLMAAVMTSKWVGDAFGREGIYEAHIRLNGYPFLDAKEEFTHTTLAADVMRPRRNDPPLAVLTQDNMTVDDIENMINETSYNGFPVIMSKESQRLVGFALRRDLTIAIESARKKQEGIVGSSRVCFAQHTPSLPAESPRPLKLRSILDMSPFTVTDHTPMEIVVDIFRKLGLRQCLVTHNGRLLGIITKKDILRHMAQTANQDPASIMFN

SEQ ID NO: 12548 - protein, 866 aa, Homo sapiens
MESEQLFHRGYYRNSYNSITSASSDEELLDGAGVIMDFQTSEDDNLLDGDTAVGTHYTMTNGGSINSSTHLLDLLDEPIPGVGTYDDFHTIDWVREKCKDRERHRRINSKKKESAWEMTKSLYDAWSGWLVVTLTGLASGALAGLIDIAADWMTDLKEGICLSALWYNHEQCCWGSNETTFEERDKCPQWKTWAELIIGQAEGPGSYIMNYIMYIFWALSFAFLAVSLVKVFAPYACGSGIPEIKTILSGFIIRGYLGKWTLMIKTITLVLAVASGLSLGKEGPLVHVACCCGNIFSYLFPKYSTNEAKKREVLSAASAAGVSVAFGAPIGGVLFSLEEVSYYFPLKTLWRSFFAALVAAFVLRSINPFGNSRLVLFYVEYHTPWYLFELFPFILLGVFGGLWGAFFIRANIAWCRRRKSTKFGKYPVLEVIIVAAITAVIAFPNPYTRLNTSELIKELFTDCGPLESSSLCDYRNDMNASKIVDDIPDRPAGIGVYSAIWQLCLALIFKIIMTVFTFGIKVPSGLFIPSMAIGAIAGRIVGIAVEQLAYYHHDWFIFKEWCEVGADCITPGLYAMVGAAACLGGVTRMTVSLVVIVFELTGGLEYIVPLMAAVMTSKWVGDAFGREGIYEAHIRLNGYPFLDAKEEFTHTTLAADVMRPRRNDPPLAVLTQDNMTVDDIENMINETSYNGFPVIMSKESQRLVGFALRRDLTIAIESARKKQEGIVGSSRVCFAQHTPSLPAESPRPLKLRSILDMSPFTVTDHTPMEIVVDIFRKLGLRQCLVTHNGIVLGIITKKNILEHLEQLKQHVEPLAPPWHYNKKRYPPAYGPDGKPRPRFNNVQLNLTDEEREETEEEVYLLNSTTL

SEQ ID NO: 12549 - protein, 791 aa, Homo sapiens
MESEQLFHRGYYRNSYNSITSASSDEELLDGAGVIMDFQTSEDDNLLDGDTAVGTHYTMTNGGSINSSTHLLDLLDEPIPGVGTYDDFHTIDWVREKCKDRERHRRINSKKKESAWEMTKSLYDAWSGWLVVTLTGLASGALAGLIDIAADWMTDLKEGICLSALWYNHEQCCWGSNETTFEERDKCPQWKTWAELIIGQAEGPGSYIMNYIMYIFWALSFAFLAVSLVKVFAPYACGSGIPEIKTILSGFIIRGYLGKWTLMIKTITLVLAVASGLSLGKEGPLVHVACCCGNIFSYLFPKYSTNEAKKREVSYYFPLKTLWRSFFAALVAAFVLRSINPFGNSRLVLFYVEYHTPWYLFELFPFILLGVFGGLWGAFFIRANIAWCRRRKSTKFGKYPVLEVIIVAAITAVIAFPNPYTRLNTSELIKELFTDCGPLESSSLCDYRNDMNASKIVDDIPDRPAGIGVYSAIWQLCLALIFKIIMTVFTFGIKVPSGLFIPSMAIGAIAGRIVGIAVEQLAYYHHDWFIFKEWCEVGADCITPGLYAMVGAAACLGGVTRMTVSLVVIVFELTGGLEYIVPLMAAVMTSKWVGDAFGREGIYEAHIRLNGYPFLDAKEEFTHTTLAADVMRPRRNDPPLAVLTQDNMTVDDIENMINETSYNGFPVIMSKESQRLVGFALRRDLTIAIESARKKQEGIVGSSRVCFAQHTPSLPAESPRPLKLRSILDMSPFTVTDHTPMEIVVDIFRKLGLRQCLVTHNGRLLGIITKKDILRHMAQTANQDPASIMFN

SEQ ID NO: 12550 - protein, 801 aa, Homo sapiens
MVTLQLGESHYVVQAGLQLLGSSNPPALASQVAEITGTHYTMTNGGSINSSTHLLDLLDEPIPGVGTYDDFHTIDWVREKCKDRERHRRINSKKKESAWEMTKSLYDAWSGWLVVTLTGLASGALAGLIDIAADWMTDLKEGICLSALWYNHEQCCWGSNETTFEERDKCPQWKTWAELIIGQAEGPGSYIMNYIMYIFWALSFAFLAVSLVKVFAPYACGSGIPEIKTILSGFIIRGYLGKWTLMIKTITLVLAVASGLSLGKEGPLVHVACCCGNIFSYLFPKYSTNEAKKREVLSAASAAGVSVAFGAPIGGVLFSLEEVSYYFPLKTLWRSFFAALVAAFVLRSINPFGNSRLVLFYVEYHTPWYLFELFPFILLGVFGGLWGAFFIRANIAWCRRRKSTKFGKYPVLEVIIVAAITAVIAFPNPYTRLNTSELIKELFTDCGPLESSSLCDYRNDMNASKIVDDIPDRPAGIGVYSAIWQLCLALIFKIIMTVFTFGIKVPSGLFIPSMAIGAIAGRIVGIAVEQLAYYHHDWFIFKEWCEVGADCITPGLYAMVGAAACLGGVTRMTVSLVVIVFELTGGLEYIVPLMAAVMTSKWVGDAFGREGIYEAHIRLNGYPFLDAKEEFTHTTLAADVMRPRRNDPPLAVLTQDNMTVDDIENMINETSYNGFPVIMSKESQRLVGFALRRDLTIAIESARKKQEGIVGSSRVCFAQHTPSLPAESPRPLKLRSILDMSPFTVTDHTPMEIVVDIFRKLGLRQCLVTHNGRLLGIITKKDILRHMAQTANQDPASIMFN

SEQ ID NO: 12551 - protein, 214 aa, Homo sapiens
MVWFCNSADCQFSVFALTTIGWILSSTSTGLVEWRIWYMKDTSLYPPGIACVGIFRVCIYRRRTNSTTTKFCYRYSYQDTFLPFEISMAQRFLLTASIFGFFGRAFNMFALRNMSMRMFEEDTYNSFVVSGILNIAAGVFNLIAVLQNYDAVINSQGITFLPSLQMPFKPDVQEVGTAIQVAGIGVLPMLLTGMFSLFYKCPPYGQVHPGISEM

SEQ ID NO: 12552 - protein, 1427 aa, Homo sapiens
MHQRHPRARCPPLCVAGILACGFLLGCWGPSHFQQSCLQALEPQAVSSYLSPGAPLKGRPPSPGFQRQRQRQRRAAGGILHLELLVAVGPDVFQAHQEDTERYVLTNLNIGAELLRDPSLGAQFRVHLVKMVILTEPEGAPNITANLTSSLLSVCGWSQTINPEDDTDPGHADLVLYITRFDLELPDGNRQVRGVTQLGGACSPTWSCLITEDTGFDLGVTIAHEIGHSFGLEHDGAPGSGCGPSGHVMASDGAAPRAGLAWSPCSRRQLLSLLSAGRARCVWDPPRPQPGSAGHPPDAQPGLYYSANEQCRVAFGPKAVACTFAREHLDMCQALSCHTDPLDQSSCSRLLVPLLDGTECGVEKWCSKGRCRSLVELTPIAAVHGRWSSWGPRSPCSRSCGGGVVTRRRQCNNPRPAFGGRACVGADLQAEMCNTQACEKTQLEFMSQQCARTDGQPLRSSPGGASFYHWGAAVPHSQGDALCRHMCRAIGESFIMKRGDSFLDGTRCMPSGPREDGTLSLCVSGSCRTFGCDGRMDSQQVWDRCQVCGGDNSTCSPRKGSFTAGRAREYVTFLTVTPNLTSVYIANHRPLFTHLAVRIGGRYVVAGKMSISPNTTYPSLLEDGRVEYRVALTEDRLPRLEEIRIWGPLQEDADIQVYRRYGEEYGNLTRPDITFTYFQPKPRQAWVWAAVRGPCSVSCGAGLRWVNYSCLDQARKELVETVQCQGSQQPPAWPEACVLEPCPPYWAVGDFGPCSASCGGGLRERPVRCVEAQGSLLKTLPPARCRAGAQQPAVALETCNPQPCPARWEVSEPSSCTSAGGAGLALENETCVPGADGLEAPVTEGPGSVDEKLPAPEPCVGMSCPPGWGHLDATSAGEKAPSPWGSIRTGAQAAHVWTPAAGSCSVSCGRGLMELRFLCMDSALRVPVQEELCGLASKPGSRREVCQAVPCPARWQYKLAACSVSCGRGVVRRILYCARAHGEDDGEEILLDTQCQGLPRPEPQEACSLEPCPPRWKVMSLGPCSASCGLGTARRSVACVQLDQGQDVEVDEAACAALVRPEASVPCLIADCTYRWHVGTWMECSVSCGDGIQRRRDTCLGPQAQAPVPADFCQHLPKPVTVRGCWAGPCVGQGTPSLVPHEEAAAPGRTTATPAGASLEWSQARGLLFSPAPQPRRLLPGPQENSVQSSACGRQHLEPTGTIDMRGPGQADCAVAIGRPLGEVVTLRVLESSLNCSAGDMLLLWGRLTWRKMCRKLLDMTFSSKTNTLVVRQRCGRPGGGVLLRYGSQLAPETFYRECDMQLFGPWGEIVSPSLSPATSNAGGCRLFINVAPHARIAIHALATNMGAGTEGANASYILIRDTHSLRTTAFHGQQVLYWESESSQAEMEFSEGFLKAQASLRGQYWTLQSWVPEMQDPQSWKGKEGT

SEQ ID NO: 12553 - protein, 1371 aa, Homo sapiens
MHQRHPRARCPPLCVAGILACGFLLGCWGPSHFQQSCLQALEPQAVSSYLSPGAPLKGRPPSPGFQRQRQRQRRAAGGILHLELLVAVGPDVFQAHQEDTERYVLTNLNIGAELLRDPSLGAQFRVHLVKMVILTEPEGAPNITANLTSSLLSVCGWSQTINPEDDTDPGHADLVLYITRFDLELPDGNRQVRGVTQLGGACSPTWSCLITEDTGFDLGVTIAHEIGHSFGLEHDGAPGSGCGPSGHVMASDGAAPRAGLAWSPCSRRQLLSLLSAGRARCVWDPPRPQPGSAGHPPDAQPGLYYSANEQCRVAFGPKAVACTFAREHLDMCQALSCHTDPLDQSSCSRLLVPLLDGTECGVEKWCSKGRCRSLVELTPIAAVHGRWSSWGPRSPCSRSCGGGVVTRRRQCNNPRPAFGGRACVGADLQAEMCNTQACEKTQLEFMSQQCARTDGQPLRSSPGGASFYHWGAAVPHSQGDALCRHMCRAIGESFIMKRGDSFLDGTRCMPSGPREDGTLSLCVSGSCRTFGCDGRMDSQQVWDRCQVCGGDNSTCSPRKGSFTAGRAREYVTFLTVTPNLTSVYIANHRPLFTHLAVRIGGRYVVAGKMSISPNTTYPSLLEDGRVEYRVALTEDRLPRLEEIRIWGPLQEDADIQVYRRYGEEYGNLTRPDITFTYFQPKPRQAWVWAAVRGPCSVSCGAGLRWVNYSCLDQARKELVETVQCQGSQQPPAWPEACVLEPCPPYWAVGDFGPCSASCGGGLRERPVRCVEAQGSLLKTLPPARCRAGAQQPAVALETCNPQPCPARWEVSEPSSCTSAGGAGLALENETCVPGADGLEAPVTEGPGSVDEKLPAPEPCVGMSCPPGWGHLDATSAGEKAPSPWGSIRTGAQAAHVWTPAAGSCSVSCGRGLMELRFLCMDSALRVPVQEELCGLASKPGSRREVCQAVPCPARWQYKLAACSVSCGRGVVRRILYCARAHGEDDGEEILLDTQCQGLPRPEPQEACSLEPCPPRWKVMSLGPCSASCGLGTARRSVACVQLDQGQDVEVDEAACAALVRPEASVPCLIADCTYRWHVGTWMECSVSCGDGIQRRRDTCLGPQAQAPVPADFCQHLPKPVTVRGCWAGPCVGQGACGRQHLEPTGTIDMRGPGQADCAVAIGRPLGEVVTLRVLESSLNCSAGDMLLLWGRLTWRKMCRKLLDMTFSSKTNTLVVRQRCGRPGGGVLLRYGSQLAPETFYRECDMQLFGPWGEIVSPSLSPATSNAGGCRLFINVAPHARIAIHALATNMGAGTEGANASYILIRDTHSLRTTAFHGQQVLYWESESSQAEMEFSEGFLKAQASLRGQYWTLQSWVPEMQDPQSWKGKEGT

SEQ ID NO: 12554 - protein, 1340 aa, Homo sapiens
MHQRHPRARCPPLCVAGILACGFLLGCWGPSHFQQSCLQALEPQAVSSYLSPGAPLKGRPPSPGFQRQRQRQRRAAGGILHLELLVAVGPDVFQAHQEDTERYVLTNLNIGAELLRDPSLGAQFRVHLVKMVILTEPEGAPNITANLTSSLLSVCGWSQTINPEDDTDPGHADLVLYITRFDLELPDGNRQVRGVTQLGGACSPTWSCLITEDTGFDLGVTIAHEIGHSFGLEHDGAPGSGCGPSGHVMASDGAAPRAGLAWSPCSRRQLLSLLSANEQCRVAFGPKAVACTFAREHLDMCQALSCHTDPLDQSSCSRLLVPLLDGTECGVEKWCSKGRCRSLVELTPIAAVHGRWSSWGPRSPCSRSCGGGVVTRRRQCNNPRPAFGGRACVGADLQAEMCNTQACEKTQLEFMSQQCARTDGQPLRSSPGGASFYHWGAAVPHSQGDALCRHMCRAIGESFIMKRGDSFLDGTRCMPSGPREDGTLSLCVSGSCRTFGCDGRMDSQQVWDRCQVCGGDNSTCSPRKGSFTAGRAREYVTFLTVTPNLTSVYIANHRPLFTHLAVRIGGRYVVAGKMSISPNTTYPSLLEDGRVEYRVALTEDRLPRLEEIRIWGPLQEDADIQVYRRYGEEYGNLTRPDITFTYFQPKPRQAWVWAAVRGPCSVSCGAGLRWVNYSCLDQARKELVETVQCQGSQQPPAWPEACVLEPCPPYWAVGDFGPCSASCGGGLRERPVRCVEAQGSLLKTLPPARCRAGAQQPAVALETCNPQPCPARWEVSEPSSCTSAGGAGLALENETCVPGADGLEAPVTEGPGSVDEKLPAPEPCVGMSCPPGWGHLDATSAGEKAPSPWGSIRTGAQAAHVWTPAAGSCSVSCGRGLMELRFLCMDSALRVPVQEELCGLASKPGSRREVCQAVPCPARWQYKLAACSVSCGRGVVRRILYCARAHGEDDGEEILLDTQCQGLPRPEPQEACSLEPCPPRWKVMSLGPCSASCGLGTARRSVACVQLDQGQDVEVDEAACAALVRPEASVPCLIADCTYRWHVGTWMECSVSCGDGIQRRRDTCLGPQAQAPVPADFCQHLPKPVTVRGCWAGPCVGQGACGRQHLEPTGTIDMRGPGQADCAVAIGRPLGEVVTLRVLESSLNCSAGDMLLLWGRLTWRKMCRKLLDMTFSSKTNTLVVRQRCGRPGGGVLLRYGSQLAPETFYRECDMQLFGPWGEIVSPSLSPATSNAGGCRLFINVAPHARIAIHALATNMGAGTEGANASYILIRDTHSLRTTAFHGQQVLYWESESSQAEMEFSEGFLKAQASLRGQYWTLQSWVPEMQDPQSWKGKEGT

SEQ ID NO: 12555 - protein, 364 aa, Homo sapiens
MDMCQALSCHTDPLDQSSCSRLLVPLLDGTECGVEKWCSKGRCRSLVELTPIAAVHGRWSSWGPRSPCSRSCGGGVVTRRRQCNNPRPAFGGRACVGADLQAEMCNTQACEKTQLEFMSQQCARTDGQPLRSSPGGASFYHWGAAVPHSQGDALCRHMCRAIGESFIMKRGDSFLDGTRCMPSGPREDGTLSLCVSGSCRTFGCDGRMDSQQVWDRCQVCGGDNSTCSPRKGSFTAGRAREYVTFLTVTPNLTSVYIANHRPLFTHLAVRIGGRYVVAGKMSISPNTTYPSLLEDGRVEYRVALTEDRLPRLEEIRIWGPLQEDADIQVGGVRAQLMHISWWSRPGLGERDLCARGRWPGGSSD

SEQ ID NO: 12556 - protein, 950 aa, Homo sapiens
MLLLGILTLAFAGRTAGGSEPEREVVVPIRLDPDINGRRYYWRGPEDSGDQGLIFQITAFQEDFYLHLTPDAQFLAPAFSTEHLGVPLQGLTGGSSDLRRCFYSGDVNAEPDSFAAVSLCGGLRGAFGYRGAEYVISPLPNASAPAAQRNSQGAHLLQRRGVPGGPSGDPTSRCGVASGWNPAILRALDPYKPRRAGFGESRSRRRSGRAKRFVSIPRYVETLVVADESMVKFHGADLEHYLLTLLATAARLYRHPSILNPINIVVVKVLLLRDRDSGPKVTGNAALTLRNFCAWQKKLNKVSDKHPEYWDTAILFTRQDLCGATTCDTLGMADVGTMCDPKRSCSVIEDDGLPSAFTTAHELGHVFNMPHDNVKVCEEVFGKLRANHMMSPTLIQIDRANPWSACSAAIITDFLDSGHGDCLLDQPSKPISLPEDLPGASYTLSQQCELAFGVGSKPCPYMQYCTKLWCTGKAKGQMVCQTRHFPWADGTSCGEGKLCLKGACVERHNLNKHRVDGSWAKWDPYGPCSRTCGGGVQLARRQCTNPTPANGGKYCEGVRVKYRSCNLEPCPSSASGKSFREEQCEAFNGYNHSTNRLTLAVAWVPKYSGVSPRDKCKLICRANGTGYFYVLAPKVVDGTLCSPDSTSVCVQGKCIKAGCDGNLGSKKRFDKCGVCGGDNKSCKKVTGLFTKPMHGYNFVVAIPAGASSIDIRQRGYKGLIGDDNYLALKNSQGKYLLNGHFVVSAVERDLVVKGSLLRYSGTGTAVESLQASRPILEPLTVEVLSVGKMTPPRVRYSFYLPKEPREDKSSHPKDPRGPSVLHNSVLSLSNQVEQPDDRPPARWVAGSWGPCSASCGSGLQKRAVDCRGSAGQRTVPACDAAHRPVETQACGEPCPTWELSAWSPCSKSCGRGFQRRSLKCVGHGGRLLARDQCNLHRKPQELDFCVLRPC

SEQ ID NO: 12557 - protein, 220 aa, Homo sapiens
MSMGLEITGTALAVLGWLGTIVCCALPMWRVSAFIGSNIITSQNIWEGLWMNCVVQSTGQMQCKVYDSLLALPQDLQAARALIVVAILLAAFGLLVALVGAQCTNCVQDDTAKAKITIVAGVLFLLAALLTLVPVSWSANTIIRDFYNPVVPEAQKREMGAGLYVGWAAAALQLLGGALLCCSCPPREKKYTATKVVYSAPRSTGPGASLGTGYDRKDYV

SEQ ID NO: 12558 - protein, 218 aa, Homo sapiens
MGSAALEILGLVLCLVGWGGLILACGLPMWQVTAFLDHNIVTAQTTWKGLWMSCVVQSTGHMQCKVYDSVLALSTEVQAARALTVSAVLLAFVALFVTLAGAQCTTCVAPGPAKARVALTGGVLYLFCGLLALVPLCWFANIVVREFYDPSVPVSQKYELGAALYIGWAATALLMVGGCLLCCGAWVCTGRPDLSFPVKYSAPRRPTATGDYDKKNYV

SEQ ID NO: 12559 - protein, 220 aa, Homo sapiens
MASAGMQILGVVLTLLGWVNGLVSCALPMWKVTAFIGNSIVVAQVVWEGLWMSCVVQSTGQMQCKVYDSLLALPQDLQAARALCVIALLVALFGLLVYLAGAKCTTCVEEKDSKARLVLTSGIVFVISGVLTLIPVCWTAHAIIRDFYNPLVAEAQKRELGASLYLGWAASGLLLLGGGLLCCTCPSGGSQGPSHYMARYSTSAPAISRGPSEYPTKNYV

SEQ ID NO: 12560 - protein, 217 aa, Homo sapiens
MASTGLELLGMTLAVLGWLGTLVSCALPLWKVTAFIGNSIVVAQVVWEGLWMSCVVQSTGQMQCKVYDSLLALPQDLQAARALCVIALLLALLGLLVAITGAQCTTCVEDEGAKARIVLTAGVILLLAGILVLIPVCWTAHAIIQDFYNPLVAEALKRELGASLYLGWAAAALLMLGGGLLCCTCPPPQVERPRGPRLGYSIPSRSGASGLDKRDYV

SEQ ID NO: 12561 - protein, 94 aa, Homo sapiens
MASVGECPAPVPVKDKKLLEVKLGELPSWILMRDFSPSGIFGAFQRGYYRYYNKYINVKKGSISGITMVLACYVLFSYSFSYKHLKHERLRKYH

SEQ ID NO: 12562 - protein, 88 aa, Homo sapiens
MASVVPVKDKKLLEVKLGELPSWILMRDFSPSGIFGAFQRGYYRYYNKYINVKKGSISGITMVLACYVLFSYSFSYKHLKHERLRKYH

SEQ ID NO: 12563 - protein, 55 aa, Homo sapiens
MASVGECPAPVPVKDKKLLEVKLGELPSWILMRDFSPSGIFGAFQREHERLRKYH

SEQ ID NO: 12564 - protein, 49 aa, Homo sapiens
MASVVPVKDKKLLEVKLGELPSWILMRDFSPSGIFGAFQREHERLRKYH

SEQ ID NO: 12565 - protein, 1744 aa, Homo sapiens
MRLLWGLIWASSFFTLSLQKPRLLLFSPSVVHLGVPLSVGVQLQDVPRGQVVKGSVFLRNPSRNNVPCSPKVDFTLSSERDFALLSLQVPLKDAKSCGLHQLLRGPEVQLVAHSPWLKDSLSRTTNIQGINLLFSSRRGHLFLQTDQPIYNPGQRVRYRVFALDQKMRPSTDTITVMVENSHGLRVRKKEVYMPSSIFQDDFVIPDISEPGTWKISARFSDGLESNSSTQFEVKKYVLPNFEVKITPGKPYILTVPGHLDEMQLDIQARYIYGKPVQGVAYVRFGLLDEDGKKTFFRGLESQTKLVNGQSHISLSKAEFQDALEKLNMGITDLQGLRLYVAAAIIESPGGEMEEAELTSWYFVSSPFSLDLSKTKRHLVPGAPFLLQALVREMSGSPASGIPVKVSATVSSPGSVPEVQDIQQNTDGSGQVSIPIIIPQTISELQLSVSAGSPHPAIARLTVAAPPSGGPGFLSIERPDSRPPRVGDTLNLNLRAVGSGATFSHYYYMILSRGQIVFMNREPKRTLTSVSVFVDHHLAPSFYFVAFYYHGDHPVANSLRVDVQAGACEGKLELSVDGAKQYRNGESVKLHLETDSLALVALGALDTALYAAGSKSHKPLNMGKVFEAMNSYDLGCGPGGGDSALQVFQAAGLAFSDGDQWTLSRKRLSCPKEKTTRKKRNVNFQKAINEKLGQYASPTAKRCCQDGVTRLPMMRSCEQRAARVQQPDCREPFLSCCQFAESLRKKSRDKGQAGLQRALEILQEEDLIDEDDIPVRSFFPENWLWRVETVDRFQILTLWLPDSLTTWEIHGLSLSKTKGLCVATPVQLRVFREFHLHLRLPMSVRRFEQLELRPVLYNYLDKNLTVSVHVSPVEGLCLAGGGGLAQQVLVPAGSARPVAFSVVPTAAAAVSLKVVARGSFEFPVGDAVSKVLQIEKEGAIHREELVYELNPLDHRGRTLEIPGNSDPNMIPDGDFNSYVRVTASDPLDTLGSEGALSPGGVASLLRLPRGCGEQTMIYLAPTLAASRYLDKTEQWSTLPPETKDHAVDLIQKGYMRIQQFRKADGSYAAWLSRDSSTWLTAFVLKVLSLAQEQVGGSPEKLQETSNWLLSQQQADGSFQDPCPVLDRSMQGGLVGNDETVALTAFVTIALHHGLAVFQDEGAEPLKQRVEASISKANSFLGEKASAGLLGAHAAAITAYALTLTKAPVDLLGVAHNNLMAMAQETGDNLYWGSVTGSQSNAVSPTPAPRNPSDPMPQAPALWIETTAYALLHLLLHEGKAEMADQASAWLTRQGSFQGGFRSTQDTVIALDALSAYWIASHTTEERGLNVTLSSTGRNGFKSHALQLNNRQIRGLEEELQFSLGSKINVKVGGNSKGTLKVLRTYNVLDMKNTTCQDLQIEVTVKGHVEYTMEANEDYEDYEYDELPAKDDPDAPLQPVTPLQLFEGRRNRRRREAPKVVEEQESRVHYTVCIWRNGKVGLSGMAIADVTLLSGFHALRADLEKLTSLSDRYVSHFETEGPHVLLYFDSVPTSRECVGFEAVQEVPVGLVQPASATLYDYYNPERRCSVFYGAPSKSRLLATLCSAEVCQCAEGKCPRQRRALERGLQDEDGYRMKFACYYPRVEYGFQVKVLREDSRAAFRLFETKITQVLHFTKDVKAAANQMRNFLVRASCRLRLEPGKEYLIMGLDGATYDLEGHPQYLLDSNSWIEEMPSERLCRSTRQRAACAQLNDFLQEYGTQGCQV

SEQ ID NO: 12566 - protein, 1698 aa, Homo sapiens
MRLLWGLIWASSFFTLSLQKPRLLLFSPSVVHLGVPLSVGVQLQDVPRGQVVKGSVFLRNPSRNNVPCSPKVDFTLSSERDFALLSLQVPLKDAKSCGLHQLLRGPEVQLVAHSPWLKDSLSRTTNIQGINLLFSSRRGHLFLQTDQPIYNPGQRVRYRVFALDQKMRPSTDTITVMVENSHGLRVRKKEVYMPSSIFQDDFVIPDISEPGTWKISARFSDGLESNSSTQFEVKKYVLPNFEVKITPGKPYILTVPGHLDEMQLDIQARYIYGKPVQGVAYVRFGLLDEDGKKTFFRGLESQTKLVNGQSHISLSKAEFQDALEKLNMGITDLQGLRLYVAAAIIESPGGEMEEAELTSWYFVSSPFSLDLSKTKRHLVPGAPFLLQALVREMSGSPASGIPVKVSATVSSPGSVPEVQDIQQNTDGSGQVSIPIIIPQTISELQLSVSAGSPHPAIARLTVAAPPSGGPGFLSIERPDSRPPRVGDTLNLNLRAVGSGATFSHYYYMILSRGQIVFMNREPKRTLTSVSVFVDHHLAPSFYFVAFYYHGDHPVANSLRVDVQAGACEGKLELSVDGAKQYRNGESVKLHLETDSLALVALGALDTALYAAGSKSHKPLNMGKVFEAMNSYDLGCGPGGGDSALQVFQAAGLAFSDGDQWTLSRKRLSCPKEKTTRKKRNVNFQKAINEKLGQYASPTAKRCCQDGVTRLPMMRSCEQRAARVQQPDCREPFLSCCQFAESLRKKSRDKGQAGLQRALEILQEEDLIDEDDIPVRSFFPENWLWRVETVDRFQILTLWLPDSLTTWEIHGLSLSKTKGLCVATPVQLRVFREFHLHLRLPMSVRRFEQLELRPVLYNYLDKNLTVSVHVSPVEGLCLAGGGGLAQQVLVPAGSARPVAFSVVPTAAAAVSLKVVARGSFEFPVGDAVSKVLQIEKEGAIHREELVYELNPLDHRGRTLEIPGNSDPNMIPDGDFNSYVRVTASDPLDTLGSEGALSPGGVASLLRLPRGCGEQTMIYLAPTLAASRYLDKTEQWSTLPPETKDHAVDLIQKGYMRIQQFRKADGSYAAWLSRDSSTWLTAFVLKVLSLAQEQVGGSPEKLQETSNWLLSQQQADGSFQDPCPVLDRSMQGGLVGNDETVALTAFVTIALHHGLAVFQDEGAEPLKQRVEASISKANSFLGEKASAGLLGAHAAAITAYALTLTKAPVDLLGVAHNNLMAMAQETGDNLYWGSVTGSQSNAVSPTPAPRNPSDPMPQAPALWIETTAYALLHLLLHEGKAEMADQASAWLTRQGSFQGGFRSTQDTVIALDALSAYWIASHTTEERGLNVTLSSTGRNGFKSHALQLNNRQIRGLEEELQFSLGSKINVKVGGNSKGTLKVLRTYNVLDMKNTTCQDLQIEVTVKGHVEYTMEANEDYEDYEYDELPAKDDPDAPLQPVTPLQLFEGRRNRRRREAPKLTSLSDRYVSHFETEGPHVLLYFDSVPTSRECVGFEAVQEVPVGLVQPASATLYDYYNPERRCSVFYGAPSKSRLLATLCSAEVCQCAEGKCPRQRRALERGLQDEDGYRMKFACYYPRVEYGFQVKVLREDSRAAFRLFETKITQVLHFTKDVKAAANQMRNFLVRASCRLRLEPGKEYLIMGLDGATYDLEGHPQYLLDSNSWIEEMPSERLCRSTRQRAACAQLNDFLQEYGTQGCQV

SEQ ID NO: 12567 - protein, 1053 aa, Homo sapiens
MFGRSRSWVGGGHGKTSRNIHSLDHLKYLYHVLTKNTTVTEQNRNLLVETIRSITEILIWGDQNDSSVFDFFLEKNMFVFFLNILRQKSGRYVCVQLLQTLNILFENISHETSLYYLLSNNYVNSIIVHKFDFSDEEIMAYYISFLKTLSLKLNNHTVHFFYNEHTNDFALYTEAIKFFNHPESMVRIAVRTITLNVYKVSLDNQAMLHYIRDKTAVPYFSNLVWFIGSHVIELDDCVQTDEEHRNRGKLSDLVAEHLDHLHYLNDILIINCEFLNDVLTDHLLNRLFLPLYVYSLENQDKGGERPKISLPVSLYLLSQVFLIIHHAPLVNSLAEVILNGDLSEMYAKTEQDIQRSSAKPSIRCFIKPTETLERSLEMNKHKGKRRVQKRPNYKNVGEEEDEEKGPTEDAQEDAEKAKGTEGGSKGIKTSGESEEIEMVIMERSKLSELAASTSVQEQNTTDEEKSAAATCSESTQWSRPFLDMVYHALDSPDDDYHALFVLCLLYAMSHNKGMDPEKLERIQLPVPNAAEKTTYNHPLAERLIRIMNNAAQPDGKIRLATLELSCLLLKQQVLMSAGCIMKDVHLACLEGAREESVHLVRHFYKGEDIFLDMFEDEYRSMTMKPMNVEYLMMDASILLPPTGTPLTGIDFVKRLPCGDVEKTRRAIRVFFMLRSLSLQLRGEPETQLPLTREEDLIKTDDVLDLNNSDLIACTVITKDGGMVQRFLAVDIYQMSLVEPDVSRLGWGVVKFAGLLQDMQVTGVEDDSRALNITIHKPASSPHSKPFPILQATFIFSDHIRCIIAKQRLAKGRIQARRMKMQRIAALLDLPIQPTTEVLGFGLGSSTSTQHLPFRFYDQGRRGSSDPTVQRSVFASVDKVPGFAVAQCINQHSSPSLSSQSPPSASGSPSGSGSTSHCDSGGTSSSSTPSTAQSPADAPMSPELPKPHLPDQLVIVNETEADSKPSKNVARSAAVETASLSPSLVPARQPTISLLCEDTADTLSVESLTLVPPVDPHSLRSLTGMPPLSTPAAACTEPVGEEAACAEPVGTAED

SEQ ID NO: 12568 - protein, 906 aa, Homo sapiens
MFGRSRSWVGGGHGKTSRNIHSLDHLKYLYHVLTKNTTVTEQNRNLLVETIRSITEILIWGDQNDSSVFDFFLEKNMFVFFLNILRQKSGRYVCVQLLQTLNILFENISHETSLYYLLSNNYVNSIIVHKFDFSDEEIMAYYISFLKTLSLKLNNHTVHFFYNEHTNDFALYTEAIKFFNHPESMVRIAVRTITLNVYKVDNQAMLHYIRDKTAVPYFSNLVWFIGSHVIELDDCVQTDEEHRNRGKLSDLVAEHLDHLHYLNDILIINCEFLNDVLTDHLLNRLFLPLYVYSLENQDKGGERPKISLPVSLYLLSQVFLIIHHAPLVNSLAEVILNGDLSEMYAKTEQDIQRSSAKPSIRCFIKPTETLERSLEMNKHKGKRRVQKRPNYKNVGEEEDEEKGPTEDAQEDAEKAKEIEMVIMERSKLSELAASTSVQEQNTTDEEKSAAATCSESTQWSRPFLDMVYHALDSPDDDYHALFVLCLLYAMSHNKGMDPEKLERIQLPVPNAAEKTTYNHPLAERLIRIMNNAAQPDGKIRLATLELSCLLLKQQVLMSAGCIMKDVHLACLEGAREESVHLVRHFYKGEDIFLDMFEDEYRSMTMKPMNVEYLMMDASILLPPTGTPLTGIDFVKRLPCGDVEKTRRAIRVFFMLRSLSLQLRGEPETQLPLTREEDLIKTDDVLDLNNSDLIACTVITKDGGMVQRFLAVDIYQMSLVEPDVSRLGWGVVKFAGLLQDMQVTGVEDDSRALNITIHKPASSPHSKPFPILQATFIFSDHIRCIIAKQRLAKGRIQARRMKMQRIAALLDLPIQPTTEVLGFGLGSSTSTQHLPFRFYDQGRRGSSDPTVQRSVFASVDKVPGEPAPRPAPQLVHHGGRSRSFSLWSLCELPFLSQKPRRLAAPAS

SEQ ID NO: 12569 - protein, 140 aa, Homo sapiens
MAATGFSAPNGSCHGTSRTVNSDAPMSPELPKPHLPDQLVIVNETEADSKPSKNVARSAAVETASLSPSLVPARQPTISLLCEDTADTLSVESLTLVPPVDPHSLRSLTGMPPLSTPAAACTEPVGEEAACAEPVGTAED

SEQ ID NO: 12570 - protein, 152 aa, Homo sapiens
MKSCKPSGPPAGARVAPPCAGGTECAGTCAGAGRLESAARRRLAANARERRRMQGLNTAFDRLRRVVPQWGQDKKLSKYETLQMALSYIMALTRILAEAERFGSERDWVGLHCEHFGRDHYLPFPGAKLPGESELYSQRLFGFQPEPFQMAT

SEQ ID NO: 12571 - protein, 1259 aa, Homo sapiens
MDGPTRGHGLRKKRRSRSQRDRERRSRGGLGAGAAGGGGAGRTRALSLASSSGSDKEDNGKPPSSAPSRPRPPRRKRRESTSAEEDIIDGFAMTSFVTFEALEKDVALKPQERVEKRQTPLTKKKREALTNGLSFHSKKSRLSHPHHYSSDRENDRNLCQHLGKRKKMPKALRQLKPGQNSCRDSDSESASGESKGFHRSSSRERLSDSSAPSSLGTGYFCDSDSDQEEKASDASSEKLFNTVIVNKDPELGVGTLPEHDSQDAGPIVPKISGLERSQEKSQDCCKEPIFEPVVLKDPCPQVAQPIPQPQTEPQLRAPSPDPDLVQRTEAPPQPPPLSTQPPQGPPEAQLQPAPQPQVQRPPRPQSPTQLLHQNLPPVQAHPSAQSLSQPLSAYNSSSLSLNSLSSSRSSTPAKTQPAPPHISHHPSASPFPLSLPNHSPLHSFTPTLQPPAHSHHPNMFAPPTALPPPPPLTSGSLQVAGHPAGSTYSEQDILRQELNTRFLASQSADRGASLGPPPYLRTEFHQHQHQHQHTHQHTHQHTFTPFPHAIPPTAIMPTPAPPMFDKYPTKVDPFYRHSLFHSYPPAVSGIPPMIPPTGPFGSLQGAFQPKTSNPIDVAARPGTVPHTLLQKDPRLTDPFRPMLRKPGKWCAMHVHIAWQIYHHQQKVKKQMQSDPHKLDFGLKPEFLSRPPGPSLFGAIHHPHDLARPSTLFSAAGAAHPTGTPFGPPPHHSNFLNPAAHLEPFNRPSTFTGLAAVGGNAFGGLGNPSVTPNSMFGHKDGPSVQNFSNPHEPWNRLHRTPPSFPTPPPWLKPGELERSASAAAHDRDRDVDKRDSSVSKDDKERESVEKRHSSHPSPAPVLPVNALGHTRSSTEQIRAHLNTEAREKDKPKERERDHSESRKDLAADEHKAKEGHLPEKDGHGHEGRAAGEEAKQLARVPSPYVRTPVVESARPNSTSSREAEPRKGEPAYENPKKSSEVKVKEERKEDHDLPPEAPQTHRASEPPPPNSSSSVHPGPLASMPMTVGVTGIHPMNSISSLDRTRMMTPFMGISPLPGGERFPYPSFHWDPIRDPLRDPYRELDIHRRDPLGRDFLLRNDPLHRLSTPRLYEADRSFRDREPHDYSHHHHHHHHPLSVDPRREHERGGHLDERERLHMLREDYEHTRLHSVHPASLDGHLPHPSLITPGLPSMHYPRISPTAGNQNGLLNKTPPTAALSAPPPLISTLGGRPVSPRRTTPLSAEIRERPPSHTLKDIEAR

SEQ ID NO: 12572 - protein, 1235 aa, Homo sapiens
MDGPTRGHGLRKKRRSRSQRDRERRSRGGLGAGAAGGGGAGRTRALSLASSSGSDKEDNGKPPSSAPSRPRPPRRKRRESTSAEEDIIDGFAMTSFVTFEALEKDVALKPQERVEKRQTPLTKKKREALTNGLSFHSKKSRLSHPHHYSSDRENDRNLCQHLGKRKKMPKALRQLKPGQNSCRDSDSESASGESKGFHRSSSRERLSDSSAPSSLGTGYFCDSDSDQEEKASDASSEKLFNTVIVNKDPELGVGTLPEHDSQDAGPIVPKISGLERSQEKSQDCCKEPIFEPVVLKDPCPQVAQPIPQPQTEPQLRAPSPDPDLVQRTEAPPQPPPLSTQPPQGPPEAQLQPAPQPQVQRPPRPQSPTQLLHQNLPPVQAHPSAQSLSQPLSAYNSSSLSLNSLSSSRSSTPAKTQPAPPHISHHPSASPFPLSLPNHSPLHSFTPTLQPPAHSHHPNMFAPPTALPPPPPLTSGSLQVAGHPAGSTYSEQDILRQELNTRFLASQSADRGASLGPPPYLRTEFHQHQHQHQHTHQHTHQHTFTPFPHAIPPTAIMPTPAPPMFDKYPTKVDPFYRHSLFHSYPPAVSGIPPMIPPTGPFGSLQGAFQPKLTDPFRPMLRKPGKWCAMHVHIAWQIYHHQQKVKKQMQSDPHKLDFGLKPEFLSRPPGPSLFGAIHHPHDLARPSTLFSAAGAAHPTGTPFGPPPHHSNFLNPAAHLEPFNRPSTFTGLAAVGGNAFGGLGNPSVTPNSMFGHKDGPSVQNFSNPHEPWNRLHRTPPSFPTPPPWLKPGELERSASAAAHDRDRDVDKRDSSVSKDDKERESVEKRHSSHPSPAPVLPVNALGHTRSSTEQIRAHLNTEAREKDKPKERERDHSESRKDLAADEHKAKEGHLPEKDGHGHEGRAAGEEAKQLARVPSPYVRTPVVESARPNSTSSREAEPRKGEPAYENPKKSSEVKVKEERKEDHDLPPEAPQTHRASEPPPPNSSSSVHPGPLASMPMTVGVTGIHPMNSISSLDRTRMMTPFMGISPLPGGERFPYPSFHWDPIRDPLRDPYRELDIHRRDPLGRDFLLRNDPLHRLSTPRLYEADRSFRDREPHDYSHHHHHHHHPLSVDPRREHERGGHLDERERLHMLREDYEHTRLHSVHPASLDGHLPHPSLITPGLPSMHYPRISPTAGNQNGLLNKTPPTAALSAPPPLISTLGGRPVSPRRTTPLSAEIRERPPSHTLKDIEAR

SEQ ID NO: 12573 - protein, 266 aa, Homo sapiens
MDGPTRGHGLRKKRRSRSQRDRERRSRGGLGAGAAGGGGAGRTRALSLASSSGSDKEDNGKPPSSAPSRPRPPRRKRRESTSAEEDIIDGFAMTSFVTFEALEKDVALKPQERVEKRQTPLTKKKREALTNGLSFHSKKSRLSHPHHYSSDRENDRNLCQHLGKRKKMPKALRQLKPGQNSCRDSDSESASGESKGFHRSSSRERLSDSSAPSSLGTGYFRSGKMCLGEEACLKSGNDMKRDVSNTSSWASNRESFFSLVKLLKGF

SEQ ID NO: 12574 - protein, 680 aa, Homo sapiens
MPTPAPPMFDKYPTKVDPFYRHSLFHSYPPAVSGIPPMIPPTGPFGSLQGAFQPKLTDPFRPMLRKPGKWCAMHVHIAWQIYHHQQKVKKQMQSDPHKLDFGLKPEFLSRPPGPSLFGAIHHPHDLARPSTLFSAAGAAHPTGTPFGPPPHHSNFLNPAAHLEPFNRPSTFTGLAAVGGNAFGGLGNPSVTPNSMFGHKDGPSVQNFSNPHEPWNRLHRTPPSFPTPPPWLKPGELERSASAAAHDRDRDVDKRDSSVSKDDKERESVEKRHSSHPSPAPVLPVNALGHTRSSTEQIRAHLNTEAREKDKPKERERDHSESRKDLAADEHKAKEGHLPEKDGHGHEGRAAGEEAKQLARVPSPYVRTPVVESARPNSTSSREAEPRKGEPAYENPKKSSEVKVKEERKEDHDLPPEAPQTHRASEPPPPNSSSSVHPGPLASMPMTVGVTGIHPMNSISSLDRTRMMTPFMGISPLPGGERFPYPSFHWDPIRDPLRDPYRELDIHRRDPLGRDFLLRNDPLHRLSTPRLYEADRSFRDREPHDYSHHHHHHHHPLSVDPRREHERGGHLDERERLHMLREDYEHTRLHSVHPASLDGHLPHPSLITPGLPSMHYPRISPTAGNQNGLLNKTPPTAALSAPPPLISTLGGRPVSPRRTTPLSAEIRERPPSHTLKDIEAR

SEQ ID NO: 12575 - protein, 448 aa, Homo sapiens
MKGFIDDANYSVGLLDEGTNLGNVIDNYVYEHTLTGKNAFFVGDLGKIVKKHSQWQNVVAQIKPFYTVKCNSAPAVLEILAALGTGFACSSKNEMALVQELGVPPENIIYISPCKQVSQIKYAAKVGVNILTCDNEIELKKIARNHPNAKVLLHIATEDNIGGEEGNMKFGTTLKNCRHLLECAKELDVQIIGVKFHVSSACKESQVYVHALSDARCVFDMAGEIGFTMNMLDIGGGFTGTEFQLEEVNHVISPLLDIYFPEGSGVKIISEPGSYYVSSAFTLAVNIIAKKVVENDKFPSGVEKTGSDEPAFMYYMNDGVYGSFASKLSEDLNTIPEVHKKYKEDEPLFTSSLWGPSCDELDQIVESCLLPELNVGDWLIFDNMGADSFHEPSAFNDFQRPAIYYMMSFSDWYEMQDAGITSDSMMKNFFFVPSCIQLSQEDSFSAEA

SEQ ID NO: 12576 - protein, 236 aa, Homo sapiens
MAETKLQLFVKASEDGESVGHCPSCQRLFMVLLLKGVPFTLTTVDTRRSPDVLKDFAPGSQLPILLYDSDAKTDTLQIEDFLEETLGPPDFPSLAPRYRESNTAGNDVFHKFSAFIKNPVPAQDEALYQQLLRALARLDSYLRAPLEHELAGEPQLRESRRRFLDGDRLTLADCSLLPKLHIVDTVCAHFRQAPIPAELRGVRRYLDSAMQEKEFKYTCPHSAEILAAYRPAVHPR

SEQ ID NO: 12577 - protein, 321 aa, Homo sapiens
MKHIPVLEDGPWKTVCVKELNGLKKLKRKGKEPARRANGYKTFRLDLEAPEPRAVATNGLRDRTHRLQPVPVPVPVPVPVAPAVPPRGGTDTAGERGGSRAPEVSDARKRCFALGAVGPGLPTPPPPPPPAPQSQAPGGPEAQPFREPGLRPRILLCAPPARPAPSAPPAPPAPPESTVRPAPPTRPGESSYSSISHVIYNNHQDSSASPRKRPGEATAASSEIKALQQTRRLLANARERTRVHTISAAFEALRKQVPCYSYGQKLSKLAILRIACNYILSLARLADLDYSADHSNLSFSECVQRCTRTLQAEGRAKKRKE

SEQ ID NO: 12578 - protein, 416 aa, Homo sapiens
MKHIPVLEDGPWKTVCVKELNGLKKLKRKGKEPARRANGYKTFRLDLEAPEPRAVATNGLRDRTHRLQPVPVPVPVPVPVAPAVPPRGGTDTAGERGGSRAPEVSDARKRCFALGAVGPGLPTPPPPPPPAPQSQAPGGPEAQPFREPGLRPRILLCAPPARPAPSAPPAPPAPPESTVRPAPPTRPGESSYSSISHVIYNNHQDSSASPRKRPGEATAASSEIKALQQTRRLLANARERTRVHTISAAFEALRKQVPCYSYGQKLSKLAILRIACNYILSLARLADLDYSADHSNLSFSECVQRCTRTLQAEGRAKKRKSLIITQDTTARAAGLEAAGKTVQKVLCERGNSLMNNRTGRRKSWRLEFLFLRRRCFLLTFYLWFLFFSRFLLMLFLPLLTSVVTFLPPLRARRPPH

SEQ ID NO: 12579 - protein, 400 aa, Homo sapiens
MLPRALLLSFCAAALQLVSSKRDLVLVKEALSWYDAQQHCRLHYTDLADLQPSGLWKLYSLMTSTPAWIGLFFDASTSGLRWSSGSTFTALEWGQKLPEFGVGFCATLYTWLKLPSIGAASCTAQKPFLCYCDPDVGHLISTKPSLSLTTSPKPAVVQISGQTFMRFDQVMTWSSALLYCRSHHTDLADLQMVTDETGKEALRSIMSETEAWIGLYLNANSGSLSWSSDLGASIPSWLQVPMMVRGLCTALGIYMTYSPKVYSVNCSSLLPFFCFYDSSTGHRASAELPPLFHTSPTEMTEETTPRPGRAVASVGSGTDRRDTAAATEAQHLSSESKEKTSAQKSGHPFGILKADFTISTLMDPEEMKDQFLRQIQEVLKLTLGHEQFRLKWVSFEVNKK

SEQ ID NO: 12580 - protein, 2615 aa, Homo sapiens
MKILLIIFVLIIWTETLADQSPGPGPVYADVVFLVDSSDHLGPKSFPFVKTFINKMINSLPIEANKYRVALAQYSDEFHSEFHLSTFKGRSPMLNHLKKNFQFIGGSLQIGKALQEAHRTYFSAPINGRDRKQFPPILVVLASAESEDEVEEASKALQKDGVKIISVGVQKASEENLKAMATSHFHFNLRTIRDLSTFSQNMTQIIKDVTKYKEGAVDADMQVHFPISCQKDSLADLVFLVDESLGTGGNLRHLQTFLENITSSMDVKENCMRLGLMSYSNSAKTISFLKSSTTQSEFQQQIKNLSIQVGKSNTGAAIDQMRRDGFSESYGSRRAQGVPQIAVLVTHRPSDDEVHDAALNLRLEDVNVFALSIQGANNTQLEEIVSYPPEQTISTLKSYADLETYSTKFLKKLQNEIWSQISTYAEQRNLDKTGCVDTKEADIHFLIDGSSSIQEKQFEQIKRFMLEVTEMFSIGPDKVRVGVVQYSDDTEVEFYITDYSNDIDLRKAIFNIKQLTGGTYTGKALDYILQIIKNGMKDRMSKVPCYLIVLTDGMSTDRVVEPAKRLRAEQITVHAVGIGAANKIELQEIAGKEERVSFGQNFDALKSIKNEVVREICAEKGCEDMKADIMFLVDSSWSIGNENFRKMKIFMKNLLTKIQIGADKTQIGVVQFSDKTKEEFQLNRYFTQQEISDAIDRMSLINEGTLTGKALNFVGQYFTHSKGARLGAKKFLILITDGVAQDDVRDPARILRGKDVTIFSVGVYNANRSQLEEISGDSSLVFHVENFDHLKALERKLIFRVCALHDCKRITLLDVVFVLDHSGSIKKQYQDHMINLTIHLVKKADVGRDRVQFGALKYSDQPNILFYLNTYSNRSAIIENLRKRRDTGGNTYTAKALKHANALFTEEHGSRIKQNVKQMLIVITDGESHDHDQLNDTALELRNKGITIFAVGVGKANQKELEGMAGNKNNTIYVDNFDKLKDVFTLVQERMCTEAPEVCHLQEADVIFLCDGSDRVSNSDFVTMTTFLSDLIDNFDIQSQRMKIGMAQFGSNYQSIIELKNSLTKTQWKTQIQNVSKSGGFPRIDFALKKVSNMFNLHAGGRRNAGVPQTLVVITSGDPRYDVADAVKTLKDLGICVLVLGIGDVYKEHLLPITGNSEKIITFQDFDKLKNVDVKKRIIREICQSCGKTNCFMDIVVGFDISTHVQGQPLFQGHPQLESYLPGILEDISSIKGVSCGAGTEAQVSLAFKVNSDQGFPAKFQIYQKAVFDSLLQVNVSGPTHLNAQFLRSLWDTFKDKSASRGQVLLIFSDGLQSESNIMLENQSDRLREAGLDALLVVSLNTTAHHEFSSFEFGKRFDYRTHLTIGMRELGKKLSQYLGNIAERTCCCTFCKCPGIPGPHGTRGLQAMKGSQGLKGSRGHRGEDGNPGVRGDTGPQGDKGIAGCPGAWGQKGLKGFSGPKGGHGDDGIDGLDGEEGCHGFPGIKGEKGDPGSQGSPGSRGAPGQYGEKGFPGDPGNPGQNNNIKGQKGSKGEQGRQGRSGQKGVQGSPSSRGSRGREGQRGLRGVSGEPGNPGPTGTLGAEGLQGPQGSQGNPGRKGEKGSQGQKGPQGSPGLMGAKGSTGRPGLLGKKGEPGLPGDLGPVGQTGQRGRQGDSGIPGYGQMGRKGVKGPRGFPGDAGQKGDIGNPGIPGGPGPKGFRGLALTVGLKGEEGSRGLPGPPGQRGIKGMAGQPVYSQCDLIRFLREHSPCWKEKCPAYPTELVFALDNSYDVTEESFNKTRDIITSIVNDLNIRENNCPVGARVAMVSYNSGTSYLIRWSDYNRKKQLLQQLSQIKYQDTTEPRDVGNAMRFVTRNVFKRTYAGANVRRVAVFFSNGQTASRSSIITATMEFSALDISPTVFAFDERVFLEAFGFDNTGTFQVIPVPPNGENQTLERLRRCALCYDKCFPNACIREAFLPEDSYMDVVFLIDNSRNIAKDEFKAVKALVSSVIDNFNIASDPLISDSGDRIALLSYSPWESSRRKMGTVKTEFDFITYDNQLLMKNHIQTSFQQLNGEATIGRALLWTTENLFPETPYLRKHKVIFVVSAGENYERKEFVKMMALRAKCQGYVIFVISLGSTRKDDMEELASYPLDQHLIQLGRIHKPDLNYIAKFLKPFLYSVRRGFNQYPPPMLEDACRLINLGGENIQNDGFQFVTELQEDFLGGNGFIGQELNSGRESPFVKTEDNGSDYLVYLPSQMFEPQKLMINYEKDQKSAEIASLTSGHENYGRKEEPDHTYEPGDVSLQEYYMDVAFLIDASQRVGSDEFKEVKAFITSVLDYFHIAPTPLTSTLGDRVAVLSYSPPGYMPNTEECPVYLEFDLVTYNSIHQMKHHLQDSQQLNGDVFIGHALQWTIDNVFVGTPNLRKNKVIFVISAGETNSLDKDVLRNVSLRAKCQGYSIFVFSFGPKHNDKELEELASHPLDHHLVQLGRTHKPDWNYIIKFVKPFVHLIRRAINKYPTEDMKATCVNMTSPNPENGGTENTVLLLPGIYEIKTENGDLFDEFDSQAQHLLVLGNNHSSGSETATDLMQKLYLLFSTEKLAMKDKEKAHLEEISALVVDKQQEKEDKEMEATDI

SEQ ID NO: 12581 - protein, 2526 aa, Homo sapiens
MKILLIIFVLIIWTETLADQSPGPGPVYADVVFLVDSSDHLGPKSFPFVKTFINKMINSLPIEANKYRVALAQYSDEFHSEFHLSTFKGRSPMLNHLKKNFQFIGGSLQIGKALQEAHRTYFSAPINGRDRKQFPPILVVLASAESEDEVEEASKALQKDGVKIISVGVQKASEENLKAMATSHFHFNLRTIRDLSTFSQNMTQIIKDVTKYKEGAVDADMQVHFPISCQKDSLADLVFLVDESLGTGGNLRHLQTFLENITSSMDVKENCMRLGLMSYSNSAKTISFLKSSTTQSEFQQQIKNLSIQVGKSNTGAAIDQMRRDGFSESYGSRRAQGVPQIAVLVTHRPSDDEVHDAALNLRLEDVNVFALSIQGANNTQLEEIVSYPPEQTISTLKSYADLETYSTKFLKKLQNEIWSQISTYAEQRNLDKTGCVDTKEADIHFLIDGSSSIQEKQFEQIKRFMLEVTEMFSIGPDKVRVGVVQYSDDTEVEFYITDYSNDIDLRKAIFNIKQLTGGTYTGKALDYILQIIKNGMKDRMSKVPCYLIVLTDGMSTDRVVEPAKRLRAEQITVHAVGIGAANKIELQEIAGKEERVSFGQNFDALKSIKNEVVREICAEKGCEDMKADIMFLVDSSWSIGNENFRKMKIFMKNLLTKIQIGADKTQIGVVQFSDKTKEEFQLNRYFTQQEISDAIDRMSLINEGTLTGKALNFVGQYFTHSKGARLGAKKFLILITDGVAQDDVRDPARILRGKDVTIFSVGVYNANRSQLEEISGDSSLVFHVENFDHLKALERKLIFRVCALHDCKRITLLDVVFVLDHSGSIKKQYQDHMINLTIHLVKKADVGRDRVQFGALKYSDQPNILFYLNTYSNRSAIIENLRKRRDTGGNTYTAKALKHANALFTEEHGSRIKQNVKQMLIVITDGESHDHDQLNDTALELRNKGITIFAVGVGKANQKELEGMAGNKNNTIYVDNFDKLKDVFTLVQERMCTEAPEVCHLQEADVIFLCDGSDRVSNSDFVTMTTFLSDLIDNFDIQSQRMKIGMAQFGSNYQSIIELKNSLTKTQWKTQIQNVSKSGGFPRIDFALKKVSNMFNLHAGGRRNAGVPQTLVVITSGDPRYDVADAVKTLKDLGICVLVLGIGDVYKEHLLPITGNSEKIITFQDFDKLKNVDVKKRIIREICQSCGKTNCFMDIVVGFDISTHVQGQPLFQGHPQLESYLPGILEDISSIKGVSCGAGTEAQVSLAFKVNSDQGFPAKFQIYQKAVFDSLLQVNVSGPTHLNAQFLRSLWDTFKDKSASRGQVLLIFSDGLQSESNIMLENQSDRLREAGLDALLVVSLNTTAHHEFSSFEFGKRFDYRTHLTIGMRELGKKLSQYLGNIAERTCCCTFCKCPGIPGPHGTRGLQAMKGSQGLKGSRGHRGEDGNPGVRGDTGPQGDKGIAGCPGAWGQKGLKGFSGPKGGHGDDGIDGLDGEEGCHGFPGIKGEKGDPGSQGSPGSRGAPGQYGEKGFPGDPGNPGQNNNIKGQKGSKGEQGRQGRSGQKGVQGSPSSRGSRGREGQRGLRGVSGEPGNPGPTGTLGAEGLQGPQGSQGNPGRKGEKGSQGQKGPQGSPGLMGAKGSTGRPGLLGKKGEPGLPGDLGPVGQTGQRGRQGDSGIPGYGQMGRKGVKGPRGFPGDAGQKGDIGNPGIPGGPGPKGFRGLALTVGLKGEEGSRGLPGPPGQRGIKGMAGQPVYSQCDLIRFLREHSPCWKEKCPAYPTELVFALDNSYDVTEESFNKTRDIITSIVNDLNIRENNCPVGARVAMVSYNSGTSYLIRWSDYNRKKQLLQQLSQIKYQDTTEPRDVGNAMRFVTRNVFKRTYAGANVRRVAVFFSNGQTASRSSIITATMEFSALDISPTVFAFDERVFLEAFGFDNTGTFQVIPVPPNGENQTLERLRRCALCYDKCFPNACIREAFLPEDSYMDVVFLIDNSRNIAKDEFKAVKALVSSVIDNFNIASDPLISDSGDRIALLSYSPWESSRRKMGTVKTEFDFITYDNQLLMKNHIQTSFQQLNGEATIGRALLWTTENLFPETPYLRKHKVIFVVSAGENYERKEFVKMMALRAKCQGYVIFVISLGSTRKDDMEELASYPLDQHLIQLGRIHKPDLNYIAKFLKPFLYSVRRGFNQYPPPMLEDACRLINLGGENIQNDGFQFVTELQEDFLGGNGFIGQELNSGRESPFVKTEDNGSDYLVYLPSQMFEPQKLMINYEKDQKSAEIASLTSGHENYGRKEEPDHTYEPGDVSLQEYYMDVAFLIDASQRVGSDEFKEVKAFITSVLDYFHIAPTPLTSTLGDRVAVLSYSPPGYMPNTEECPVYLEFDLVTYNSIHQMKHHLQDSQQLNGDVFIGHALQWTIDNVFVGTPNLRKNKVIFVISAGETNSLDKDVLRNVSLRAKCQGYSIFVFSFGPKHNDKELEELASHPLDHHLVQLGRTHKPDWNYIIKFVKPFVHLIRRAINKYPTEDMKATCVNMTSPNPENGGTENTVLW

SEQ ID NO: 12582 - protein, 125 aa, Homo sapiens
MGPGGPLLSPSRGFLLCKTGWHSNRLLGDCGPHTPVSTALSFIAVGMAAPSMKERQVCWGARDEYWKCLDENLEDASQCKKLRSSFESSCPQQWIKYFDKRRDYLKFKEKFEAGQFEPSETTAKS

SEQ ID NO: 12583 - protein, 155 aa, Homo sapiens
MVARKGQKSPRFRRVSCFLRLGRSTLLELEPAGRPCSGRTRHRALHRRLVACVTVSSRRHRKEAGRGRAESFIAVGMAAPSMKERQVCWGARDEYWKCLDENLEDASQCKKLRSSFESSCPQQWIKYFDKRRDYLKFKEKFEAGQFEPSETTAKS

SEQ ID NO: 12584 - protein, 79 aa, Homo sapiens
MAAPSMKERQVCWGARDEYWKCLDENLEDASQCKKLRSSFESSCPQQWIKYFDKRRDYLKFKEKFEAGQFEPSETTAKS

SEQ ID NO: 12585 - protein, 494 aa, Homo sapiens
MLASGLLLVALLACLTVMVLMSVWQQRKSRGKLPPGPTPLPFIGNYLQLNTEHICDSIMKFSECYGPVFTIHLGPRRVVVLCGHDAVREALVDQAEEFSGRGEQATFDWVFKGYGVAFSNGERAKQLLRFAIATLRDFGVGKRGIEERIQEESGFLIEAIRSTHGANIDPTFFLSRTVSNVISSIVFGDRFDYEDKEFLSLLSMMLGIFQFTSTSTGQLYEMFSSVMKHLPGPQQQAFKLLQGLEDFIAKKVEHNQRTLDPNSPQDFIDSFLIHMQEEEKNPNTEFYLKNLMMSTLNLFIAGTETVSTTLRYGFLLLMKHPEVEAKVHEEIDRVIGKNRQPKFEDRTKMPYMEAVIHEIQRFGDVIPMSLARRVKKDTKFRDFFLPKGTEVFPMLGSVLRDPSFFSNPQDFNPQHFLDDKGQFKKSDAFVPFSIGKRNCFGEGLARMELFLFFTTVMQNFRLKSSQSPKDIDVSPKHVVFATIPRNYTMSFLPR

SEQ ID NO: 12586 - protein, 454 aa, Homo sapiens [sequence omitted]

SEQ ID NO: 12587 - protein, 494 aa, Homo sapiens
MLASGLLLVTLLACLTVMVLMSVWRQRKSRGKLPPGPTPLPFIGNYLQLNTEQMYNSLMKISERYGPVFTIHLGPRRVVVLCGHDAVKEALVDQAEEFSGRGEQATFDWLFKGYGVAFSNGERAKQLRRFSIATLRGFGVGKRGIEERIQEEAGFLIDALRGTHGANIDPTFFLSRTVSNVISSIVFGDRFDYEDKEFLSLLRMMLGSFQFTATSTGQLYEMFSSVMKHLPGPQQQAFKELQGLEDFIAKKVEHNQRTLDPNSPRDFIDSFLIRMQEEEKNPNTEFYLKNLVMTTLNLFFAGTETVSTTLRYGFLLLMKHPEVEAKVHEEIDRVIGKNRQPKFEDRAKMPYTEAVIHEIQRFGDMLPMGLAHRVNKDTKFRDFFLPKGTEVFPMLGSVLRDPRFFSNPRDFNPQHFLDKKGQFKKSDAFVPFSIGKRYCFGEGLARMELFLFFTTIMQNFRFKSPQSPKDIDVSPKHVGFATIPRNYTMSFLPR

SEQ ID NO: 12588 - protein, 174 aa, Homo sapiens
MDKHGVKTPLWKKETEELRAEDAEQEEGKEGSEDEDEDNQRPLEDSATEGEEPPRVAEEGEGRERRSVSYCPLRQESSTQQVALLRRADSGFWGWLGPLALLGGLTAPTDRKRSLPEEPCVLEIRRRPPRRGGCACCELLFCKKCRSLHSHPAYVAHCVLDHPDLGKAGAAGNS

SEQ ID NO: 12589 - protein, 141 aa, Homo sapiens
MTSSAPTLPDVTIRNVSRHIQMSLMGKGEPPWLCRLQLEPLLQAMEEQQLGNLEARWEVEKHGNEVSGSTSREVWEDADFICPVLKQCTNPKLNENKNIHQAKECEKSPFLSLSPHQQWKPGLPRRNDALPTSLCLCCSEN

SEQ ID NO: 12590 - protein, 117 aa, Homo sapiens
MTSSAPTLPDVTIRNVSRHIQMSLMGKGEPPWLCRLQLEPLLQAMEEQQLGNLEARWEVEKHGNEVSGSTSKSEPLPRYYLYNQTELQGALWSGQHPPEGQGEIFQTVFQQRSLGRC

SEQ ID NO: 12591 - protein, 97 aa, Homo sapiens
MNRLYLTPDGFFFRVHMLALDSSSCNKPCPEFKPGSRYIVMGHIYHKRRQLPTALLQVLRGRLRPGDGLLRSSSSYVKRFNRKREGQIQGAIHTQCI

SEQ ID NO: 12592 - protein, 75 aa, Homo sapiens
MNRLYLTPDGFFFRVHMLALDSSSCNKPCPEFKPGIETDLNDAAYVLYTTVCNVGATARAVGRPAFFWERWETMT

SEQ ID NO: 12593 - protein, 167 aa, Homo sapiens
MFDFSFPTPASAGTRMGPASCGGRSLHLPQLRFSRVDATAVTDVPFQRMHAPHRAPEVFCSRSSRGAGRGHPTPTPRVRWALAGNQPRCCAQLLSGRGGSGAQLRAGWVRGAAVGNLFILLLGKEDGEEEGTVLSYSSMVHISNITGIVGTTVSRTKPALVLMELTF

SEQ ID NO: 12594 - protein, 1313 aa, Homo sapiens
MRSAAAAPRSPAVATESRRFAAARWPGWRSLQRPARRSGRGGGGAAPGPYPSAAPPPPGPGPPPSRQSSPPSASDCFGSNGNGGGAFRPGSRRLLGLGGPPRPFVVLLLPLASPGAPPAAPTRASPLGARASPPRSGVSLARPAPGCPRPACEPVYGPLTMSLKPQQQQQQQQQQQQQQQQQQQQQQQPPPAAANVRKPGGSGLLASPAAAPSPSSSSVSSSSATAPSSVVAATSGGGRPGLGRGRNSNKGLPQSTISFDGIYANMRMVHILTSVVGSKCEVQVKNGGIYEGVFKTYSPKCDLVLDAAHEKSTESSSGPKREEIMESILFKCSDFVVVQFKDMDSSYAKRDAFTDSAISAKVNGEHKEKDLEPWDAGELTANEELEALENDVSNGWDPNDMFRYNEENYGVVSTYDSSLSSYTVPLERDNSEEFLKREARANQLAEEIESSAQYKARVALENDDRSEEEKYTAVQRNSSEREGHSINTRENKYIPPGQRNREVISWGSGRQNSPRMGQPGSGSMPSRSTSHTSDFNPNSGSDQRVVNGGVPWPSPCPSPSSRPPSRYQSGPNSLPPRAATPTRPPSRPPSRPSRPPSHPSAHGSPAPVSTMPKRMSSEGPPRMSPKAQRHPRNHRVSAGRGSISSGLEFVSHNPPSEAATPPVARTSPSGGTWSSVVSGVPRLSPKTHRPRSPRQNSIGNTPSGPVLASPQAGIIPTEAVAMPIPAASPTPASPASNRAVTPSSEAKDSRLQDQRQNSPAGNKENIKPNETSPSFSKAENKGISPVVSEHRKQIDDLKKFKNDFRLQPSSTSESMDQLLNKNREGEKSRDLIKDKIEPSAKDSFIENSSSNCTSGSSKPNSPSISPSILSNTEHKRGPEVTSQGVQTSSPACKQEKDDKEEKKDAAEQVRKSTLNPNAKEFNPRSFSQPKPSTTPTSPRPQAQPSPSMVGHQQPTPVYTQPVCFAPNMMYPVPVSPGVQPLYPIPMTPMPVNQAKTYRAVPNMPQQRQDQHHQSAMMHPASAAGPPIAATPPAYSTQYVAYSPQQFPNQPLVQHVPHYQSQHPHVYSPVIQGNARMMAPPTHAQPGLVSSSATQYGAHEQTHAMYACPKLPYNKETSPSFYFAISTGSLAQQYAHPNATLHPHTPHPQPSATPTGQQQSQHGGSHPAPSPVQHHQHQAAQALHLASPQQQSAIYHAGLAPTPPSMTPASNTQSPQNSFPAAQQTVFTIHPSHVQPAYTNPPHMAHVPQAHVQSGMVPSHPTAHAPMMLMTTQPPGGPQAALAQSALQPIPVSTTAHFPYMTHPSVQAHHQQQL

SEQ ID NO: 12595 - protein, 995 aa, Homo sapiens
MRSAAAAPRSPAVATESRRFAAARWPGWRSLQRPARRSGRGGGGAAPGPYPSAAPPPPGPGPPPSRQSSPPSASDCFGSNGNGGGAFRPGSRRLLGLGGPPRPFVVLLLPLASPGAPPAAPTRASPLGARASPPRSGVSLARPAPGCPRPACEPVYGPLTMSLKPQQQQQQQQQQQQQQQQQQQQQQQPPPAAANVRKPGGSGLLASPAAAPSPSSSSVSSSSATAPSSVVAATSGGGRPGLGRGRNSNKGLPQSTISFDGIYANMRMVHILTSVVGSKCEVQVKNGGIYEGVFKTYSPKCDLVLDAAHEKSTESSSGPKREEIMESILFKCSDFVVVQFKDMDSSYAKRDAFTDSAISAKVNGEHKEKDLEPWDAGELTANEELEALENDVSNGWDPNDMFRYNEENYGVVSTYDSSLSSYTVPLERDNSEEFLKREARANQLAEEIESSAQYKARVALENDDRSEEEKYTAVQRNSSEREGHSINTRENKYIPPGQRNREVISWGSGRQNSPRMGQPGSGSMPSRSTSHTSDFNPNSGSDQRVVNGGVPWPSPCPSPSSRPPSRYQSGPNSLPPRAATPTRPPSRPPSRPSRPPSHPSAHGSPAPVSTMPKRMSSEGPPRMSPKAQRHPRNHRVSAGRGSISSGLEFVSHNPPSEAATPPVARTSPSGGTWSSVVSGVPRLSPKTHRPRSPRQNSIGNTPSGPVLASPQAGIIPTEAVAMPIPAASPTPASPASNRAVTPSSEAKDSRLQDQRQNSPAGNKENIKPNETSPSFSKAENKGISPVVSEHRKQIDDLKKFKNDFRLQPSSTSESMDQLLNKNREGEKSRDLIKDKIEPSAKDSFIENSSSNCTSGSSKPNSPSISPSILSNTEHKRGPEVTSQGVQTSSPACKQEKDDKEEKKDAAEQVRKSTLNPNAKEFNPRSFSQPKPSTTPTSPRPQAQPSPSMVGHQQPTPVYTQPVCFAPNMMYPVPVSPGVQYQICPNSGKTSIIRVP

SEQ ID NO: 12596 - protein, 258 aa, Homo sapiens
MYYAVEILFNRQSAFFSAVPNMPQQRQDQHHQSAMMHPASAAGPPIAATPPAYSTQYVAYSPQQFPNQPLVQHVPHYQSQHPHVYSPVIQGNARMMAPPTHAQPGLVSSSATQYGAHEQTHAMYVSTGSLAQQYAHPNATLHPHTPHPQPSATPTGQQQSQHGGSHPAPSPVQHHQHQAAQALHLASPQQQSAIYHAGLAPTPPSMTPASNTQSPQNSFPAAQQTVFTIHPSHVQPAYTNPPHMAHVPQVIPALANFL

SEQ ID NO: 12597 - protein, 1243 aa, Homo sapiens
MRSAAAAPRSPAVATESRRFAAARWPGWRSLQRPARRSGRGGGGAAPGPYPSAAPPPPGPGPPPSRQSSPPSASDCFGSNGNGGGAFRPGSRRLLGLGGPPRPFVVLLLPLASPGAPPAAPTRASPLGARASPPRSGVSLARPAPGCPRPACEPVYGPLTMSLKPQQQQQQQQQQQQQQQQQQQQQQQPPPAAANVRKPGGSGLLASPAAAPSPSSSSVSSSSATAPSSVVAATSGGGRPGLGRGRNSNKGLPQSTISFDGIYANMRMVHILTSVVGSKCEVQVKNGGIYEGVFKTYSPKCDLVLDAAHEKSTESSSGPKREEIMESILFKCSDFVVVQFKDMDSSYAKRDAFTDSAISAKVNGEHKEKDLEPWDAGELTANEELEALENDVSNGWDPNDMFRYNEENYGVVSTYDSSLSSYTVPLERDNSEEFLKREARANQLAEEIESSAQYKARVALENDDRSEEEKYTAVQRNSSEREGHSINTRENKYIPPGQRNREVISWGSGRQNSPRMGQPGSGSMPSRSTSHTSDFNPNSGSDQRVVNGGVPWPSPCPSPSSRPPSRYQSGPNSLPPRAATPTRPPSRPPSRPSRPPSHPSAHGSPAPVSTMPKRMSSEGPPRMSPKAQRHPRNHRVSAGRGSISSGLEFVSHNPPSEAATPPVARTSPSGGTWSSVVSGVPRLSPKTHRPRSPRQNSIGNTPSGPVLASPQAGIIPTEAVAMPIPAASPTPASPASNRAVTPSSEAKDSRLQDQRQNSPAGNKENIKPNETSPSFSKAENKGISPVVSEHRKQIDDLKKFKNDFRLQPSSTSESMDQLLNKNREGEKSRDLIKDKIEPSAKDSFIENSSSNCTSGSSKPNSPSISPSILSNTEHKRGPEVTSQGVQTSSPACKQEKDDKEEKKDAAEQVRKSTLNPNAKEFNPRSFSQPKPSTTPTSPRPQAQPSPSMVGHQQPTPVYTQPVCFAPNMMYPVPVSPGVQPLYPIPMTPMPVNQAKTYRAVPNMPQQRQDQHHQSAMMHPASAAGPPIAATPPAYSTQYVAYSPQQFPNQPLVQHVPHYQSQHPHVYSPVIQGNARMMAPPTHAQPGLVSSSATQYGAHEQTHAMYACPKLPYNKETSPSFYFAISTGSLAQQYAHPNATLHPHTPHPQPSATPTGQQQSQHGGSHPAPSPVQHHQHQAAQALHLASPQQQSAIYHAGLAPTPPSMTPASNTQSPQNSFPAAQQTVFTIHPSHVQPAYTNPPHM

SEQ ID NO: 12598 - protein, 1006 aa, Homo sapiens
MRMVHILTSVVCDLVLDAAHEKSTESSSGPKREEIMESILFKCSDFVVVQFKDMDSSYAKRDAFTDSAISAKVNGEHKEKDLEPWDAGELTANEELEALENDVSNGWDPNDMFRYNEENYGVVSTYDSSLSSYTVPLERDNSEEFLKREARANQLAEEIESSAQYKARVALENDDRSEEEKYTAVQRNSSEREGHSINTRENKYIPPGQRNREVISWGSGRQNSPRMGQPGSGSMPSRSTSHTSDFNPNSGSDQRVVNGGVPWPSPCPSPSSRPPSRYQSGPNSLPPRAATPTRPPSRPPSRPSRPPSHPSAHGSPAPVSTMPKRMSSEGPPRMSPKAQRHPRNHRVSAGRGSISSGLEFVSHNPPSEAATPPVARTSPSGGTWSSVVSGVPRLSPKTHRPRSPRQNSIGNTPSGPVLASPQAGIIPTEAVAMPIPAASPTPASPASNRAVTPSSEAKDSRLQDQRQNSPAGNKENIKPNETSPSFSKAENKGISPVVSEHRKQIDDLKKFKNDFRLQPSSTSESMDQLLNKNREGEKSRDLIKDKIEPSAKDSFIENSSSNCTSGSSKPNSPSISPSILSNTEHKRGPEVTSQGVQTSSPACKQEKDDKEEKKDAAEQVRKSTLNPNAKEFNPRSFSQPKPSTTPTSPRPQAQPSPSMVGHQQPTPVYTQPVCFAPNMMYPVPVSPGVQPLYPIPMTPMPVNQAKTYRAVPNMPQQRQDQHHQSAMMHPASAAGPPIAATPPAYSTQYVAYSPQQFPNQPLVQHVPHYQSQHPHVYSPVIQGNARMMAPPTHAQPGLVSSSATQYGAHEQTHAMYVSTGSLAQQYAHPNATLHPHTPHPQPSATPTGQQQSQHGGSHPAPSPVQHHQHQAAQALHLASPQQQSAIYHAGLAPTPPSMTPASNTQSPQNSFPAAQQTVFTIHPSHVQPAYTNPPHMAHVPQAHVQSGMVPSHPTAHAPMMLMTTQPPGGPQAALAQSALQPIPVSTTAHFPYMTHPSVQAHHQQQL

SEQ ID NO: 12599 - protein, 328 aa, Homo sapiens
MAHSKQPSHFQSLMLLQWPLSYLAIFWILQPLFVYLLFTSLWPLPVLYFAWLFLDWKTPERGGRRSAWVRNWCVWTHIRDYFPITILKTKDLSPEHNYLMGVHPHGLLTFGAFCNFCTEATGFSKTFPGITPHLATLSWFFKIPFVREYLMAKGVCSVSQPAINYLLSHGTGNLVGIVVGGVGEALQSVPNTTTLILQKRKGFVRTALQHGAHLVPTFTFGETEVYDQVLFHKDSRMYKFQSCFRRIFGFYCCVFYGQSFCQGSTGLLPYSRPIVTVVGEPLPLPQIEKPSQEMVDKYHALYMDALHKLFDQHKTHYGCSETQKLFFL

SEQ ID NO: 12600 - protein, 403 aa, Homo sapiens [sequence omitted]

SEQ ID NO: 12601 - protein, 85 aa, Homo sapiens
MEASSEPPLDAKSDVTNQLVDFQWKLGMAVSSDTCRSLKYPYVAVMLKVADHSGQVKTKCFEMTIPQFQNFYRQFKEIAAVIETV

SEQ ID NO: 12602 - protein, 98 aa, Homo sapiens
MEASSEPPLDAKSDVTNQLVDFQWKLGMAVSSDTCRSLKYPYVAVMLKVADHSGQVKTKCFEMTIPQFQPQLLATSSLLSASNFYRQFKEIAAVIETV

SEQ ID NO: 12603 - protein, 104 aa, Homo sapiens
MGRIPGGCSSKAFIGRAQWLTPVIPALWEAKGLTLLSRLECSDVIMDHCSPQLTGLRMKGFLAQTPPLEFPVHQYQPGDHVLIKSWKRESLNQLRRTSSGTLDE

SEQ ID NO: 12604 - protein, 68 aa, Homo sapiens
MGRIPGGCSSKAFIGRAQWLTPVIPALWEAKDERLPSTNTTPGVPGTSIPAWGSRSHQELEEGKLEPA

SEQ ID NO: 12605 - protein, 226 aa, Homo sapiens
MNENLFASFIAPTILGLPAAVLIILFPPLLIPTSKYLINNRLITTQQWLIKLTSKQMMTMHNTKGRTWSLMLVSLIIFIATTNLLGLLPHSFTPTTQLSMNLAMAIPLWAGTVIMGFRSKIKNALAHFLPQGTPTPLIPMLVIIETISLLIQPMALAVRLTANITAGHLLMHLIGSATLAMSTINLPSTLIIFTILILLTILEIAVALIQAYVFTLLVSLYLHDNT

SEQ ID NO: 12606 - protein, 522 aa, Homo sapiens
MFPWGLSCLSVLGAAGTALLCAGLLLSLAQHLWTLRWMLSRDRASTLPLPKGSMGWPFFGETLHWLVQGSRFHSSRRERYGTVFKTHLLGRPVIRVSGAENVRTILLGEHRLVRSQWPQSAHILLGSHTLLGAVGEPHRRRRKVLARVFSRAALERYVPRLQGALRHEVRSWCAAGGPVSVYDASKALTFRMAARILLGLRLDEAQCATLARTFEQLVENLFSLPLDVPFSGLRKGIRARDQLHRHLEGAISEKLHEDKAAEPGDALDLIIHSARELGHEPSMQELKESAVELLFAAFFTTASASTSLVLLLLQHPAAIAKIREELVAQGLGRACGCAPGAAGGSEGPPPDCGCEPDLSLAALGRLRYVDCVVKEVLRLLPPVSGGYRTALRTFELDGYQIPKGWSVMYSIRDTHETAAVYRSPPEGFDPERFGAAREDSRGASSRFHYIPFGGGARSCLGQELAQAVLQLLAVELVRTARWELATPAFPAMQTVPIVHPVDGLRLFFHPLTPSVAGNGLCL

SEQ ID NO: 12607 - protein, 334 aa, Homo sapiens
MAASGSGMAQKTWELANNMQEAQSIDEIYKYDKKQQQEILAAKPWTKDHHYFKYCKISALALLKMVMHARSGGNLEVMGLMLGKVDGETMIIMDSFALPVEGTETRVNAQAAAYEYMAAYIENAKQVGRLENAIGWYHSHPGYGCWLSGIDVSTQMLNQQFQEPFVAVVIDPTRTISAGKVNLGAFRTYPKGYKPPDEGPSEYQTIPLNKIEDFGVHCKQYYALEVSYFKSSLDRKLLELLWNKYWVNTLSSSSLLTNADYTTGQVFDLSEKLEQSEAQLGRGSFMLGLETHDRKSEDKLAKATRDSCKTTIEAIHGLMSQVIKDKLFNQINIS

SEQ ID NO: 12608 - protein, 460 aa, Homo sapiens
MAGYLSESDFVMVEEGFSTRDLLKELTLGASQATTDEVAAFFVADLGAIVRKHFCFLKCLPRVRPFYAVKCNSSPGVLKVLAQLGLGFSCANKAEMELVQHIGIPASKIICANPCKQIAQIKYAAKHGIQLLSFDNEMELAKVVKSHPSAKMVLCIATDDSHSLSCLSLKFGVSLKSCRHLLENAKKHHVEVVGVSFHIGSGCPDPQAYAQSIADARLVFEMGTELGHKMHVLDLGGGFPGTEGAKVRFEEIASVINSALDLYFPEGCGVDIFAELGRYYVTSAFTVAVSIIAKKEVLLDQPGREEENGSTSKTIVYHLDEGVYGIFNSVLFDNICPTPILQKKPSTEQPLYSSSLWGPAVDGCDCVAEGLWLPQLHVGDWLVFDNMGAYTVGMGSPFWGTQACHITYAMSRVAWEALRRQLMAAEQEDDVEGVCKPLSCGWEITDTLCVGPVFTPASIM

SEQ ID NO: 12609 - protein, 480 aa, Homo sapiens
MAGYLSESDFVMVEEGFSTRDLLKELTLGASQATTDEVAAFFVADLGAIVRKHFCFLKCLPRVRPFYAVKCNSSPGVLKVLAQLGLGFSCANKAEMELVQHIGIPASKIICANPCKQIAQIKYAAKHGIQLLSFDNEMELAKVVKSHPSAKMVLCIATDDSHSLSCLSLKFGVSLKSCRHLLENAKKHHVEVVGVSFHIGSGCPDPQAYAQSIADARLVFEMGTELGHKMHVLDLGGGFPGTEGAKVRFEEIASVINSALDLYFPEGCGVDIFAELGRYYVTSAFTVAVSIIAKKEVLLDQPGREAPLPPPHIATCAASEPSPPAEENGSTSKTIVYHLDEGVYGIFNSVLFDNICPTPILQKKPSTEQPLYSSSLWGPAVDGCDCVAEGLWLPQLHVGDWLVFDNMGAYTVGMGSPFWGTQACHITYAMSRVAWEALRRQLMAAEQEDDVEGVCKPLSCGWEITDTLCVGPVFTPASIM

SEQ ID NO: 12610 - protein, 362 aa, Homo sapiens
MAGYLSESDFVMVEEGFSTRDLLKELTLGASQATTDEVAAFFVADLGAIVRKHFCFLKCLPRVRPFYAVKCNSSPGVLKVLAQLGLGFSCANKAEMELVQHIGIPASKIICANPCKQIAQIKYAAKHGIQLLSFDNEMELAKVVKSHPSAKMVLCIATDDSHSLSCLSLKFGVSLKSCRHLLENAKKHHVEVVGVSFHIGSGCPDPQAYAQSIADARLVFEMGTELGHKMHVLDLGGGFPGTEGAKVRFEEIASVINSALDLYFPEGCGVDIFAELGRYYVTSAFTVAVSIIAKKEVLLDQPGREEENGSTSKTIVYHLDEGVYGIFNSVLFDNICPTPILQKSKNHSPCYMSLESIHFIAV

SEQ ID NO: 12611 - protein, 374 aa, Homo sapiens
MAGYLSESDFVMVEEGFSTRDLLKELTLGASQATTDEVAAFFVADLGAIVRKHFCFLKCLPRVRPFYAVKCNSSPGVLKVLAQLGLGFSCANKAEMELVQHIGIPASKIICANPCKQIAQIKYAAKHGIQLLSFDNEMELAKVVKSHPSAKFVQQRGTACLIRMVLCIATDDSHSLSCLSLKFGVSLKSCRHLLENAKKHHVEVVGVSFHIGSGCPDPQAYAQSIADARLVFEMGTELGHKMHVLDLGGGFPGTEGAKVRFEEIASVINSALDLYFPEGCGVDIFAELGRYYVTSAFTVAVSIIAKKEVLLDQPGREEENGSTSKTIVYHLDEGVYGIFNSVLFDNICPTPILQKSKNHSPCYMSLESIHFIAV

SEQ ID NO: 12612 - protein, 204 aa, Homo sapiens
MAGYLSESDFVMVEEGFSTRDLLKELTLGASQATTDEVAAFFVADLGAIVRKHFCFLKCLPRVRPFYAVKCNSSPGVLKVLAQLGLGFSCANKIASVINSALDLYFPEGCGVDIFAELGRYYVTSAFTVAVSIIAKKEVLLDQPGREEENGSTSKTIVYHLDEGVYGIFNSVLFDNICPTPILQKSKNHSPCYMSLESIHFIAV

SEQ ID NO: 12613 - protein, 392 aa, Homo sapiens
MDALVEDDICILNHEKAHKRDTVTPVSIYSGDESVASHFALVTAYEDIKKRLKDSEKENSLLKKRIRFLEEKLIARFEEETSSVGREQVNKAYHAYREVCIDRDNLKSKLDKMNKDNSESLKVLNEQLQSKEVELLQLRTEVETQQVMRNLNPPSSNWEVEKLSCDLKIHGLEQELELMRKECSDLKIELQKAKQTDPYQEDNLKSRDLQKLSISSDNMQHAYWELKREMSNLHLVTQVQAELLRKLKTSTAIKKACAPVGCSEDLGRDSTKLHLMNFTATYTRHPPLLPNGKALCHTTSSPLPGDVKVLSEKAILQSWTDNERSIPNDGTCFQEHSSYGRNSLEDNSWVFPSPPKSSETAFGETKTKTLPLPNLPPLHYLDQHNQNCLYKN

SEQ ID NO: 12614 - protein, 228 aa, Homo sapiens
MDALVEDDICILNHEKAHKRDTVTPVSIYSGDESVASHFALVTAYEDIKKRLKDSEKENSLLKKRIRFLEEKLIARFEEETSSVGREQVNKAYHAYREVCIDRDNLKSKLDKMNKDNSESLKVLNEQLQSKEVELLQLRTEVETQQVMRNLNPPSSNWEVEKLSCDLKIHGLEQELELMRKECSDLKIELQKAKQTDPYQEDNLKSRDLQKLSISTQPGVQWRNHGIA

SEQ ID NO: 12615 - protein, 243 aa, Homo sapiens
MDALVEDDICILNHEKAHKRDTVTPVSIYSGDESVASHFALVTAYEDIKKRLKDSEKENSLLKKRIRFLEEKLIARFEEETSSVGREQVNKAYHAYREVCIDRDNLKSKLDKMNKDNSESLKVLNEQLQSKEVELLQLRTEVETQQVMRNLNPPSSNWEVEKLSCDLKIHGLEQELELMRKECSDLKIELQKAKQTDPYQEDNLKSRDLQKLSISRQSICSTAWSAVAQSWDSMNFEDCSLFA

SEQ ID NO: 12616 - protein, 232 aa, Homo sapiens
MDALVEDDICILNHEKAHKRDTVTPVSIYSGDESVASHFALVTAYEDIKKRLKDSEKENSLLKKRIRFLEEKLIARFEEETSSVGREQVNKAYHAYREVCIDRDNLKSKLDKMNKDNSESLKVLNEQLQSKEVELLQLRTEVETQQVMRNLNPPSSNWEVEKLSCDLKIHGLEQELELMRKECSDLKIELQKAKQTDPYQEDNLKSRDLQKLSISRVSVAQPGVQWRNHGIA

SEQ ID NO: 12617 - protein, 354 aa, Homo sapiens
MSRLLHAEEWAEVKELGDHHRQPQPHHLPQPPPPPQPPATLQAREHPVYPPELSLLDSTDPRAWLAPTLQGICTARAAQYLLHSPELGASEAAAPRDEVDGRGELVRRSSGGASSSKSPGPVKVREQLCKLKGGVVVDELGCSRQRAPSSKQVNGVQKQRRLAANARERRRMHGLNHAFDQLRNVIPSFNNDKKLSKYETLQMAQIYINALSELLQTPSGGEQPPPPPASCKSDHHHLRTAASYEGGAGNATAAGAQQASGGSQRPTPPGSCRTRFSAPASAGGYSVQLDALHFSTFEDSALTAMMAQKNLSPSLPGSILQPVQEENSKTSPRSHRSDGEFSPHSHYSDSDEAS

SEQ ID NO: 12618 - protein, 320 aa, Homo sapiens
MADEKTFRIGFIVLGLFLLALGTFLMSHDRPQVYGTFYAMGSVMVIGGIIWSMCQCYPKITFVPADSDFQGILSPKAMGLLENGLAAEMKSPSPQPPYVRLWEEAAYDQSLPDFSHIQMKVMSYSEDHRSLLAPEMGQPKLGTSDGGEGGPGDVQAWMEAAVVIHKGSDESEGERRLTQSWPGPLACPQGPAPLASFQDDLDMDSSEGSSPNASPHDREEACSPQQEPQGCRCPLDRFQDFALIDAPTLEDEPQEGQQWEIALPNNWQRYPRTKVEEKEASDTGGEEPEKEEEDLYYGLPDGAGDLLPDKELGFEPDTQG

SEQ ID NO: 12619 - protein, 175 aa, Homo sapiens
MTDCEFGYIYRLAQDYLQCVLQIPQPGSGPSKTSRVLQNVAFSVQKEVEKNLKSCLDNVNVVSVDTARTLFNQVMEKEFEDGIINWGRIVTIFAFEGILIKKLLRQQIAPDVDTYKEISYFVAEFIMNNTGEWIRQNGGWENGFVKKFEPKSGWMTFLEVTGKICEMLSLLKQYC

SEQ ID NO: 12620 - protein, 163 aa, Homo sapiens
MTDCEFGYIYRLAQDYLQCVLQIPQPGSGPSKTSRVLQNVAFSVQKEVEKNLKSCLDNVNVVSVDTARTLFNQVMEKEFEDGIINWGRIVTIFAFEGILIKKLLRQQIAPDVDTYKEISYFVAEFIMNNTGEWIRQNGGWGKWHNHTPMLVESVAHKKRKMAL

SEQ ID NO: 12621 - protein, 132 aa, Homo sapiens
MGSLMLLFVETTRNSSACIFPVILNELSSTVETITHFPEVTDGECVFPFHYKNGTYYDCIKSKARHKWCSLNKTYEGYWKFCSAEDFANCVFPFWYRRLIYWECTDDGEAFGKKWCSLTKNFNKDRIWKYCE

SEQ ID NO: 12622 - protein, 411 aa, Homo sapiens
MDAALLHSLLEANCSLALAEELLLDGWGPPLDPEGPYSYCNTTLDQIGTCWPRSAAGALVERPCPEYFNGVKYNTTRNAYRECLENGTWASKINYSQCEPILDDKQRKYDLHYRIALVVNYLGHCVSVAALVAAFLLFLALRSIRCLRNVIHWNLITTFILRNVMWFLLQLVDHEVHESNEVWCRCITTIFNYFVVTNFFWMFVEGCYLHTAIVMTYSTERLRKCLFLFIGWCIPFPIIVAWAIGKLYYENEQCWFGKEPGDLVDYIYQGPIILVLLINFVFLFNIVRILMTKLRASTTSETIQYRKAVKATLVLLPLLGITYMLFFVNPGEDDLSQIMFIYFNSFLQSFQGFFVSVFYCFFNGEVRSAVRKRWHRWQDHHSLRVPMARAMSIPTSPTRISFHSIKQTAAV

SEQ ID NO: 12623 - protein, 438 aa, Homo sapiens
MRGPSGPPGLLYVPHLLLCLLCLLPPPLQYAAGQSQMPKDQPLWALLEQYCHTIMTLTNLSGPYSYCNTTLDQIGTCWPRSAAGALVERPCPEYFNGVKYNTTRNAYRECLENGTWASKINYSQCEPILDDKQRKYDLHYRIALVVNYLGHCVSVAALVAAFLLFLALRSIRCLRNVIHWNLITTFILRNVMWFLLQLVDHEVHESNEVWCRCITTIFNYFVVTNFFWMFVEGCYLHTAIVMTYSTERLRKCLFLFIGWCIPFPIIVAWAIGKLYYENEQCWFGKEPGDLVDYIYQGPIILVLLINFVFLFNIVRILMTKLRASTTSETIQYRKAVKATLVLLPLLGITYMLFFVNPGEDDLSQIMFIYFNSFLQSFQGFFVSVFYCFFNGEVRSAVRKRWHRWQDHHSLRVPMARAMSIPTSPTRISFHSIKQTAAV

SEQ ID NO: 12624 - protein, 397 aa, Homo sapiens
MGREPWPEDRDLGFPQLFCQGPYSYCNTTLDQIGTCWPRSAAGALVERPCPEYFNGVKYNTTRNAYRECLENGTWASKINYSQCEPILDDKQRKYDLHYRIALVVNYLGHCVSVAALVAAFLLFLALRSIRCLRNVIHWNLITTFILRNVMWFLLQLVDHEVHESNEVWCRCITTIFNYFVVTNFFWMFVEGCYLHTAIVMTYSTERLRKCLFLFIGWCIPFPIIVAWAIGKLYYENEQCWFGKEPGDLVDYIYQGPIILVLLINFVFLFNIVRILMTKLRASTTSETIQYRKAVKATLVLLPLLGITYMLFFVNPGEDDLSQIMFIYFNSFLQSFQGFFVSVFYCFFNGEVRSAVRKRWHRWQDHHSLRVPMARAMSIPTSPTRISFHSIKQTAAV

SEQ ID NO: 12625 - protein, 387 aa, Homo sapiens
MDAALLHSLLEANCSLALAEELLLDGWGPPLDPEGPYSYCNTTLDQIGTCWPRSAAGALVERPCPEYFNGVKYNTTRNAYRECLENGTWASKINYSQCEPILDDKQRKYDLHYRIALVVNYLGHCVSVAALVAAFLLFLALRSIRCLRNVIHWNLITTFILRNVMWFLLQLVDHEVHESNEVWCRCITTIFNYFVVTNFFWMFVEGCYLHTAIVMTYSTERLRKCLFLFIGWCIPFPIIVAWAIGKLYYENEQCWFGKEPGDLVDYIYQGPIILVLLINFVFLFNIVRILMTKLRASTTSETIQYRKAVKATLVLLPLLGITYMLFFVNPGEDDLSQIMFIYFNSFLQSFQGFFVSVFYCFFNGESWVSKEAQAAGPHGREKPEQRW

SEQ ID NO: 12626 - protein, 370 aa, Homo sapiens
MDAALLHSLLEANCSLALAEELLLDGWGPPLDPEGPYSYCNTTLDQIGTCWPRSAAGALVERPCPEYFNGVKYNTTRNAYRECLENGTWASKINYSQCEPILDDKQRKYDLHYRIALVVNYLGHCVSVAALVAAFLLFLALRSIRCLRNVIHWNLITTFILRNVMWFLLQLVDHEVHESNEVWCRCITTIFNYFVVTNFFWMFVEGCYLHTAIVMTYSTERLRKCLFLFIGWCIPFPIIVAWAIGKLYYENEQCWFGKEPGDLVDYIYQGPIILVLLINFVFLFNIVRILMTKLRASTTSETIQYRKAVKATLVLLPLLGITYMLFFVNPGEDDLSQIMFIYFNSFLQSFQGFFVSVFYCFFNGEGLEPV

SEQ ID NO: 12627 - protein, 366 aa, Homo sapiens
MDAALLHSLLEANCSLALAEELLLDGWGPPLDPEGPYSYCNTTLDQIGTCWPRSAAGALVERPCPEYFNGVKYNTTRNAYRECLENGTWASKINYSQCEPILDDKQRKYDLHYRIALVVNYLGHCVSVAALVAAFLLFLALRSIRCLRNVIHWNLITTFILRNVMWFLLQLVDHEVHESNEVWCRCITTIFNYFVVTNFFWMFVEGCYLHTAIVMTYSTERLRKCLFLFIGWCIPFPIIVAWAIGKLYYENEQCWFGKEPGDLVDYIYQGPIILVLLINFVFLFNIVRILMTKLRASTTSETIQYRKAVKATLVLLPLLGITYMLFFVNPGEDDLSQIMFIYFNSFLQSFQGFFVSVFYCFFNGEV

SEQ ID NO: 12628 - protein, 410 aa, Homo sapiens
MDAALLHSLLEANCSLALAEELLLDGWGPPLDPEGPYSYCNTTLDQIGTCWPRSAAGALVERPCPEYFNGVKYNTTRNAYRECLENGTWASKINYSQCEPILDDKRKYDLHYRIALVVNYLGHCVSVAALVAAFLLFLALRSIRCLRNVIHWNLITTFILRNVMWFLLQLVDHEVHESNEVWCRCITTIFNYFVVTNFFWMFVEGCYLHTAIVMTYSTERLRKCLFLFIGWCIPFPIIVAWAIGKLYYENEQCWFGKEPGDLVDYIYQGPIILVLLINFVFLFNIVRILMTKLRASTTSETIQYRKAVKATLVLLPLLGITYMLFFVNPGEDDLSQIMFIYFNSFLQSFQGFFVSVFYCFFNGEVRSAVRKRWHRWQDHHSLRVPMARAMSIPTSPTRISFHSIKQTAAV

SEQ ID NO: 12629 - protein, 240 aa, Homo sapiens
MAALRRMLHLPSLMMGTCRPFAGSLADSCLADRCLWDRLHAQPRLGTVPTFDWFFGYDEVQGLLLPLLQEAQAASPLRVLDVGCGTSSLCTGLYTKSPHPVDVLGVDFSPVAVAHMNSLLEGGPGQTPLCPGHPASSLHFMHADAQNLGAVASSGSFQLLLDKGTWDAVARGGLPRAYQLLSECLRVLNPQGTLIQFSDEDPDVRLPCLEQGSYGWTVTVQELGPFRGITYFAYLIQGSH

SEQ ID NO: 12630 - protein, 654 aa, Homo sapiens
MLLKKHAGKGGGREPRSEDPTPAEQHCARTMPPCAVLAALLSVVAVVSCLYLGVKTNDLQARIAALESAKGAPSIHLLPDTLDHLKTMVQEKVERLLAQKSYEHMAKIRIAREAPSECNCPAGPPGKRGKRGRRGESGPPGQPGPQGPPGPKGDKGEQGDQGPRMVFPKINHGFLSADQQLIKRRLIKGDQGQAGPPGPPGPPGPRGPPGDTGKDGPRGMPGVPGEPGKPGEQGLMGPLGPPGQKGSIGAPGIPGMNGQKGEPGLPGAVGQNGIPGPKGEPGEQGEKGDAGENGPKGDTGEKGDPGSSAAGIKGEPGESGRPGQKGEPGLPGLPGLPGIKGEPGFIGPQGEPGLPGLPGTKGERGEAGPPGRGERGEPGAPGPKGKQGESGTRGPKGSKGDRGEKGDSGAQGPRGPPGQKGDQGATEIIDYNGNLHEALQRITTLTVTGPPGPPGPQGLQGPKGEQGSPGIPGMDGEQGLKGSKGDMGDPGMTGEKGGIGLPGLPGANGMKGEKGDSGMPGPQGPSIIGPPGPPGPHGPPGPMGPHGLPGPKGTDGPMGPHGPAGPKGERGEKGAMGEPGPRGPYGLPGKDGEPGLDGFPGPRGEKGDLGEKGEKGFRGVKGEKGEPGQPGLDGLDAPCQLGPDGLPMPGCWQK

SEQ ID NO: 12631 - protein, 642 aa, Homo sapiens
MLLKKHAGKGGGREPRSEDPTPAEQHCARTMPPCAVLAALLSVVAVVSCLYLGVKTNDLQARIAALESAKGAPSIHLLPDTLDHLKTMVQEKVERLLAQKSYEHMAKIRIAREAPSECNCPAGPPGKRGKRGRRGESGPPGQPGPQGPPGPKGDKGEQGDQGPRMVFPKINHGFLSADQQLIKRRLIKGDQGQAGPPGPPGPPGPRGPPGDTGKDGPRGMPGVPGEPGKPGEQGLMGPLGPPGQKGSIGAPGIPGMNGQKGEPGLPGAVGQNGIPGPKGEPGEQGEKGDAGENGPKGDTGEKGDPGSSAAGIKGEPGESGRPGQKGEPGLPGLPGLPGIKGEPGFIGPQGEPGLPGLPGTKGERGEAGPPGRGERGEPGAPGPKGKQGESGTRGPKGSKGDRGEKGDSGAQGPRGPPGQKGDQGATEIIDYNGNLHEALQRITTLTVTGPPGPPGPQGLQGPKGEQGSPGIPGMDGEQGLKGSKGDMGDPGMTGEKGGIGLPGLPGANGMKGEKGDSGMPGPQGPSIIGPPGPPGPHGPPGPMGPHGLPGPKGTDGPMGPHGPAGPKGERGEKGAMGEPGPRGPYGLPGKDGEPGLDGFPGPRGEKGDLGEKGEKVTSPSQHVPCLILLLLSALLFSLCDSI

SEQ ID NO: 12632 - protein, 581 aa, Homo sapiens
MLLKKHAGKGGGREPRSEDPTPAEQHCARTMPPCAVLAALLSVVAVVSCLYLGVKTNDLQARIAALESAKGAPSIHLLPDTLDHLKTMVQEKVERLLAQKSYEHMAKIRIAREAPSECNCPAGPPGKRGKRGRRGESGPPGPPGPKGDKGEQGDQGPRMVFPKINHGFLSADQQLIKRRLIKGDQGQAGPPGPPGPPGPRGPPGDTGKDGPRGMPGVPGEPGKPGEQGLMGPLGPPGQKGSIGAPGIPGMNGQKGEPGLPGAVGQNGIPGPKGEPGEQGEKGDAGENGPKGDTGEKGDPGSSAAGIKGEPGESGRPGQKGEPGFIGPQGEPGLPGLPGTKGERGEAGPPGRGERGEPGAPGPKGKQGESGTRGPKGSKGDRGEKGDSGAQGPRGPPGQKGDQGATEIIDYNGNLHEALQRITTLTVTGPPGPPGPQGLQGPKGEQGSPGIPGMDGEQGLKGSKGDMGDPGMTGEKGGIGLPGLPGANGMKGEKGDSGMPGPQGPSIIGPPGPPGPHGPPGPMGPHGLPGPKGTDGPMGPHGPAGPKGERGEKGAMGEPGPRGPYGLPLGPDGLPMPGCWQK

SEQ ID NO: 12633 - protein, 1141 aa, Homo sapiens
MSFSLTFTELANIAIPQCGVLNFKALHLLLHGILEHIHMAELKKVLSGDEDFLQTSQVVIMPREGDAQPILNPMKRLSNVFDHVVSRLDKLENQLALLQDLPSTAQLLEASQGTARPVQDLWHLIKLRKMVEGHDEVMAKSMQTLQDLLTDLHALQVTITALRKEVDMLKNMLDKVHPERMDIFAEDFKIQNWKMVALQREVASLQNKFKTIPKTEDMVLWSGLHDAMFTSEIGSSPLDLWQSVEQLPEAALAQTTKYLEATRAIQVSEPVQNPQLLQTVWHYEVPELLPEGSSAQAVSLSRAQEPAQPPALTPESAPGCTTEFAPGPAPGTEPVPGLELGLELEPVPALGPVPGPSVTPGSLPAPWPVLGPVPAPGAQPPPLGDWPALPRRWPLPQGWPRVGSWPLWDLGVLRPTQPQPSRAPPPATEFGSLWPRPLQPYQSRQGEALQLAAVQVKGEENDVPSLRGLRERARKDGAPKDRTRKDGVPKDRGGKDVDPKDRAHKDDVPKDRGGKDVDPKDRAHKDDVPKDRGGKDGDPKDRVGKDGAPKEAQPKAPQSALHRLKTTAAIAAAAAAAYAAATSSAAQAAKVAAKFVKDAPATKMAAIATDTAAAGPLGVFADVLGAGPSRGATESQILGDDSEIYEILSPSYSAASIGPDPALSQAMVATKQAMSPEDKKRAVKYSMSHIAQIPVKHDSLKEEFAQLSCNLNQRLSYLANMGGPSSLGTTVDILQKKIGSLQKSRLKEEELERIWGNQIEMMKDRYITLDKAVENLQIRMDEFKTLQAQIKRLEMNKVNKSTMEEELREKADRSALAGKASRVDLETVALELNEMIQGILFKVTIHEDSWKKAMEELSKDVNTKLVHSDLDPLKKEMEEVWKIVRKLLIEGLRLDPDSAAGFRRKLFKRVKCISCDRPVEMMTGPQLITIRKAHLLSRLRPASANSCEYLQRQQMREQQWLQLQDLGIQEDCQQDWGDGPQNATSLKCKSCNLLTLYPYGDPHVIDYDSAEVDILGVDGILYKGRVNSQRGAQPLAVAKELAAVKAPSPPSQSLYDRVHSSALFGAICPPLCPRSSACSAASGPHLTMPARPPSLPPLLLLPPLIPSLRDPQQAPGSTRLSRAPHIESRVGRKPPEEPANP

SEQ ID NO: 12634 - protein, 318 aa, Homo sapiens
MAAAAVSGALGRAGWRLLQLRCLPVARCRQALVPRAFHASAVGLRSSDEQKQQPPNSFSQQHSETQGAEKPDPESSHSPPRYTDQGGEEEEDYESEEQLQHRILTAALEFVPAHGWTAEAIAEGAQSLGLSSAAASMFGKDGSELILHFVTQCNTRLTRVLEEEQKLVQLGQAEKRKTDQFLRDAVETRLRMLIPYIEHWPRALSILMLPHNIPSSLSLLTSMVDDMWHYAGDQSTDFNWYTRRAMLAAIYNTTELVMMQDSSPDFEDTWRFLENRVNDAMNMGHTAKQVKSTGEALVQGLMGAAVTLKNLTGLNQRR

SEQ ID NO: 12635 - protein, 135 aa, Homo sapiens
MAAAAVSGALGRAGWRLLQLRCLPVARCRQALVPRAFHASAVGLRSSDEQKQQPPNSFSQQHSETQGAEKPDPESSHSPPRYTDQGGEEEEDYESEEQLQHRILTAALEFVPAHGWTAEAIAEGAQVCIGEGGAT

SEQ ID NO: 12636 - protein, 175 aa, Homo sapiens
MGKITFYEDRAFQGRSYECTTDCPNLQPYFSRCNSIRVESGCWMIYERPNYQGHQYFLRRGEYPDYQQWMGLSDSIRSCCLIPPHSGAYRMKIYDRDELRGQMSELTDDCISVQDRFHLTEIHSLNVLEGSWILYEMPNYRGRQYLLRPGEYRRFLDWGAPNAKVGSLRRVMDLY

SEQ ID NO: 12637 - protein, 611 aa, Homo sapiens
MSEIPSTIVSKNMTNDKNSLESMNISSSSSTEENPKKQARKNEEHGPDPSANPFHLSGDVDFFLLRDQERNKALSERQQQKTMRVHQKMTYSSKVSAKHTSLRRQLQLEDKQEDLEARAEAEHQRAFRDYTTWKLTLTKEKNVEPENMSGYIKQKRQMFLLQYALDVKRREIQRLETLATKEEARLERAEKSLEKDAALFDEFVRENDCSSVQAMRAAEKETKAKIEKILEIRDLTTQIVNIKSEISRFEDTLKHYKVYKDFLYKLSPKEWLEEQEKKHSFLKKAKEVSEASKESSVNSTPGDKGPGIKGKASSMWAKEGQGTKKPWRFLQTMRLGRSPSYLSSPQQGSQPSESSGGDSRGSNSPIPPTQEDTDSDGEEPQLYFTEPQQLLDVFRELEEQNLSLIQNSQETEKTLEELSHTLKHTQIRMDREVNQLKQWVTTMMMSITKEEDTAAELELKARVFHFGEYKGDQQDKLLESLNCKVLDVYRHCTGTQQEANLGTVQMLTIIEHQLDELLENLEHVPQVKIEQAERAKEKERRIRLREEKLQMQKILQEEHLQRARARAQAEIKKKRGRTLVCRSRPPAHRIKQQSEHTLMDKEEEELLFFFT

SEQ ID NO: 12638 - protein, 612 aa, Homo sapiens
MSEIPSTIVSKNMTNDKNSLESMNISSSSSTEENPKKQARKNEEHGPDPSANPFHLSGDVDFFLLRDQERNKALSERQQQKTMRVHQKMTYSSKVSAKHTSLRRQLQLEDKQEDLEARAEAEHQRAFRDYTTWKLTLTKAEKNVEPENMSGYIKQKRQMFLLQYALDVKRREIQRLETLATKEEARLERAEKSLEKDAALFDEFVRENDCSSVQAMRAAEKETKAKIEKILEIRDLTTQIVNIKSEISRFEDTLKHYKVYKDFLYKLSPKEWLEEQEKKHSFLKKAKEVSEASKESSVNSTPGDKGPGIKGKASSMWAKEGQGTKKPWRFLQTMRLGRSPSYLSSPQQGSQPSESSGGDSRGSNSPIPPTQEDTDSDGEEPQLYFTEPQQLLDVFRELEEQNLSLIQNSQETEKTLEELSHTLKHTQIRMDREVNQLKQWVTTMMMSITKEEDTAAELELKARVFHFGEYKGDQQDKLLESLNCKVLDVYRHCTGTQQEANLGTVQMLTIIEHQLDELLENLEHVPQVKIEQAERAKEKERRIRLREEKLQMQKILQEEHLQRARARAQAEIKKKRGRTLVCRSRPPAHRIKQQSEHTLMDKEEEELLFFFT

SEQ ID NO: 12639 - protein, 187 aa, Homo sapiens
MSGGGTETPVGCEAAPGGGSKKRDSLGTAGSAHLIIKDLGEIHSRLLDHRPVIQGETRYFVKEFEEKRGLREMRVLENLKNMIHETNEHTLPKCRDTMRDSLSQVLQRLQAANDSVCRLQQREQERKKIHSDHLVASEKQHMLQWDNFMKEQPNKRAEVDEEHRKAMERLKEQYAEMEKDLAKFSTF

SEQ ID NO: 12640 - protein, 110 aa, Homo sapiens
MSGGGTETPVGCEAAPGGGSKKRDSLGTAGSAHLIIKDLGEIHSRLLDHRPVIQGETRYFVKEFEEKRGLREMRVLENLKNMIHETNEHTLPKCRDTMRDSLSQVLQRYS

SEQ ID NO: 12641 - protein, 123 aa, Homo sapiens
MEKRGLREMRVLENLKNMIHETNEHTLPKCRDTMRDSLSQVLQRLQAANDSVCRLQQREQERKKIHSDHLVASEKQHMLQWDNFMKEQPNKRAEVDEEHRKAMERLKEQYAEMEKDLAKFSTF

SEQ ID NO: 12642 - protein, 441 aa, Homo sapiens
MKLALLLPWACCCLCGSALATGFLYPFSAAALQQHGYPEPGAGSPGSGYASRRHWCHHTVTRTVSCQVQNGSETVVQRVYQSCRWPGPCANLVSYRTLIRPTYRVSYRTVTVLEWRCCPGFTGSNCDEECMNCTRLSDMSERLTTLEAKVLLLEAAERPSSPDNDLPAPESTPPTWNEDFLPDAIPLAHPVPRQRRPTGPAGPPGQTGPPGPAGPPGSKGDRGQTGEKGPAGPPGLLGPPGPRGLPGEMGRPGPPGPPGPAGNPGPSPNSPQGALYSLQPPTDKDNGDSRLASAIVDTVLAGVPGPRGPPGPPGPPGPRGPPGPPGTPGSQGLAGERGTVGPSGEPGVKGEEGEKAATAEGEGVQQLREALKILAERVLILEHMIGIHDPLASPEGGSGQDAALRANLKMKRGGAQPDGVLAALLGPDPGQKSVDQASSRK

SEQ ID NO: 12643 - protein, 439 aa, Homo sapiens
MKLALLLPWACCCLCGSALATGFLYPFSAAALQQHGYPEPGAGSPGSGYASRRHWCHHTVTRTVSCQVQNGSETVVQRVYQSCRWPGPCANLVRTLIRPTYRVSYRTVTVLEWRCCPGFTGSNCDEECMNCTRLSDMSERLTTLEAKVLLLEAAERPSSPDNDLPAPESTPPTWNEDFLPDAIPLAHPVPRQRRPTGPAGPPGQTGPPGPAGPPGSKGDRGQTGEKGPAGPPGLLGPPGPRGLPGEMGRPGPPGPPGPAGNPGPSPNSPQGALYSLQPPTDKDNGDSRLASAIVDTVLAGVPGPRGPPGPPGPPGPRGPPGPPGTPGSQGLAGERGTVGPSGEPGVKGEEGEKAATAEGEGVQQLREALKILAERVLILEHMIGIHDPLASPEGGSGQDAALRANLKMKRGGAQPDGVLAALLGPDPGQKSVDQASSRK

SEQ ID NO: 12644 - protein, 519 aa, Homo sapiens
MMSEHDLADVVQIAVEDLSPDHPVVLENHVVTDEDEPALKRQRLEINCQDPSIKTICLRLDSIEAKLQALEATCKSLEEKLDLVTNKQHSPIQVPMVAGSPLGATQTCNKVRCVVPQTTVILNNDRQNAIVAKMEDPLSNRAPDSLENVISNAVPGRRQNTIVVKVPGQEDSHHEDGESGSEASDSVSSCGQAGSQSIGSNVTLITLNSEEDYPNGTWLGDENNPEMRVRCAIIPSDMLHISTNCRTAEKMALTLLDYLFHREVQAVSNLSGQGKHGKKQLDPLTIYGIRCHLFYKFGITESDWYRIKQSIDSKCRTAWRRKQRGQSLAVKSFSRRTPNSSSYCPSEPMMSTPPPASELPQPQPQPQALHYALANAQQVQIHQIGEDGQVQVGHLHIAQVPQGEQVQITQDSEGNLQIHHVGQDGQLLEATRIPCLLAPSVFKASSGQVLQGAQLIAVASSDPAAAGVDGSPLQGSDIQVQYVQLAPVSDHTAGAQTAEALQPTLQPEMQLEHGAIQIQ

SEQ ID NO: 12645 - protein, 469 aa, Homo sapiens
MMSEHDLADVVQIAVEDLSPDHPVVLENHVVTDEDEPALKRQRLEINCQDPSIKSFLYSINQTICLRLDSIEAKLQALEATCKSLEEKLDLVTNKQHSPIQVPMVAGSPLGATQTCNKVRCAVPGRRQNTIVVKVPGQEDSHHEDGESGSEASDSVSSCGQAGSQSIGSNVTLITLNSEEDYPNGTWLGDENNPEMRVRCAIIPSDMLHISTNCRTAEKMALTLLDYLFHREVQAVSNLSGQGKHGKKQLDPLTIYGIRCHLFYKFGITESDWYRIKQSIDSKCRTAWRRKQRGQSLAVKSFSRRTPNSSSYCPSEPMMSTPPPASELPQPQPQPQALHYALANAQQVQIHQIGEDGQVQVIPQGHLHIAQVPQGEQVQITQDSEGNLQIHHVGQDGQVLQGAQLIAVASSDPAAAGVDGSPLQGSDIQVQYVQLAPVSDHTAGAQTAEALQPTLQPEMQLEHGAIQIQ

SEQ ID NO: 12646 - protein, 442 aa, Homo sapiens
MTREFVKRSIFLPALKRQRLEINCQDPSIKSFLYSINQTICLRLDSIEAKLQALEATCKSLEEKLDLVTNKQHSPIQVPMVAGSPLGATQTCNKVRCAVPGRRQNTIVVKVPGQEDSHHEDGESGSEASDSVSSCGQAGSQSIGSNVTLITLNSEEDYPNGTWLGDENNPEMRVRCAIIPSDMLHISTNCRTAEKMALTLLDYLFHREVQAVSNLSGQGKHGKKQLDPLTIYGIRCHLFYKFGITESDWYRIKQSIDSKCRTAWRRKQRGQSLAVKSFSRRTPNSSSYCPSEPMMSTPPPASELPQPQPQPQALHYALANAQQVQIHQIGEDGQVQVGHLHIAQVPQGEQVQITQDSEGNLQIHHVGQDGQVLQGAQLIAVASSDPAAAGVDGSPLQGSDIQVQYVQLAPVSDHTAGAQTAEALQPTLQPEMQLEHGAIQIQ

SEQ ID NO: 12647 - protein, 491 aa, Homo sapiens
MMSEHDLADVVQIAVEDLSPDHPVVLENHVVTDEDEPALKRQRLEINCQDPSIKSFLYSINQTICLRLDSIEAKLQALEATCKSLEEKLDLVTNKQHSPIQVPMVAGSPLGATQTCNKVRCAVPGRRQNTIVVKVPGQEDSHHEDGESGSEASDSVSSCGQAGSQSIGSNVTLITLNSEEDYPNGTWLGDENNPEMRVRCAIIPSDMLHISTNCRTAEKMALTLLDYLFHREVQAVSNLSGQGKHGKKQLDPLTIYGIRCHLFYKFGITESDWYRIKQSIDSKCRTAWRRKQRGQSLAVKSFSRRTPNSSSYCPSEPMMSTPPPASELPQPQPQPQALHYALANAQQVQIHQIGEDGQVQVIPQGHLHIAQVPQGEQVQITQDSEGNLQIHHVGQDGQLLEATRIPCLLAPSVFKASSGQVLQGAQLIAVASSDPAAAGVDGSPLQGSDIQVQYVQLAPVSDHTAGAQTAEALQPTLQPEMQLEHGAIQIQ

SEQ ID NO: 12648 - protein, 497 aa, Homo sapiens
MMSEHDLADVVQIAVEDLSPDHPGTELWDIVLENHVVTDEDEPALKRQRLEINCQDPSIKSFLYSINQTICLRLDSIEAKLQALEATCKSLEEKLDLVTNKQHSPIQVPMVAGSPLGATQTCNKVRCAVPGRRQNTIVVKVPGQEDSHHEDGESGSEASDSVSSCGQAGSQSIGSNVTLITLNSEEDYPNGTWLGDENNPEMRVRCAIIPSDMLHISTNCRTAEKMALTLLDYLFHREVQAVSNLSGQGKHGKKQLDPLTIYGIRCHLFYKFGITESDWYRIKQSIDSKCRTAWRRKQRGQSLAVKSFSRRTPNSSSYCPSEPMMSTPPPASELPQPQPQPQALHYALANAQQVQIHQIGEDGQVQVIPQGHLHIAQVPQGEQVQITQDSEGNLQIHHVGQDGQLLEATRIPCLLAPSVFKASSGQVLQGAQLIAVASSDPAAAGVDGSPLQGSDIQVQYVQLAPVSDHTAGAQTAEALQPTLQPEMQLEHGAIQIQ

SEQ ID NO: 12649 - protein, 466 aa, Homo sapiens
MMSEHDLADVVQIAVEDLSPDHPVVLENHVVTDEDEPALKRQRLEINCQDPSIKSFLYSINQTICLRLDSIEAKLQALEATCKSLEEKLDLVTNKQHSPIQVPMVAGSPLGATQTCNKVRCAVPGRRQNTIVVKVPGQEDSHHEDGESGSEASDSVSSCGQAGSQSIGSNVTLITLNSEEDYPNGTWLGDENNPEMRVRCAIIPSDMLHISTNCRTAEKMALTLLDYLFHREVQAVSNLSGQGKHGKKQLDPLTIYGIRCHLFYKFGITESDWYRIKQSIDSKCRTAWRRKQRGQSLAVKSFSRRTPNSSSYCPSEPMMSTPPPASELPQPQPQPQALHYALANAQQVQIHQIGEDGQVQVGHLHIAQVPQGEQVQITQDSEGNLQIHHVGQDGQVLQGAQLIAVASSDPAAAGVDGSPLQGSDIQVQYVQLAPVSDHTAGAQTAEALQPTLQPEMQLEHGAIQIQ

SEQ ID NO: 12650 - protein, 508 aa, Homo sapiens
MMSEHDLADVVQIAVEDLSPDHPVVLENHVVTDEDEPALKRQRLEINCQDPSIKSFLYSINQTICLRLDSIEAKLQALEATCKSLEEKLDLVTNKQHSPIQVPMVAGSPLGATQTCNKVRCVVPQTTVILNNDRQNAIVAKMEDPLSNRAPDSLENVISNAVPGRRQNTIVVKVPGQEDSHHEDGESGSEASDSVSSCGQAGSQSIGSNVTLITLNSEEDYPNGTWLGDENNPEMRVRCAIIPSDMLHISTNCRTAEKMALTLLDYLFHREVQAVSNLSGQGKHGKKQLDPLTIYGIRCHLFYKFGITESDWYRIKQSIDSKCRTAWRRKQRGQSLAVKSFSRRTPNSSSYCPSEPMMSTPPPASELPQPQPQPQALHYALANAQQVQIHQIGEDGQVQVIPQGHLHIAQVPQGEQVQITQDSEGNLQIHHVGQDGQVLQGAQLIAVASSDPAAAGVDGSPLQGSDIQVQYVQLAPVSDHTAGAQTAEALQPTLQPEMQLEHGAIQIQ

SEQ ID NO: 12651 - protein, 77 aa, Homo sapiens
MPKCPKCNKEVYFAERVTSLGKDWHRPCLKCEKCGKTLTSGGHAEHEGKPYCNHPCYAAMFGPKGFGRGGAESHTFK

SEQ ID NO: 12652 - protein, 145 aa, Homo sapiens
MLGWIQPSRQPQLRAAPPTRTPSAKRCILCNFLPGCWLVGDVAGSRQPSAPQTLRQRQHTRPPPQERGSGRRSPLREARRANPHFKSFPVLEARGLPCGARRTGPRRPVREMTLPSDPERATLPNPRLGAPAVPRRGPRSHGGRR

SEQ ID NO: 12653 - protein, 607 aa, Homo sapiens
MELVRRLMPLTLLILSCLAELTMAEAEGNASCTVSLGGANMAETHKAMILQLNPSENCTWTIERPENKSIRIIFSYVQLDPDGSCESENIKVFDGTSSNGPLLGQVCSKNDYVPVFESSSSTLTFQIVTDSARIQRTVFVFYYFFSPNISIPNCGGYLDTLEGSFTSPNYPKPHPELAYCVWHIQVEKDYKIKLNFKEIFLEIDKQCKFDFLAIYDGPSTNSGLIGQVCGRVTPTFESSSNSLTVVLSTDYANSYRGFSASYTSIYAENINTTSLTCSSDRMRVIISKSYLEAFNSNGNNLQLKDPTCRPKLSNVVEFSVPLNGCGTIRKVEDQSITYTNIITFSASSTSEVITRQKQLQIIVKCEMGHNSTVEIIYITEDDVIQSQNALGKYNTSMALFESNSFEKTILESPYYVDLNQTLFVQVSLHTSDPNLVVFLDTCRASPTSDFASPTYDLIKSGCSRDETCKVYPLFGHYGRFQFNAFKFLRSMSSVYLQCKVLICDSSDHQSRCNQGCVSRSKRDISSYKWKTDSIIGPIRLKRDRSASGNSGFQHETHAEETPNQPFNSVHLFSFMVLALNVVTVATITVRHFVNQRADYKYQKLQNY

SEQ ID NO: 12654 - protein, 326 aa, Homo sapiens
MRVIISKSYLEAFNSNGNNLQLKDPTCRPKLSNVVEFSVPLNGCGTIRKVEDQSITYTNIITFSASSTSEVITRQKQLQIIVKCEMGHNSTVEIIYITEDDVIQSQNALGKYNTSMALFESNSFEKTILESPYYVDLNQTLFVQVSLHTSDPNLVVFLDTCRASPTSDFASPTYDLIKSGCSRDETCKVYPLFGHYGRFQFNAFKFLRSMSSVYLQCKVLICDSSDHQSRCNQGCVSRSKRDISSYKWKTDSIIGPIRLKRDRSASGNSGFQHETHAEETPNQPFNSVHLFSFMVLALNVVTVATITVRHFVNQRADYKYQKLQNY

SEQ ID NO: 12655 - protein, 241 aa, Homo sapiens
MGHNSTVEIIYITEDDVIQSQNALGKYNTSMALFESNSFEKTILESPYYVDLNQTLFVQVSLHTSDPNLVVFLDTCRASPTSDFASPTYDLIKSGCSRDETCKVYPLFGHYGRFQFNAFKFLRSMSSVYLQCKVLICDSSDHQSRCNQGCVSRSKRDISSYKWKTDSIIGPIRLKRDRSASGNSGFQHETHAEETPNQPFNSVHLFSFMVLALNVVTVATITVRHFVNQRADYKYQKLQNY

SEQ ID NO: 12656 - protein, 445 aa, Homo sapiens
MALVDKHKVKRQRLDRICEGIRPQIMNGPLHPRPLVALLDGRDCTVEMPILKDLATVAFCDAQSTQEIHEKVLNEAVGAMMYHTITLTREDLEKFKALRVIVRIGSGYDNVDIKAAGELGIAVCNIPSAAVEETADSTICHILNLYRRNTWLYQALREGTRVQSVEQIREVASGAARIRGETLGLIGFGRTGQAVAVRAKAFGFSVIFYDPYLQDGIERSLGVQRVYTLQDLLYQSDCVSLHCNLNEHNHHLINDFTIKQMRQGAFLVNAARGGLVDEKALAQALKEGRIRGAALDVHESEPFSFAQGPLKDAPNLICTPHTAWYSEQASLEMREAAATEIRRAITGRIPESLRNCVNKEFFVTSAPWSVIDQQAIHPELNGATYRYPPGIVGVAPGGLPAAMEGIIPGGIPVTHNLPTVAHPSQAPSPNQPTKHGDNREHPNEQ

SEQ ID NO: 12657 - protein, 985 aa, Homo sapiens
MPVPSRHINIGRSQSWDAAGWYEGPWENAESLRPLGRRSSLTYGTAEGTWFEPNHRPQDAALPVAAEPYLYREAVYNSVAARKGSTPDFTFYDSRQAVMSGRSPLLPREYYSDPSGAARVPKEPPLYRDPGVSRPVPSYGVLGSRTSWDPMQGRSPALQDAGHLYRDPGGKMIPQGRQTQSRAASPGRYGREQPDTRYGAEVPAYPLSQVFSDISERPIDPAPARQVAPTCLVVDPSSAAAPEGSTGVAPGALNRGYGPARESIPSKMAYETYEADLSTFQGPGGKRTVLPEFLAFLRAEGLAEATLGALLQQGFDSPAVLATLEDADIKSVAPNLGQARVLSRLANSCRTEMQLRRQDRGGPLPRARSSSFSHRSELLHGDLASLGAAAPLQTASPRAGDPARRPSSAPSQHLLETAATYSAPGVGTHAPHFPSNSGYSSPTPCALTARLSPTYPLQAGVALTNPGPSNPLHPGPRTAYSTAYTVPMELLKRERNVAASPLPSPHGSPQVLRKPGAPLGPSTLPPASQSLHTPHSPYQKVARRTGAPIIVSTMLAPEPSIRPQIMNGPLHPRPLVALLDGRDCTVEMPILKDLATVAFCDAQSTQEIHEKVLNEAVGAMMYHTITLTREDLEKFKALRVIVRIGSGYDNVDIKAAGELGIAVCNIPSAAVEETADSTICHILNLYRRNTWLYQALREGTRVQSVEQIREVASGAARIRGETLGLIGFGRTGQAVAVRAKAFGFSVIFYDPYLQDGIERSLGVQRVYTLQDLLYQSDCVSLHCNLNEHNHHLINDFTIKQMRQGAFLVNAARGGLVDEKALAQALKEGRIRGAALDVHESEPFSFAQGPLKDAPNLICTPHTAWYSEQASLEMREAAATEIRRAITGRIPESLRNCVNKEFFVTSAPWSVIDQQAIHPELNGATYRYPPGIVGVAPGGLPAAMEGIIPGGIPVTHNLPTVAHPSQAPSPNQPTKHGDNREHPNEQ

SEQ ID NO: 12658 - protein, 513 aa, Homo sapiens
MRPGLPGPTGLCAQTSSRGQKSVLKQKESCGIWQLYHFLSRKQEPRWEPCVSGSSSGDGAVADLADELRGYPALCCTLPVHSYRSWAGIRPQIMNGPLHPRPLVALLDGRDCTVEMPILKDLATVAFCDAQSTQEIHEKVLNEAVGAMMYHTITLTREDLEKFKALRVIVRIGSGYDNVDIKAAGELGIAVCNIPSAAVEETADSTICHILNLYRRNTWLYQALREGTRVQSVEQIREVASGAARIRGETLGLIGFGRTGQAVAVRAKAFGFSVIFYDPYLQDGIERSLGVQRVYTLQDLLYQSDCVSLHCNLNEHNHHLINDFTIKQMRQGAFLVNAARGGLVDEKALAQALKEGRIRGAALDVHESEPFSFAQGPLKDAPNLICTPHTAWYSEQASLEMREAAATEIRRAITGRIPESLRNCVNKEFFVTSAPWSVIDQQAIHPELNGATYRYPPGIVGVAPGGLPAAMEGIIPGGIPVTHNLPTVAHPSQAPSPNQPTKHGDNREHPNEQ

SEQ ID NO: 12659 - protein, 1232 aa, Homo sapiens
MANGVIPPPGGASPLPQVRVPLEEPPLSPDVEEEDDDLGKTLAVSRFGDLISKPPAWDPEKPSRSYSERDFEFHRHTSHHTHHPLSARLPPPHKLRRLPPTSARHTRRKRKKEKTSAPPSEGTPPIQEEGGAGVDEEEEEEEEEEGESEAEPVEPPHSGTPQKAKFSIGSDEDDSPGLPGRAAVTKPLPSVGPHTDKSPQHSSSSPSPRARASRLAGEKSRPWSPSASYDLRERLCPGSALGNPGGPEQQVPTDEAEAQMLGSADLDDMKSHRLEDNPGVRRHLVKKPSRTQGGRGSPSGLAPILRRKKKKKKLDRRPHEVFVELNELMLDRSQEPHWRETARWIKFEEDVEEETERWGKPHVASLSFRSLLELRRTIAHGAALLDLEQTTLPGIAHLVVETMIVSDQIRPEDRASVLRTLLLKHSHPNDDKDSGFFPRNPSSSSMNSVLGNHHPTPSHGPDGAVPTMADDLGEPAPLWPHDPDAKEKPLHMPGGDGHRGKSLKLLEKIPEDAEATVVLVGCVPFLEQPAAAFVRLNEAVLLESVLEVPVPVRFLFVMLGPSHTSTDYHELGRSIATLMSDKLFHEAAYQADDRQDLLSAISEFLDGSIVIPPSEVEGRDLLRSVAAFQRELLRKRREREQTKVEMTTRGGYTAPGKELSLELGGSEATPEDDPLLRTGSVFGGLVRDVRRRYPHYPSDLRDALHSQCVAAVLFIYFAALSPAITFGGLLGEKTEGLMGVSELIVSTAVLGVLFSLLGAQPLLVVGFSGPLLVFEEAFFKFCRAQDLEYLTGRVWVGLWLVVFVLALVAAEGSFLVRYISPFTQEIFAFLISLIFIYETFYKLYKVFTEHPLLPFYPPEGALEGSLDAGLEPNGSALPPTEGPPSPRNQPNTALLSLILMLGTFFIAFFLRKFRNSRFLGGKARRIIGDFGIPISILVMVLVDYSITDTYTQKLTVPTGLSVTSPDKRSWFIPPLGSARPFPPWMMVAAAVPALLVLILIFMETQITALIVSQKARRLLKGSGFHLDLLLIGSLGGLCGLFGLPWLTAATVRSVTHVNALTVMRTAIAPGDKPQIQEVREQRVTGVLIASLVGLSIVMGAVLRRIPLAVLFGIFLYMGVTSLSGIQLSQRLLLILMPAKHHPEQPYVTKVKTWRMHLFTCIQLGCIALLWVVKSTAASLAFPFLLLLTVPLRHCLLPRLFQDRELQALDSEDAEPNFDEDGQDEYNELHMPV

SEQ ID NO: 12660 - protein, 936 aa, Homo sapiens
MPAGLAPILRRKKKKKKLDRRPHEVFVELNELMLDRSQEPHWRETARWIKFEEDVEEETERWGKPHVASLSFRSLLELRRTIAHGAALLDLEQTTLPGIAHLVVETMIVSDQIRPEDRASVLRTLLLKHSHPNDDKDSGFFPRNPSSSSMNSVLGNHHPTPSHGPDGAVPTMADDLGEPAPLWPHDPDAKEKPLHMPGGDGHRGKSLKLLEKIPEDAEATVVLVGCVPFLEQPAAAFVRLNEAVLLESVLEVPVPVRFLFVMLGPSHTSTDYHELGRSIATLMSDKLFHEAAYQADDRQDLLSAISEFLDGSIVIPPSEVEGRDLLRSVAAFQRELLRKRREREQTKVEMTTRGGYTAPGKELSLELGGSEATPEDDPLLRTGSVFGGLVRDVRRRYPHYPSDLRDALHSQCVAAVLFIYFAALSPAITFGGLLGEKTEGLMGVSELIVSTAVLGVLFSLLGAQPLLVVGFSGPLLVFEEAFFKFCRAQDLEYLTGRVWVGLWLVVFVLALVAAEGSFLVRYISPFTQEIFAFLISLIFIYETFYKLYKVFTEHPLLPFYPPEGALEGSLDAGLEPNGSALPPTEGPPSPRNQPNTALLSLILMLGTFFIAFFLRKFRNSRFLGGKARRIIGDFGIPISILVMVLVDYSITDTYTQKLTVPTGLSVTSPDKRSWFIPPLGSARPFPPWMMVAAAVPALLVLILIFMETQITALIVSQKARRLLKGSGFHLDLLLIGSLGGLCGLFGLPWLTAATVRSVTHVNALTVMRTAIAPGDKPQIQEVREQRVTGVLIASLVGLSIVMGAVLRRIPLAVLFGIFLYMGVTSLSGIQLSQRLLLILMPAKHHPEQPYVTKVKTWRMHLFTCIQLGCIALLWVVKSTAASLAFPFLLLLTVPLRHCLLPRLFQDRELQALDSEDAEPNFDEDGQDEYNELHMPV

SEQ ID NO: 12661 - protein, 1259 aa, Homo sapiens
MANGVIPPPGGASPLPQVRVPLEEPPLSPDVEEEDDDLGKTLAVSRFGDLISKPPAWDPEKPSRSYSERDFEFHRHTSHHTHHPLSARLPPPHKLRRLPPTSARHTRRKRKKEKTSAPPSEGTPPIQEEGGAGVDEEEEEEEEEEGESEAEPVEPPHSGTPQKAKFSIGSDEDDSPGLPGRAAVTKPLPSVGPHTDKSPQHSSRPCSELRDGDGTTDLALSSPRLLCCLPSSPSPRARASRLAGEKSRPWSPSASYDLRERLCPGSALGNPGGPEQQVPTDEAEAQMLGSADLDDMKSHRLEDNPGVRRHLVKKPSRTQGGRGSPSGLAPILRRKKKKKKLDRRPHEVFVELNELMLDRSQEPHWRETARWIKFEEDVEEETERWGKPHVASLSFRSLLELRRTIAHGAALLDLEQTTLPGIAHLVVETMIVSDQIRPEDRASVLRTLLLKHSHPNDDKDSGFFPRNPSSSSMNSVLGNHHPTPSHGPDGAVPTMADDLGEPAPLWPHDPDAKEKPLHMPGGDGHRGKSLKLLEKIPEDAEATVVLVGCVPFLEQPAAAFVRLNEAVLLESVLEVPVPVRFLFVMLGPSHTSTDYHELGRSIATLMSDKLFHEAAYQADDRQDLLSAISEFLDGSIVIPPSEVEGRDLLRSVAAFQRELLRKRREREQTKVEMTTRGGYTAPGKELSLELGGSEATPEDDPLLRTGSVFGGLVRDVRRRYPHYPSDLRDALHSQCVAAVLFIYFAALSPAITFGGLLGEKTEGLMGVSELIVSTAVLGVLFSLLGAQPLLVVGFSGPLLVFEEAFFKFCRAQDLEYLTGRVWVGLWLVVFVLALVAAEGSFLVRYISPFTQEIFAFLISLIFIYETFYKLYKVFTEHPLLPFYPPEGALEGSLDAGLEPNGSALPPTEGPPSPRNQPNTALLSLILMLGTFFIAFFLRKFRNSRFLGGKARRIIGDFGIPISILVMVLVDYSITDTYTQKLTVPTGLSVTSPDKRSWFIPPLGSARPFPPWMMVAAAVPALLVLILIFMETQITALIVSQKARRLLKGSGFHLDLLLIGSLGGLCGLFGLPWLTAATVRSVTHVNALTVMRTAIAPGDKPQIQEVREQRVTGVLIASLVGLSIVMGAVLRRIPLAVLFGIFLYMGVTSLSGIQLSQRLLLILMPAKHHPEQPYVTKVKTWRMHLFTCIQLGCIALLWVVKSTAASLAFPFLLLLTVPLRHCLLPRLFQDRELQALDSEDAEPNFDEDGQDEYNELHMPV

SEQ ID NO: 12662 - protein, 523 aa, Homo sapiens
MEPAAALHFSLPASLLLLLLLLLLSLCALVSAQFTVVGPANPILAMVGENTTLRCHLSPEKNAEDMEVRWFRSQFSPAVFVYKGGRERTEEQMEEYRGRITFVSKDINRGSVALVIHNVTAQENGIYRCYFQEGRSYDEAILRLVVAGLGSKPLIEIKAQEDGSIWLECISGGWYPEPLTVWRDPYGEVVPALKEVSIADADGLFMVTTAVIIRDKYVRNVSCSVNNTLLGQEKETVIFIPESFMPSASPWMVALAVILTASPWMVSMTVILAVFIIFMAVSICCIKKLQREKKILSGEKKVEQEEKEIAQQLQEELRWRRTFLHAADVVLDPDTAHPELFLSEDRRSVRRGPYRQRVPDNPERFDSQPCVLGWESFASGKHYWEVEVENVMVWTVGVCRHSVERKGEVLLIPQNGFWTLEMFGNQYRALSSPERILPLKESLCRVGVFLDYEAGDVSFYNMRDRSHIYTCPRSAFTVPVRPFFRLGSDDSPIFICPALTGASGVMVPEEGLKLHRVGTHQSL

SEQ ID NO: 12663 - protein, 336 aa, Homo sapiens
MEPAAALHFSLPASLLLLLLLLLLSLCALVSAQFTVVGPANPILAMVGENTTLRCHLSPEKNAEDMEVRWFRSQFSPAVFVYKGGRERTEEQMEEYRGRITFVSKDINRGSVALVIHNVTAQENGIYRCYFQEGRSYDEAILRLVVAGLGSKPLIEIKAQEDGSIWLECISGGWYPEPLTVWRDPYGEVVPALKEVSIADADGLFMVTTAVIIRDKYVRNVSCSVNNTLLGQEKETVIFIPESFMPSASPWMVALAVILTASPWMVSMTVILAVFIIFMAVSICCIKKLQREKKILSGEKKVEQEEKEIAQQLQEELRWRRTFLHADVNLTGLRNT

SEQ ID NO: 12664 - protein, 256 aa, Homo sapiens
MEPAAALHFSLPASLLLLLLLLLLSLCALVSAQFTVVGPANPILAMVGENTTLRCHLSPEKNAEDMEVRWFRSQFSPAVFVYKGGRERTEEQMEEYRGRITFVSKDINRGSVALVIHNVTAQENGIYRCYFQEGRSYDEAILRLVVAESFMPSASPWMVALAVILTASPWMVSMTVILAVFIIFMAVSICCIKKLQREKKILSGEKKVEQEEKEIAQQLQEELRWRRTFLHAGYELPGIRGPSWKRPLHGEPPSAF

SEQ ID NO: 12665 - protein, 407 aa, Homo sapiens
MEPAAALHFSLPASLLLLLLLLLLSLCALVSGLGSKPLIEIKAQEDGSIWLECISGGWYPEPLTVWRDPYGEVVPALKEVSIADADGLFMVTTAVIIRDKYVRNVSCSVNNTLLGQEKETVIFIPESFMPSASPWMVALAVILTASPWMVSMTVILAVFIIFMAVSICCIKKLQREKKILSGEKKVEQEEKEIAQQLQEELRWRRTFLHAADVVLDPDTAHPELFLSEDRRSVRRGPYRQRVPDNPERFDSQPCVLGWESFASGKHYWEVEVENVMVWTVGVCRHSVERKGEVLLIPQNGFWTLEMFGNQYRALSSPERILPLKESLCRVGVFLDYEAGDVSFYNMRDRSHIYTCPRSAFTVPVRPFFRLGSDDSPIFICPALTGASGVMVPEEGLKLHRVGTHQSL

SEQ ID NO: 12666 - protein, 313 aa, Homo sapiens
MEPAAALHFSLPASLLLLLLLLLLSLCALVSESFMPSASPWMVALAVILTASPWMVSMTVILAVFIIFMAVSICCIKKLQREKKILSGEKKVEQEEKEIAQQLQEELRWRRTFLHAADVVLDPDTAHPELFLSEDRRSVRRGPYRQRVPDNPERFDSQPCVLGWESFASGKHYWEVEVENVMVWTVGVCRHSVERKGEVLLIPQNGFWTLEMFGNQYRALSSPERILPLKESLCRVGVFLDYEAGDVSFYNMRDRSHIYTCPRSAFTVPVRPFFRLGSDDSPIFICPALTGASGVMVPEEGLKLHRVGTHQSL

SEQ ID NO: 12667 - protein, 251 aa, Homo sapiens
MGSKLTCCLGPSGGLNCDCCRPDVGPCHECEIPETVAATAPASTTAKPAKLDLKAKKAQLMQYLSLPKTPKMLKMSKGLDARSKRWLKIIWRRHGIWPLENIGPTEDVQASAHGGVEENMTSDIEIPEAKHDHRPTEDVQVSAHGGVEENITSDIEISEAKHDHHLVEDLSESLSVCLEDFMTSDLSESLSVSLEDFMTSGLSESLSVSLEDLMTPEMAKERYEDYLCWVKMARSRLNEPISSQVLGLLRL

SEQ ID NO: 12668 - protein, 1217 aa, Homo sapiens
MAAGRAQVPSSEQAWLEDAQVFIQKTLCPAVKEPNVQLTPLVIDCVKTVWLSQGRNQGSTLPLSYSFVSVQDLKTHQRLPCCSHLSWSSSAYQAWAQEAGPNGNPLPREQLLLLGTLTDLSADLEQECRNGSLYVRDNTGVLSCELIDLDLSWLGHLFLFPRWSYLPPARWNSSGEGHLELWDAPVPVFPLTISPGPVTPIPVLYPESASCLLRLRNKLRGVQRNLAGSLVRLSALVKSKQKAYFILSLGRSHPAVTHVSIIVQVPAQLVWHRALRPGTAYVLTELRVSKIRGQRQHVWMTSQSSRLLLLKPECVQELELELEGPLLEADPKPLPMPSNSEDKKDPESLVRYSRLLSYSGAVTGVLNEPAGLYELDGQLGLCLAYQQFRGLRRVMRPGVCLQLQDVHLLQSVGGGTRRPVLAPCLRGAVLLQSFSRQKPGAHSSRQAYGASLYEQLVWERQLGLPLYLWATKALEELACKLCPHVLRHHQFLQHSSPGSPSLGLQLLAPTLDLLAPPGSPVRNAHNEILEEPHHCPLQKYTRLQTPSSFPTLATLKEEGQRKAWASFDPKALLPLPEASYLPSCQLNRRLAWSWLCLLPSAFCPAQVLLGVLVASSHKGCLQLRDQSGSLPCLLLAKHSQPLSDPRLIGCLVRAERFQLIVERDVRSSFPSWKELSMPGFIQKQQARVYVQFFLADALILPVPRPCLHSATPSTPQTDPTGPEGPHLGQSRLFLLCHKEALMKRNFCVPPGASPEVPKPALSFYVLGSWLGGTQRKEGTGWGLPEPQGNDDNDQKVHLIFFGSSVRWFEFLHPGQVYRLIAPGPATPMLFEKDGSSCISRRPLELAGCASCLTVQDNWTLELESSQDIQDVLDANKSLPESSLTDLLSDNFTDSLVSFSAEILSRTLCEPLVASLWMKLGNTGAMRRCVKLTVALETAECEFPPHLDVYIEDPHLPPSLGLLPGARVHFSQLEKRVSRSHNVYCCFRSSTYVQVLSFPPETTISIPLPHIYLAELLQGGQSPFQATASCHIVSVFSLQLFWVCAYCTSICRQGKCTRLGSTCPTQTAISQAIIRLLVEDGTAEAVVTCRNHHVAAALGLCPREWASLLDFVQVPGRVVLQFAGPGAQLESSARVDEPMTMFLWTLCTSPSVLRPIVLSFELERKPSKIVPLEPPRLQRFQCGELPFLTHVNPRLRLSCLSIRESEYSSSLGILASSC

SEQ ID NO: 12669 - protein, 1031 aa, Homo sapiens
MAAGRAQVPSSEQAWLEDAQVFIQKTLCPAVKEPNVQLTPLVIDCVKTVWLSQGRNQGSTLPLSYSFVSVQDLKTHQRLPCCSHLSWSSSAYQAWAQEAGPNGNPLPREQLLLLGTLTDLSADLEQECRNGSLYVRDNTGVLSCELIDLDLSWLGHLFLFPRWSYLPPARWNSSGEGHLELWDAPVPVFPLTISPGPVTPIPVLYPESASCLLRLRSHPAVTHVSIIVQVPAQLVWHRALRPGTAYVLTELRVSKIRGQRQHVWMTSQSSRLLLLKPECVQELELELEGPLLEADPKPLPMPSNSEDKKDPESLVRYSRLLSYSGAVTGVLNEPAGLYELDGQLGLCLAYQQFRGLRRVMRPGVCLQLQDVHLLQSVGGGTRRPVLAPCLRGAVLLQSFSRQKPGAHSSRQAYGASLYEQLVWERQLGLPLYLWATKALEELACKLCPHVLRHHQFLQHSSPGSPSLGLQLLAPTLDLLAPPGSPVRNAHNEILEEPHHCPLQKYTRLQTPSSFPTLATLKEEGQRKAWASFDPKALLPLPEASYLPSCQLNRRLAWSWLCLLPSAFCPAQVLLGVLVASSHKGCLQLRDQSGSLPCLLLAKHSQPLSDPRLIGCLVRAERFQLIVERDVRSSFPSWKELSMPGFIQKQQARVYVQFFLADALILPVPRPCLHSATPSTPQTDPTGPEGPHLGQSRLFLLCHKEALMKRNFCVPPGASPEVPKPALSFYVLGSWLGGTQRKEGTGWGLPEPQGNDDNDQKVHLIFFGSSVRWFEFLHPGQVYRLIAPGPATPMLFEKDGSSCISRRPLELAGCASCLTVQDNWTLELESSQDIQDVLDANKSLPESSLTDLLSDNFTDSLVSFSAEILSRTLCEPLVASLWMKLGNTGAMRRCVKLTVALETAECEFPPHLDVYIEDPHLPPSLGLLPGARVHFSQLEKRVSRSHNVYCCFRSSTYVQVLSFPPETTISIPLPHIYLAELLQGGQSPFQATASCHIVSVFSLQLFWVCAYCTSICRQAPGGGWDCRSRGDL

SEQ ID NO: 12670 - protein, 527 aa, Homo sapiens
MESAAALHFSRPASLLLLLLSLCALVSAQFIVVGPTDPILATVGENTTLRCHLSPEKNAEDMEVRWFRSQFSPAVFVYKGGRERTEEQMEEYRGRTTFVSKDISRGSVALVIHNITAQENGTYRCYFQEGRSYDEAILHLVVAGLGSKPLISMRGHEDGGIRLECISRGWYPKPLTVWRDPYGGVAPALKEVSMPDADGLFMVTTAVIIRDKSVRNMSCSINNTLLGQKKESVIFIPESFMPSVSPCAVALPIIVVILMIPIAVCIYWINKLQKEKKILSGEKEFERETREIALKELEKERVQKEEELQVKEKLQEELRWRRTFLHAVDVVLDPDTAHPDLFLSEDRRSVRRCPFRHLGESVPDNPERFDSQPCVLGRESFASGKHYWEVEVENVIEWTVGVCRDSVERKGEVLLIPQNGFWTLEMHKGQYRAVSSPDRILPLKESLCRVGVFLDYEAGDVSFYNMRDRSHIYTCPRSAFSVPVRPFFRLGCEDSPIFICPALTGANGVTVPEEGLTLHRVGTHQSL

SEQ ID NO: 12671 - protein, 528 aa, Homo sapiens
MESAAALHFSRPASLLLLLLSLCALVSAQFIVVGPTDPILATVGENTTLRCHLSPEKNAEDMEVRWFRSQFSPAVFVYKGGRERTEEQMEEYRGRTTFVSKDISRGSVALVIHNITAQENGTYRCYFQEGRSYDEAILHLVVAGLGSKPLISMRGHEDGGIRLECISRGWYPKPLTVWRDPYGGVAPALKEVSMPDADGLFMVTTAVIIRDKSVRNMSCSINNTLLGQKKESVIFIPESFMPSVSPLAVCIYWINKLQKEKKILSGEKEFERETREIALKELEKERVQKEEELQVKEKLQEELRWRRTFLHAVDVVLDPDTAHPDLFLSEDRRSVRRCPFRHLGESVPDNPERFDSQPCVLGRESFASGKHYWEVEVENVIEWTVGVCRDSVERKGEVLLIPQNGFWTLEMHKGQYRAVSSPDRILPLKESLCRVGVFLDYEAGDVSFYNMRDRSHIYTCPRSAFSGPDTSQSGDPPEPIESIPWSHSHVDKPWSFQQPPHNTHLPAASFTPTTDLSPSFLLLTRLCF

SEQ ID NO: 12672 - protein, 375 aa, Homo sapiens
MRGHEDGGIRLECISRGWYPKPLTVWRDPYGGVAPALKEVSMPDADGLFMVTTAVIIRDKSVRNMSCSINNTLLGQKKESVIFIPESFMPSVSPCAVALPIIVVILMIPIAVCIYWINKLQKEKKILSGEKEFERETREIALKELEKERVQKEEELQVKEKLQEELRWRRTFLHAVDVVLDPDTAHPDLFLSEDRRSVRRCPFRHLGESVPDNPERFDSQPCVLGRESFASGKHYWEVEVENVIEWTVGVCRDSVERKGEVLLIPQNGFWTLEMHKGQYRAVSSPDRILPLKESLCRVGVFLDYEAGDVSFYNMRDRSHIYTCPRSAFSVPVRPFFRLGCEDSPIFICPALTGANGVTVPEEGLTLHRVGTHQSL

SEQ ID NO: 12673 - protein, 334 aa, Homo sapiens
MESAAALHFSRPASLLLLLLSLCALVSAQFIVVGPTDPILATVGENTTLRCHLSPEKNAEDMEVRWFRSQFSPAVFVYKGGRERTEEQMEEYRGRTTFVSKDISRGSVALVIHNITAQENGTYRCYFQEGRSYDEAILHLVVAGLGSKPLISMRGHEDGGIRLECISRGWYPKPLTVWRDPYGGVAPALKEVSMPDADGLFMVTTAVIIRDKSVRNMSCSINNTLLGQKKESVIFIPESFMPSVSPCAVALPIIVVILMIPIAVCIYWINKLQKEKKILSGEKEFERETREIALKELEKERVQKEEELQVKEKLQEELRWRRTFLHAELQFFSN

SEQ ID NO: 12674 - protein, 466 aa, Homo sapiens
MEVRWFRSQFSPAVFVYKGGRERTEEQMEEYRGRTTFVSKDISRGSVALVIHNITAQENGTYRCYFQEGRSYDEAILHLVVAGLGSKPLISMRGHEDGGIRLECISRGWYPKPLTVWRDPYGGVAPALKEVSMPDADGLFMVTTAVIIRDKSVRNMSCSINNTLLGQKKESVIFIPESFMPSVSPCAVALPIIVVILMIPIAVCIYWINKLQKEKKILSGEKEFERETREIALKELEKERVQKEEELQVKEKLQEELRWRRTFLHAVDVVLDPDTAHPDLFLSEDRRSVRRCPFRHLGESVPDNPERFDSQPCVLGRESFASGKHYWEVEVENVIEWTVGVCRDSVERKGEVLLIPQNGFWTLEMHKGQYRAVSSPDRILPLKESLCRVGVFLDYEAGDVSFYNMRDRSHIYTCPRSAFSVPVRPFFRLGCEDSPIFICPALTGANGVTVPEEGLTLHRVGTHQSL

SEQ ID NO: 12675 - protein, 330 aa, Homo sapiens
MESAAALHFSRPASLLLLLLSLCALVSAQFIVVGPTDPILATVGENTTLRCHLSPEKNAEDMEVRWFRSQFSPAVFVYKGGRERTEEQMEEYRGRTTFVSKDISRGSVALVIHNITAQENGTYRCYFQEGRSYDEAILHLVVAGLGSKPLISMRGHEDGGIRLECISRGWYPKPLTVWRDPYGGVAPALKEVSMPDADGLFMVTTAVIIRDKSVRNMSCSINNTLLGQKKESVIFIPESFMPSVSPCAVALPIIVVILMIPIAVCIYWINKLQKEKKILSGEKEFERETREIALKELEKERVQKEEELQVKEKLQEELRWRRTFLHAGPV

SEQ ID NO: 12676 - protein, 663 aa, Homo sapiens
MAATEISVLSEQFTKIKELELMPEKGLKEEEKDGVCREKDHRSPSELEAERTSGAFQDSVLEEEVELVLAPSEESEKYILTLQTVHFTSEAVELQDMSLLSIQQQEGVQVVVQQPGPGLLWLEEGPRQSLQQCVAISIQQELYSPQEMEVLQFHALEENVMVASEDSKLAVSLAETTGLIKLEEEQEKNQLLAERTKEQLFFVETMSGDERSDEIVLTVSNSNVEEQEDQPTAGQADAEKAKSTKNQRKTKGAKGTFHCDVCMFTSSRMSSFNRHMKTHTSEKPHLCHLCLKTFRTVTLLRNHVNTHTGTRPYKCNDCNMAFVTSGELVRHRRYKHTHEKPFKCSMCKYASVEASKLKRHVRSHTGERPFQCCQCSYASRDTYKLKRHMRTHSGEKPYECHICHTRFTQSGTMKIHILQKHGENVPKYQCPHCATIIARKSDLRVHMRNLHAYSAAELKCRYCSAVFHERYALIQHQKTHKNEKRFKCKHCSYACKQERHMTAHIRTHTGEKPFTCLSCNKCFRQKQLLNAHFRKYHDANFIPTVYKCSKCGKGFSRWINLHRHSEKCGSGEAKSAASGKGRRTRKRKQTILKEATKGQKEAAKGWKEAANGDEAAAEEASTTKGEQFPGEMFPVACRETTARVKEEVDEGVTCEMLLNTMDK

SEQ ID NO: 12677 - protein, 573 aa, Homo sapiens
MAATEISVLSEQFTKIKELELMPEKGLKEEEKDGVCREKDHRSPSELEAERTSGAFQDSVLEEEVELVLAPSEESEKYILTLQTVHFTSEAVELQDMSLLSIQQQEGVQVVVQQPGPGLLWLEEGPRQSLQQCVAISIQQELYSPQEMEVLQFHALEENVMVASEDSKLAVSLAETTGLIKLEEEQEKNQLLAERTKEQLFFVETMSGDERSDEIVLTVSNSNVEEQEDQPTAGQADAEKAKSTKNQRKTKGAKGTFHCDVCMFTSSRMSSFNRHMKTHTSEKPHLCHLCLKTFRTVTLLRNHVNTHTGTRPYKCNDCNMAFVTSGELVRHRRYKHTHEKPFKCSMCKYASVEASKLKRHVRSHTGERPFQCCQCSYASRDTYKLKRHMRTHSGEKPYECHICHTRFTQSGTMKIHILQKHGENVPKYQCPHCATIIARKSDLRVHMRNLHAYSAAELKCRYCSAVFHERYALIQHQKTHKNEKRFKCKHCSYACKQERHMTAHIRTHTGEKPFTCLSCNKCFRQKQLLNAHFRKYHDANFIPTVYKCSKCGKGFSRWITSKWSGLKPQTFIT

SEQ ID NO: 12678 - protein, 665 aa, Homo sapiens
MAATEISVLSEQFTKIKELELMPEKGLKEEEKDGVCREKDHRSPSELEAERTSGAFQDSVLEEEVELVLAPSEESEKYILTLQTVHFTSEAVELQDMSLLSIQQQEGVQVVVQQPGPGLLWLEEGPRQSLQQCVAISIQQELYSPQEMEVLQFHALEENVMVASEDSKLAVSLAETTGLIKLEEEQEKNQLLAERTKEQLFFVETMSGDERSDEIVLTVSNSNVEEQEDQPTAGQADAEKAKSTKNQRKTKGAKGTFHCDVCMFTSSRMSSFNRHMKTHTSEKPHLCHLCLKTFRTVTLLRNHVNTHTGTRPYKCNDCNMAFVTSGELVRHRRYKHTHEKPFKCSMCKYASVEASKLKRHVRSHTGERPFQCCQCSYASRDTYKLKRHMRTHSGEKPYECHICHTRFTQSGTMKIHILQKHGENVPKYQCPHCATIIARKSDLRVHMRNLHAYSAAELKCRYCSAVFHERYALIQHQKTHKNEKRFKCKHCSYACKQERHMTAHIRTHTGEKPFTCLSCNKCFRQKQLLNAHFRKYHDANFIPTVYKCSKCGKGFSRWINLHRHSEKCGSGEAKSAASGKGRRTRKRKQTILKEATKGQKEAAKGWKEAANGDGVISAHRNLCLLGSSDSHASVSGAGITDARHHAWLIVLLFLVEMGFYHVSHS

SEQ ID NO: 12679 - protein, 483 aa, Homo sapiens
MAATEISVLSEQFTKIKELELMPEKGLKEEEKDGVCREKDHRSPSELEAERTSGAFQDSVLEEEVELVLAPSEESEKYILTLQTVHFTSEAVELQDMSLLSIQQQEGVQVVVQQPGPGLLWLEEGPRQSLQQCVAISIQQELYSPQEMEVLQFHALEENVMVASEDSKLAVSLAETTGLIKLEEEQEKNQLLAERTKEQLFFVETMSGDERSDEIVLTVSNSNVEEQEDQPTAGQADAEKAKSTKNQRKTKGAKGTFHCDVCMFTSSRMSSFNRHMKTHTSEKPHLCHLCLKTFRTVTLLRNHVNTHTGTRPYKCNDCNMAFVTSGELVRHRRYKHTHEKPFKCSMCKYASVEERHMTAHIRTHTGEKPFTCLSCNKCFRQKQLLNAHFRKYHDANFIPTVYKCSKCGKGFSRWILWVGNSEVAELGGPGSGPLLRLQSGCPPGLHHPKAGLGPEDPLPGQLRHTTAGTGLSSLLQGPLCRAA

SEQ ID NO: 12680 - protein, 422 aa, Homo sapiens
MSGDERSDEIVLTVSNSNVEEQEDQPTAGQADAEKAKSTKNQRKTKGAKGTFHCDVCMFTSSRMSSFNRHMKTHTSEKPHLCHLCLKTFRTVTLLRNHVNTHTGTRPYKCNDCNMAFVTSGELVRHRRYKHTHEKPFKCSMCKYASVEASKLKRHVRSHTGERPFQCCQCSYASRDTYKLKRHMRTHSGEKPYECHICHTRFTQSGTMKIHILQKHGENVPKYQCPHCATIIARKSDLRVHMRNLHAYSAAELKCRYCSAVFHERYALIQHQKTHKNEKRFKCKHCSYACKQERHMTAHIRTHTGEKPFTCLSCNKCFRQKQLLNAHFRKYHDANFIPTVYKCSKCGKGFSRWILWVGNSEVAELGGPGSGPLLRLQSGCPPGLHHPKAGLGPEDPLPGQLRHTTAGTGLSSLLQGPLCRAA

SEQ ID NO: 12681 - protein, 403 aa, Homo sapiens
MFTSSRMSSFNRHMKTHTSEKPHLCHLCLKTFRTVTLLRNHVNTHTGTRPYKCNDCNMAFVTSGELVRHRRYKHTHEKPFKCSMCKYASVEASKLKRHVRSHTGERPFQCCQCSYASRDTYKLKRHMRTHSGEKPYECHICHTRFTQSGTMKIHILQKHGENVPKYQCPHCATIIARKSDLRVHMRNLHAYSAAELKCRYCSAVFHERYALIQHQKTHKNEKRFKCKHCSYACKQERHMTAHIRTHTGEKPFTCLSCNKCFRQKQLLNAHFRKYHDANFIPTVYKCSKCGKGFSRWINLHRHSEKCGSGEAKSAASGKGRRTRKRKQTILKEATKGQKEAAKGWKEAANGDGVISAHRNLCLLGSSDSHASVSGAGITDARHHAWLIVLLFLVEMGFYHVSHS

SEQ ID NO: 12682 - protein, 700 aa, Homo sapiens
MAATEISVLSEQFTKIKELELMPEKGLKEEEKDGVCREKDHRSPSELEAERTSGAFQDSVLEEEVELVLAPSEESEKYILTLQTVHFTSEAVELQDMSLLSIQQQEGVQVVVQQPGPGLLWLEEGPRQSLQQCVAISIQQELYSPQEMEVLQFHALEENVMVASEDSKLAVSLAETTGLIKLEEEQEKNQLLAERTKEQLFFVETMSGDERSDEIVLTVSNSNVEEQEDQPTAGQADAEKAKSTKNQRKTKGAKGTFHCDVCMFTSSRMSSFNRHMKTHTSEKPHLCHLCLKTFRTVTLLRNHVNTHTGTRPYKCNDCNMAFVTSGELVRHRRYKHTHEKPFKCSMCKYASVEASKLKRHVRSHTGERPFQCCQCSYASRDTYKLKRHMRTHSGEKPYECHICHTRFTQSGTMKIHILQKHGENVPKYQCPHCATIIARKSDLRVHMRNLHAYSAAELKCRYCSAVFHERYALIQHQKTHKNEKRFKCKHCSYACKQERHMTAHIRTHTGEKPFTCLSCNKCFRQKQLLNAHFRKYHDANFIPTVYKCSKCGKGFSRWINLHRHSEKCGSGEAKSAASGKGRRTRKRKQTILKEATKGQKEAAKGWKEAANGDEAAAEEASTTKGEQFPGEMFPVACRETTARVKEEVDEGVTCEMLLNTMDNSAGCTGRMMLVSAWLLGRPQETYNQGRRRRGSRRVTW

SEQ ID NO: 12683 - protein, 613 aa, Homo sapiens
MAATEISVLSEQFTKIKELELMPEKGLKEEEKDGVCREKDHRSPSELEAERTSGAFQDSVLEEEVELVLAPSEESEKYILTLQTVHFTSEAVELQDMSLLSIQQQEGVQVVVQQPGPGLLWLEEGPRQSLQQCVAISIQQELYSPQEMEVLQFHALEENVMVASEDSKLAVSLAETTGLIKLEEEQEKNQLLAERTKEQLFFVETMSGDERSDEIVLTVSNSNVEEQEDQPTAGQADAEKAKSTKNQRKTKGAKGTFHCDVCMFTSSRMSSFNRHMKTHTSEKPHLCHLCLKTFRTVTLLRNHVNTHTGTRPYKCNDCNMAFVTSGELVRHRRYKHTHEKPFKCSMCKYASVEASKLKRHVRSHTGERPFQCCQCSYASRDTYKLKRHMRTHSGVHMRNLHAYSAAELKCRYCSAVFHERYALIQHQKTHKNEKRFKCKHCSYACKQERHMTAHIRTHTGEKPFTCLSCNKCFRQKQLLNAHFRKYHDANFIPTVYKCSKCGKGFSRWINLHRHSEKCGSGEAKSAASGKGRRTRKRKQTILKEATKGQKEAAKGWKEAANGDEAAAEEASTTKGEQFPGEMFPVACRETTARVKEEVDEGVTCEMLLNTMDK

SEQ ID NO: 12684 - protein, 427 aa, Homo sapiens
MAATEISVLSEQFTKIKELELMPEKGLKEEEKDGVCREKDHRSPSELEAERTSGAFQDSVLEEEVELVLAPSEESEKYILTLQTVHFTSEAVELQDMSLLSIQQQEGVQVVVQQPGPGLLWLEEGPRQSLQQCVAISIQQELYSPQEMEVLQFHALEENVMVASEDSKLAVSLAETTGLIKLEEEQEKNQLLAERTKEQLFFVETMSGDERSDEIVLTVSNSNVEEQEDQPTAGQADAEKAKSTKNQRKTKGAKGTFHCDVCMFTSSRMSSFNRHMKTHTSEKPHLCHLCLKTFRTVTLLRNHVNTHTGTRPYKCNDCNMAFVTSGELVRHRRYKHTHEKPFKCSMCKYASVEASKLKRHVRSHTGERPFQCCQCSYASRDTYKLKRHMRTHSEATSKRSLQEIPRCKFHPDCLQMLQVWQRLFPLD

SEQ ID NO: 12685 - protein, 460 aa, Homo sapiens
MSGDERSDEIVLTVSNSNVEEQEDQPTAGQADAEKAKSTKNQRKTKGAKGTFHCDVCMFTSSRMSSFNRHMKTHTSEKPHLCHLCLKTFRTVTLLRNHVNTHTGTRPYKCNDCNMAFVTSGELVRHRRYKHTHEKPFKCSMCKYASVEASKLKRHVRSHTGERPFQCCQCSYASRDTYKLKRHMRTHSGEKPYECHICHTRFTQSGTMKIHILQKHGENVPKYQCPHCATIIARKSDLRVHMRNLHAYSAAELKCRYCSAVFHERYALIQHQKTHKNEKRFKCKHCSYACKQERHMTAHIRTHTGEKPFTCLSCNKCFRQKQLLNAHFRKYHDANFIPTVYKCSKCGKGFSRWINLHRHSEKCGSGEAKSAASGKGRRTRKRKQTILKEATKGQKEAAKGWKEAANGDGVISAHRNLCLLGSSDSHASVSGAGITDARHHAWLIVLLFLVEMGFYHVSHS

SEQ ID NO: 12686 - protein, 299 aa, Homo sapiens
MFTSSRMSSFNRHMKTHTSEKPHLCHLCLKTFRTVTLLRNHVNTHTGTRPYKCNDCNMAFVTSGELVRHRRYKHTHEKPFKCSMCKYASVEASKLKRHVRSHTGERPFQCCQCSYASRDTYKLKRHMRTHSGEKPYECHICHTRFTQSGTMKIHILQKHGENVPKYQCPHCATIIARKSDLRVHMRNLHAYSAAELKCRYCSAVFHERYALIQHQKTHKNEKRFKCKHCSYACKQERHMTAHIRTHTGEKPFTCLSCNKCFRQKQLLNAHFRKYHDANFIPTVYKCSKCGKGFSRWVLY

SEQ ID NO: 12687 - protein, 261 aa, Homo sapiens
MDSSAVITQISKEEARGPLRGKGDQKSAASQKPRSRGILHSLFCCVCRDDGEALPAHSGAPLLVEENGAIPKQTPVQYLLPEAKAQDSDKICVVIDLDETLVHSSFKPVNNADFIIPVEIDGVVHQVYVLKRPHVDEFLQRMGELFECVLFTASLAKYADPVADLLDKWGAFRARLFRESCVFHRGNYVKDLSRLGRDLRRVLILDNSPASYVFHPDNAVPVASWFDNMSDTELHDLLPFFEQLSRVDDVYSVLRQPRPGS

SEQ ID NO: 12688 - protein, 260 aa, Homo sapiens
MDSSAVITQISKEEARGPLRGKGDQKSAASQKPRSRGILHSLFCCVCRDDGEALPAHSGAPLLVEENGAIPKTPVQYLLPEAKAQDSDKICVVIDLDETLVHSSFKPVNNADFIIPVEIDGVVHQVYVLKRPHVDEFLQRMGELFECVLFTASLAKYADPVADLLDKWGAFRARLFRESCVFHRGNYVKDLSRLGRDLRRVLILDNSPASYVFHPDNAVPVASWFDNMSDTELHDLLPFFEQLSRVDDVYSVLRQPRPGS

SEQ ID NO: 12689 - protein, 260 aa, Homo sapiens
MVAAPWATQEQEEGRGIQPGDRGDQKSAASQKPRSRGILHSLFCCVCRDDGEALPAHSGAPLLVEENGAIPKTPVQYLLPEAKAQDSDKICVVIDLDETLVHSSFKPVNNADFIIPVEIDGVVHQVYVLKRPHVDEFLQRMGELFECVLFTASLAKYADPVADLLDKWGAFRARLFRESCVFHRGNYVKDLSRLGRDLRRVLILDNSPASYVFHPDNAVPVASWFDNMSDTELHDLLPFFEQLSRVDDVYSVLRQPRPGS

SEQ ID NO: 12690 - protein, 525 aa, Homo sapiens
MAAGGSGGRASCPPGVGVGPGTGGSPGPSANAAATPAPGNAAAAAAAAAAAAAAPGPTPPAPPGPGTDAQAAGAERAEEAAGPGAAALQREAAYNWQASKPTVQERFAFLFNNEVLCDVHFLVGKGLSSQRIPAHRFVLAVGSAVFDAMFNGGMATTSTEIELPDVEPAAFLALLKFLYSDEVQIGPETVMTTLYTAKKYAVPALEAHCVEFLKKNLRADNAFMLLTQARLFDEPQLASLCLENIDKNTADAITAEGFTDIDLDTLVAVLERDTLGIREVRLFNAVVRWSEAECQRQQLQVTPENRRKVLGKALGLIRFPLMTIEEFAAGPAQSGILVDREVVSLFLHFTVNPKPRVEFIDRPRCCLRGKECSINRFQQVESRWGYSGTSDRIRFSVNKRIFVVGFGLYGSIHGPTDYQVNIQIIHTDSNTVLGQNDTGFSCDGSASTFRVMFKEPVEVLPNVNYTACATLKGPDSHYGTKGLRKVTHESPTTGAKTCFTFCYAAGNNNGTSVEDGQIPEVIFYT

SEQ ID NO: 12691 - protein, 204 aa, Homo sapiens
MTIEEFAAGPAQSGILVDREVVSLFLHFTVNPKPRVEFIDRPRCCLRGKECSINRFQQVESRWGYSGTSDRIRFSVNKRIFVVGFGLYGSIHGPTDYQVNIQIIHTDSNTVLGQNDTGFSCDGSASTFRVMFKEPVEVLPNVNYTACATLKGPDSHYGTKGLRKVTHESPTTGAKTCFTFCYAAGNNNGTSVEDGQIPEVIFYT

SEQ ID NO: 12692 - protein, 3418 aa, Homo sapiens
MPIGSKERPTFFEIFKTRCNKADLGPISLNWFEELSSEAPPYNSEPAEESEHKNNNYEPNLFKTPQRKPSYNQLASTPIIFKEQGLTLPLYQSPVKELDKFKLDLGRNVPNSRHKSLRTVKTKMDQADDVSCPLLNSCLSESPVVLQCTHVTPQRDKSVVCGSLFHTPKFVKGRQTPKHISESLGAEVDPDMSWSSSLATPPTLSSTVLIVRNEEASETVFPHDTTANVKSYFSNHDESLKKNDRFIASVTDSENTNQREAASHGFGKTSGNSFKVNSCKDHIGKSMPNVLEDEVYETVVDTSEEDSFSLCFSKCRTKNLQKVRTSKTRKKIFHEANADECEKSKNQVKEKYSFVSEVEPNDTDPLDSNVANQKPFESGSDKISKEVVPSLACEWSQLTLSGLNGAQMEKIPLLHISSCDQNISEKDLLDTENKRKKDFLTSENSLPRISSLPKSEKPLNEETVVNKRDEEQHLESHTDCILAVKQAISGTSPVASSFQGIKKSIFRIRESPKETFNASFSGHMTDPNFKKETEASESGLEIHTVCSQKEDSLCPNLIDNGSWPATTTQNSVALKNAGLISTLKKKTNKFIYAIHDETSYKGKKIPKDQKSELINCSAQFEANAFEAPLTFANADSGLLHSSVKRSCSQNDSEEPTLSLTSSFGTILRKCSRNETCSNNTVISQDLDYKEAKCNKEKLQLFITPEADSLSCLQEGQCENDPKSKKVSDIKEEVLAAACHPVQHSKVEYSDTDFQSQKSLLYDHENASTLILTPTSKDVLSNLVMISRGKESYKMSDKLKGNNYESDVELTKNIPMEKNQDVCALNENYKNVELLPPEKYMRVASPSRKVQFNQNTNLRVIQKNQEETTSISKITVNPDSEELFSDNENNFVFQVANERNNLALGNTKELHETDLTCVNEPIFKNSTMVLYGDTGDKQATQVSIKKDLVYVLAEENKNSVKQHIKMTLGQDLKSDISLNIDKIPEKNNDYMNKWAGLLGPISNHSFGGSFRTASNKEIKLSEHNIKKSKMFFKDIEEQYPTSLACVEIVNTLALDNQKKLSKPQSINTVSAHLQSSVVVSDCKNSHITPQMLFSKQDFNSNHNLTPSQKAEITELSTILEESGSQFEFTQFRKPSYILQKSTFEVPENQMTILKTTSEECRDADLHVIMNAPSIGQVDSSKQFEGTVEIKRKFAGLLKNDCNKSASGYLTDENEVGFRGFYSAHGTKLNVSTEALQKAVKLFSDIENISEETSAEVHPISLSSSKCHDSVVSMFKIENHNDKTVSEKNNKCQLILQNNIEMTTGTFVEEITENYKRNTENEDNKYTAASRNSHNLEFDGSDSSKNDTVCIHKDETDLLFTDQHNICLKLSGQFMKEGNTQIKEDLSDLTFLEVAKAQEACHGNTSNKEQLTATKTEQNIKDFETSDTFFQTASGKNISVAKESFNKIVNFFDQKPEELHNFSLNSELHSDIRKNKMDILSYEETDIVKHKILKESVPVGTGNQLVTFQGQPERDEKIKEPTLLGFHTASGKKVKIAKESLDKVKNLFDEKEQGTSEITSFSHQWAKTLKYREACKDLELACETIEITAAPKCKEMQNSLNNDKNLVSIETVVPPKLLSDNLCRQTENLKTSKSIFLKVKVHENVEKETAKSPATCYTNQSPYSVIENSALAFYTSCSRKTSVSQTSLLEAKKWLREGIFDGQPERINTADYVGNYLYENNSNSTIAENDKNHLSEKQDTYLSNSSMSNSYSYHSDEVYNDSGYLSKNKLDSGIEPVLKNVEDQKNTSFSKVISNVKDANAYPQTVNEDICVEELVTSSSPCKNKNAAIKLSISNSNNFEVGPPAFRIASGKIVCVSHETIKKVKDIFTDSFSKVIKENNENKSKICQTKIMAGCYEALDDSEDILHNSLDNDECSTHSHKVFADIQSEEILQHNQNMSGLEKVSKISPCDVSLETSDICKCSIGKLHKSVSSANTCGIFSTASGKSVQVSDASLQNARQVFSEIEDSTKQVFSKVLFKSNEHSDQLTREENTAIRTPEHLISQKGFSYNVVNSSAFSGFSTASGKQVSILESSLHKVKGVLEEFDLIRTEHSLHYSPTSRQNVSKILPRVDKRNPEHCVNSEMEKTCSKEFKLSNNLNVEGGSSENNHSIKVSPYLSQFQQDKQQLVLGTKVSLVENIHVLGKEQASPKNVKMEIGKTETFSDVPVKTNIEVCSTYSKDSENYFETEAVEIAKAFMEDDELTDSKLPSHATHSLFTCPENEEMVLSNSRIGKRRGEPLILVGEPSIKRNLLNEFDRIIENQEKSLKASKSTPDGTIKDRRLFMHHVSLEPITCVPFRTTKERQEIQNPNFTAPGQEFLSKSHLYEHLTLEKSSSNLAVSGHPFYQVSATRNEKMRHLITTGRPTKVFVPPFKTKSHFHRVEQCVRNINLEENRQKQNIDGHGSDDSKNKINDNEIHQFNKNNSNQAAAVTFTKCEEEPLDLITSLQNARDIQDMRIKKKQRQRVFPQPGSLYLAKTSTLPRISLKAAVGGQVPSACSHKQLYTYGVSKHCIKINSKNAESFQFHTEDYFGKESLWTGKGIQLADGGWLIPSNDGKAGKEEFYRALCDTPGVDPKLISRIWVYNHYRWIIWKLAAMECAFPKEFANRCLSPERVLLQLKYRYDTEIDRSRRSAIKKIMERDDTAAKTLVLCVSDIISLSANISETSSNKTSSADTQKVAIIELTDGWYAVKAQLDPPLLAVLKNGRLTVGQKIILHGAELVGSPDACTPLEAPESLMLKISANSTRPARWYTKLGFFPDPRPFPLPLSSLFSDGGNVGCVDVIIQRAYPIQWMEKTSSGLYIFRNEREEEKEAAKYVEAQQKRLEALFTKIQEEFEEHEENTTKPYLPSRALTRQQVRALQDGAELYEAVKNAADPAYLEGYFSEEQLRALNNHRQMLNDKKQAQIQLEIRKAMESAEQKEQGLSRDVTTVWKLRIVSYSKKEKDSVILSIWRPSSDLYSLLTEGKRYRIYHLATSKSKSKSERANIQLAATKKTQYQQLPVSDEILFQIYQPREPLHFSKFLDPDFQPSCSEVDLIGFVVSVVKKTGLAPFVYLSDECYNLLAIKFWIDLNEDIIKPHMLIAASNLQWRPESKSGLLTLFAGDFSVFSASPKEGHFQETFNKMKNTVENIDILCNEAENKLMHILHANDPKWSTPTKDCTSGPYTAQIIPGTGNKLLMSSPNCEIYYQSPLSLCMAKRKSVSTPVSAQMTSKSCKGEKEIDDQKNCKKRRALDFLSRLPLPPPVSPICTFVSPAAQKAFQPPRSCGTKYETPIKKKELNSPQMTPFKKFNEISLLESNSIADEELALINTQALLSGSTGEKQFISVSESTRTAPTSSEDYLRLKRRCTTSLIKEQESSQASTEECEKNKQDTITTKKYI

SEQ ID NO: 12693 - protein, 1362 aa, Homo sapiens
MSAESGPGTRLRNLPVMGDGLETSQMSTTQAQAQPQPANAASTNPPPPETSNPNKPKRQTNQLQYLLRVVLKTLWKHQFAWPFQQPVDAVKLNLPDYYKIIKTPMDMGTIKKRLENNYYWNAQECIQDFNTMFTNCYIYNKPGDDIVLMAEALEKLFLQKINELPTEETEIMIVQAKGRGRGRKETGTAKPGVSTVPNTTQASTPPQTQTPQPNPPPVQATPHPFPAVTPDLIVQTPVMTVVPPQPLQTPPPVPPQPQPPPAPAPQPVQSHPPIIAATPQPVKTKKGVKRKADTTTPTTIDPIHEPPSLPPEPKTTKLGQRRESSRPVKPPKKDVPDSQQHPAPEKSSKVSEQLKCCSGILKEMFAKKHAAYAWPFYKPVDVEALGLHDYCDIIKHPMDMSTIKSKLEAREYRDAQEFGADVRLMFSNCYKYNPPDHEVVAMARKLQDVFEMRFAKMPDEPEEPVVAVSSPAVPPPTKVVAPPSSSDSSSDSSSDSDSSTDDSEEERAQRLAELQEQLKAVHEQLAALSQPQQNKPKKKEKDKKEKKKEKHKRKEEVEENKKSKAKEPPPKKTKKNNSSNSNVSKKEPAPMKSKPPPTYESEEEDKCKPMSYEEKRQLSLDINKLPGEKLGRVVHIIQSREPSLKNSNPDEIEIDFETLKPSTLRELERYVTSCLRKKRKPQAEKVDVIAGSSKMKGFSSSESESSSESSSSDSEDSETEMAPKSKKKGHPGREQKKHHHHHHQQMQQAPAPVPQQPPPPPQQPPPPPPPQQQQQPPPPPPPPSMPQQAAPAMKSSPPPFIATQVPVLEPQLPGSVFDPIGHFTQPILHLPQPELPPHLPQPPEHSTPPHLNQHAVVSPPALHNALPQQPSRPSNRAAALPPKPARPPAVSPALTQTPLLPQPPMAQPPQVLLEDEEPPAPPLTSMQMQLYLQQLQKVQPPTPLLPSVKVQSQPPPPLPPPPHPSVQQQLQQQPPPPPPPQPQPPPQQQHQPPPRPVHLQPMQFSTHIQQPPPPQGQQPPHPPPGQQPPPPQPAKPQQVIQHHHSPRHHKSDPYSTGHLREAPSPLMIHSPQMSQFQSLTHQSPPQQNVQPKKQELRAASVVQPQPLVVVKEEKIHSPIIRSEPFSPSLRPEPPKHPESIKAPVHLPQRPEMKPVDVGRPVIRPPEQNAPPPGAPDKDKQKQEPKTPVAPKKDLKIKNMGSWASLVQKHPTTPSSTAKSSSDSFEQFRRAAREKEEREKALKAQAEHAEKEKERLRQERMRSREDEDALEQARRAHEEARRRQEQQQQQRQEQQQQQQQQAAAVAAAATPQAQSSQPQSMLDQQRELARKREQERRRREAMAATIDMNFQSDLLSIFEENLF

SEQ ID NO: 12694 - protein, 722 aa, Homo sapiens
MSAESGPGTRLRNLPVMGDGLETSQMSTTQAQAQPQPANAASTNPPPPETSNPNKPKRQTNQLQYLLRVVLKTLWKHQFAWPFQQPVDAVKLNLPDYYKIIKTPMDMGTIKKRLENNYYWNAQECIQDFNTMFTNCYIYNKPGDDIVLMAEALEKLFLQKINELPTEETEIMIVQAKGRGRGRKETGTAKPGVSTVPNTTQASTPPQTQTPQPNPPPVQATPHPFPAVTPDLIVQTPVMTVVPPQPLQTPPPVPPQPQPPPAPAPQPVQSHPPIIAATPQPVKTKKGVKRKADTTTPTTIDPIHEPPSLPPEPKTTKLGQRRESSRPVKPPKKDVPDSQQHPAPEKSSKVSEQLKCCSGILKEMFAKKHAAYAWPFYKPVDVEALGLHDYCDIIKHPMDMSTIKSKLEAREYRDAQEFGADVRLMFSNCYKYNPPDHEVVAMARKLQDVFEMRFAKMPDEPEEPVVAVSSPAVPPPTKVVAPPSSSDSSSDSSSDSDSSTDDSEEERAQRLAELQEQLKAVHEQLAALSQPQQNKPKKKEKDKKEKKKEKHKRKEEVEENKKSKAKEPPPKKTKKNNSSNSNVSKKEPAPMKSKPPPTYESEEEDKCKPMSYEEKRQLSLDINKLPGEKLGRVVHIIQSREPSLKNSNPDEIEIDFETLKPSTLRELERYVTSCLRKKRKPQAEKVDVIAGSSKMKGFSSSESESSSESSSSDSEDSETGPA

SEQ ID NO: 12695 - protein, 794 aa, Homo sapiens
MSAESGPGTRLRNLPVMGDGLETSQMSTTQAQAQPQPANAASTNPPPPETSNPNKPKRQTNQLQYLLRVVLKTLWKHQFAWPFQQPVDAVKLNLPDYYKIIKTPMDMGTIKKRLENNYYWNAQECIQDFNTMFTNCYIYNKPGDDIVLMAEALEKLFLQKINELPTEETEIMIVQAKGRGRGRKETGTAKPGVSTVPNTTQASTPPQTQTPQPNPPPVQATPHPFPAVTPDLIVQTPVMTVVPPQPLQTPPPVPPQPQPPPAPAPQPVQSHPPIIAATPQPVKTKKGVKRKADTTTPTTIDPIHEPPSLPPEPKTTKLGQRRESSRPVKPPKKDVPDSQQHPAPEKSSKVSEQLKCCSGILKEMFAKKHAAYAWPFYKPVDVEALGLHDYCDIIKHPMDMSTIKSKLEAREYRDAQEFGADVRLMFSNCYKYNPPDHEVVAMARKLQDVFEMRFAKMPDEPEEPVVAVSSPAVPPPTKVVAPPSSSDSSSDSSSDSDSSTDDSEEERAQRLAELQEQLKAVHEQLAALSQPQQNKPKKKEKDKKEKKKEKHKRKEEVEENKKSKAKEPPPKKTKKNNSSNSNVSKKEPAPMKSKPPPTYESEEEDKCKPMSYEEKRQLSLDINKLPGEKLGRVVHIIQSREPSLKNSNPDEIEIDFETLKPSTLRELERYVTSCLRKKRKPQAEKVDVIAGSSKMKGFSSSESESSSESSSSDSEDSETAFCTSGDFVSPGPSPYHSHVQCGRFREMLRWFLVDVEQTAAGQPHRQSAAGPAITWAPAIAYPSPECARCCVGCS

SEQ ID NO: 12696 - protein, 566 aa, Homo sapiens
MGSAGFSVGKFHVEVASRGRECVSGTPECGNRLGSAGFGALCLELRGADPAWGPFAAHGRSRRQGSRFLWLLKILVIILVLGIVGFMFGSMFLQAVFSSPKPELPSPAPGVQKLKLLPEERLRNLFSYDGIWLFPKNQCKCEANKEQGGYNFQDAYGQSDLPAVKARRQAEFEHFQRREGLPRPLPLLVQPNLPFGYPVHGVEVMPLHTVPIPGLQFEGPDAPVYEVTLTASLGTLNTLADVPDSVVQGRGQKQLIISTSDRKLLKFILQHVTYTSTGYQHQKVDIVSLESRSSVAKFPVTIRHPVIPKLYDPGPERKLRNLVTIATKTFLRPHKLMIMLRSIREYYPDLTVIVADDSQKPLEIKDNHVEYYTMPFGKGWFAGRNLAISQVTTKYVLWVDDDFLFNEETKIEVLVDVLEKTELDVVGGSVLGNVFQFKLLLEQSENGACLHKRMGFFQPLDGFPSCVVTSGVVNFFLAHTERLQRVGFDPRLQRVAHSEFFIDGLGTLLVGSCPEVIIGHQSRSPVVDSELAALEKTYNTYRSNTLTRVQFKLALHYFKNHLQCAA

SEQ ID NO: 12697 - protein, 506 aa, Homo sapiens
MTSGGSRFLWLLKILVIILVLGIVGFMFGSMFLQAVFSSPKPELPSPAPGVQKLKLLPEERLRNLFSYDGIWLFPKNQCKCEANKEQGGYNFQDAYGQSDLPAVKARRQAEFEHFQRREGLPRPLPLLVQPNLPFGYPVHGVEVMPLHTVPIPGLQFEGPDAPVYEVTLTASLGTLNTLADVPDSVVQGRGQKQLIISTSDRKLLKFILQHVTYTSTGYQHQKVDIVSLESRSSVAKFPVTIRHPVIPKLYDPGPERKLRNLVTIATKTFLRPHKLMIMLRSIREYYPDLTVIVADDSQKPLEIKDNHVEYYTMPFGKGWFAGRNLAISQVTTKYVLWVDDDFLFNEETKIEVLVDVLEKTELDVVGGSVLGNVFQFKLLLEQSENGACLHKRMGFFQPLDGFPSCVVTSGVVNFFLAHTERLQRVGFDPRLQRVAHSEFFIDGLGTLLVGSCPEVIIGHQSRSPVVDSELAALEKTYNTYRSNTLTRVQFKLALHYFKNHLQCAA

SEQ ID NO: 12698 - protein, 480 aa, Homo sapiens
MFGSMFLQAVFSSPKPELPSPAPGVQKLKLLPEERLRNLFSYDGIWLFPKNQCKCEANKEQGGYNFQDAYGQSDLPAVKARRQAEFEHFQRREGLPRPLPLLVQPNLPFGYPVHGVEVMPLHTVPIPGLQFEGPDAPVYEVTLTASLGTLNTLADVPDSVVQGRGQKQLIISTSDRKLLKFILQHVTYTSTGYQHQKVDIVSLESRSSVAKFPVTIRHPVIPKLYDPGPERKLRNLVTIATKTFLRPHKLMIMLRSIREYYPDLTVIVADDSQKPLEIKDNHVEYYTMPFGKGWFAGRNLAISQVTTKYVLWVDDDFLFNEETKIEVLVDVLEKTELDVVGGSVLGNVFQFKLLLEQSENGACLHKRMGFFQPLDGFPSCVVTSGVVNFFLAHTERLQRVGFDPRLQRVAHSEFFIDGLGTLLVGSCPEVIIGHQSRSPVVDSELAALEKTYNTYRSNTLTRVQFKLALHYFKNHLQCAA

SEQ ID NO: 12699 - protein, 372 aa, Homo sapiens
MSRLLGGTLERVCKAVLLLCLLHFLVAVILYFDVYAQHLAFFSRFSARGPAHALHPAASSSSSSSNCSRPNATASSSGLPEVPSALPGPTAPTLPPCPDSPPGLVGRLLIEFTSPMPLERVQRENPGVLMGGRYTPPDCTPAQTVAVIIPFRHREHHLRYWLHYLHPILRRQRLRYGVYVINQHGEDTFNRAKLLNVGFLEALKEDAAYDCFIFSDVDLVPMDDRNLYRCGDQPRHFAIAMDKFGFRLPYAGYFGGVSGLSKAQFLRINGFPNEYWGWGGEDDDIFNRISLTGMKISRPDIRIGRYRMIKHDRDKHNEPNPQRFTKIQNTKLTMKRDGIGSVRYQVLEVSRQPLFTNITVDIGRPPSWPPRG

SEQ ID NO: 12700 - protein, 306 aa, Homo sapiens
MPSTQLLAAAAAAATAPGPTPPPLAPGSLRSPVPCPVPRLPRCHPVLTRHLVLRVQRENPGVLMGGRYTPPDCTPAQTVAVIIPFRHREHHLRYWLHYLHPILRRQRLRYGVYVINQHGEDTFNRAKLLNVGFLEALKEDAAYDCFIFSDVDLVPMDDRNLYRCGDQPRHFAIAMDKFGFRLPYAGYFGGVSGLSKAQFLRINGFPNEYWGWGGEDDDIFNRISLTGMKISRPDIRIGRYRMIKHDRDKHNEPNPQRFTKIQNTKLTMKRDGIGSVRYQVLEVSRQPLFTNITVDIGRPPSWPPRG

SEQ ID NO: 12701 - protein, 401 aa, Homo sapiens
MAVEVQEQWPCLPAAGCPGPLGGPVAACGMSRLLGGTLERVCKAVLLLCLLHFLVAVILYFDVYAQHLAFFSRFSARGPAHALHPAASSSSSSSNCSRPNATASSSGLPEVPSALPGPTAPTLPPCPDSPPGLVGRLLIEFTSPMPLERVQRENPGVLMGGRYTPPDCTPAQTVAVIIPFRHREHHLRYWLHYLHPILRRQRLRYGVYVINQHGEDTFNRAKLLNVGFLEALKEDAAYDCFIFSDVDLVPMDDRNLYRCGDQPRHFAIAMDKFGFRLPYAGYFGGVSGLSKAQFLRINGFPNEYWGWGGEDDDIFNRISLTGMKISRPDIRIGRYRMIKHDRDKHNEPNPQRFTKIQNTKLTMKRDGIGSVRYQVLEVSRQPLFTNITVDIGRPPSWPPRG

SEQ ID NO: 12702 - protein, 947 aa, Homo sapiens
MSLPSRQTAIIVNPPPPEYINTKKNGRLTNQLQYLQKVVLKDLWKHSFSWPFQRPVDAVKLQLPDYYTIIKNPMDLNTIKKRLENKYYAKASECIEDFNTMFSNCYLYNKPGDDIVLMAQALEKLFMQKLSQMPQEEQVVGVKERIKKGTQQNIAVSSAKEKSSPSATEKVFKQQEIPSVFPKTSISPLNVVQGASVNSSSQTAAQVTKGVKRKADTTTPATSAVKASSEFSPTFTEKSVALPPIKENMPKNVLPDSQQQYNVVKTVKVTEQLRHCSEILKEMLAKKHFSYAWPFYNPVDVNALGLHNYYDVVKNPMDLGTIKEKMDNQEYKDAYKFAADVRLMFMNCYKYNPPDHEVVTMARMLQDVFETHFSKIPIEPVESMPLCYIKTDITETTGRENTNEASSEGNSSDDSEDERVKRLAKLQEQLKAVHQQLQVLSQVPFRKLNKKKEKSKKEKKKEKVNNSNENPRKMCEQMRLKEKSKRNQPKKRKQQFIGLKSEDEDNAKPMNYDEKRQLSLNINKLPGDKLGRVVHIIQSREPSLSNSNPDEIEIDFETLKASTLRELEKYVSACLRKRPLKPPAKKIMMSKEELHSQKKQELEKRLLDVNNQLNSRKRQTKSDKTQPSKAVENVSRLSESSSSSSSSSESESSSSDLSSSDSSDSESEMFPKFTEVKPNDSPSKENVKKMKNECIPPEGRTGVTQIGYCVQDTTSANTTLVHQTTPSHVMPPNHHQLAFNYQELEHLQTVKNISPLQILPPSGDSEQLSNGITVMHPSGDSDTTMLESECQAPVQKDIKIKNADSWKSLGKPVKPSGVMKSSDELFNQFRKAAIEKEVKARTQELIRKHLEQNTKELKASQENQRDLGNGLTVESFSNKIQNKCSGEEQKEHQQSSEAQDKSKLWLLKDRDLARQKEQERRRREAMVGTIDMTLQSDIMTMFENNFD

SEQ ID NO: 12703 - protein, 960 aa, Homo sapiens
MTCTCRQDSKQLRMSLPSRQTAIIVNPPPPEYINTKKNGRLTNQLQYLQKVVLKDLWKHSFSWPFQRPVDAVKLQLPDYYTIIKNPMDLNTIKKRLENKYYAKASECIEDFNTMFSNCYLYNKPGDDIVLMAQALEKLFMQKLSQMPQEEQVVGVKERIKKGTQQNIAVSSAKEKSSPSATEKVFKQQEIPSVFPKTSISPLNVVQGASVNSSSQTAAQVTKGVKRKADTTTPATSAVKASSEFSPTFTEKSVALPPIKENMPKNVLPDSQQQYNVVKTVKVTEQLRHCSEILKEMLAKKHFSYAWPFYNPVDVNALGLHNYYDVVKNPMDLGTIKEKMDNQEYKDAYKFAADVRLMFMNCYKYNPPDHEVVTMARMLQDVFETHFSKIPIEPVESMPLCYIKTDITETTGRENTNEASSEGNSSDDSEDERVKRLAKLQEQLKAVHQQLQVLSQVPFRKLNKKKEKSKKEKKKEKVNNSNENPRKMCEQMRLKEKSKRNQPKKRKQQFIGLKSEDEDNAKPMNYDEKRQLSLNINKLPGDKLGRVVHIIQSREPSLSNSNPDEIEIDFETLKASTLRELEKYVSACLRKRPLKPPAKKIMMSKEELHSQKKQELEKRLLDVNNQLNSRKRQTKSDKTQPSKAVENVSRLSESSSSSSSSSESESSSSDLSSSDSSDSESEMFPKFTEVKPNDSPSKENVKKMKNECIPPEGRTGVTQIGYCVQDTTSANTTLVHQTTPSHVMPPNHHQLAFNYQELEHLQTVKNISPLQILPPSGDSEQLSNGITVMHPSGDSDTTMLESECQAPVQKDIKIKNADSWKSLGKPVKPSGVMKSSDELFNQFRKAAIEKEVKARTQELIRKHLEQNTKELKASQENQRDLGNGLTVESFSNKIQNKCSGEEQKEHQQSSEAQDKSKLWLLKDRDLARQKEQERRRREAMVGTIDMTLQSDIMTMFENNFD

SEQ ID NO: 12704 - protein, 951 aa, Homo sapiens
MSLPSRQTAIIVNPPPPEYINTKKNGRLTNQLQYLQKVVLKDLWKHSFSWPFQRPVDAVKLQLPDYYTIIKNPMDLNTIKKRLENKYYAKASECIEDFNTMFSNCYLYNKPGDDIVLMAQALEKLFMQKLSQMPQEEQVVGVKERIKKGKAGGTQQNIAVSSAKEKSSPSATEKVFKQQEIPSVFPKTSISPLNVVQGASVNSSSQTAAQVTKGVKRKADTTTPATSAVKASSEFSPTFTEKSVALPPIKENMPKNVLPDSQQQYNVVKTVKVTEQLRHCSEILKEMLAKKHFSYAWPFYNPVDVNALGLHNYYDVVKNPMDLGTIKEKMDNQEYKDAYKFAADVRLMFMNCYKYNPPDHEVVTMARMLQDVFETHFSKIPIEPVESMPLCYIKTDITETTGRENTNEASSEGNSSDDSEDERVKRLAKLQEQLKAVHQQLQVLSQVPFRKLNKKKEKSKKEKKKEKVNNSNENPRKMCEQMRLKEKSKRNQPKKRKQQFIGLKSEDEDNAKPMNYDEKRQLSLNINKLPGDKLGRVVHIIQSREPSLSNSNPDEIEIDFETLKASTLRELEKYVSACLRKRPLKPPAKKIMMSKEELHSQKKQELEKRLLDVNNQLNSRKRQTKSDKTQPSKAVENVSRLSESSSSSSSSSESESSSSDLSSSDSSDSESEMFPKFTEVKPNDSPSKENVKKMKNECIPPEGRTGVTQIGYCVQDTTSANTTLVHQTTPSHVMPPNHHQLAFNYQELEHLQTVKNISPLQILPPSGDSEQLSNGITVMHPSGDSDTTMLESECQAPVQKDIKIKNADSWKSLGKPVKPSGVMKSSDELFNQFRKAAIEKEVKARTQELIRKHLEQNTKELKASQENQRDLGNGLTVESFSNKIQNKCSGEEQKEHQQSSEAQDKSKLWLLKDRDLARQKEQERRRREAMVGTIDMTLQSDIMTMFENNFD

SEQ ID NO: 12705 - protein, 901 aa, Homo sapiens
MSLPSRQTAIIVNPPPPEYINTKKNGRLTNQLQYLQKVVLKDLWKHSFSWPFQRPVDAVKLQLPPGDDIVLMAQALEKLFMQKLSQMPQEEQVVGVKERIKKGTQQNIAVSSAKEKSSPSATEKVFKQQEIPSVFPKTSISPLNVVQGASVNSSSQTAAQVTKGVKRKADTTTPATSAVKASSEFSPTFTEKSVALPPIKENMPKNVLPDSQQQYNVVKTVKVTEQLRHCSEILKEMLAKKHFSYAWPFYNPVDVNALGLHNYYDVVKNPMDLGTIKEKMDNQEYKDAYKFAADVRLMFMNCYKYNPPDHEVVTMARMLQDVFETHFSKIPIEPVESMPLCYIKTDITETTGRENTNEASSEGNSSDDSEDERVKRLAKLQEQLKAVHQQLQVLSQVPFRKLNKKKEKSKKEKKKEKVNNSNENPRKMCEQMRLKEKSKRNQPKKRKQQFIGLKSEDEDNAKPMNYDEKRQLSLNINKLPGDKLGRVVHIIQSREPSLSNSNPDEIEIDFETLKASTLRELEKYVSACLRKRPLKPPAKKIMMSKEELHSQKKQELEKRLLDVNNQLNSRKRQTKSDKTQPSKAVENVSRLSESSSSSSSSSESESSSSDLSSSDSSDSESEMFPKFTEVKPNDSPSKENVKKMKNECIPPEGRTGVTQIGYCVQDTTSANTTLVHQTTPSHVMPPNHHQLAFNYQELEHLQTVKNISPLQILPPSGDSEQLSNGITVMHPSGDSDTTMLESECQAPVQKDIKIKNADSWKSLGKPVKPSGVMKSSDELFNQFRKAAIEKEVKARTQELIRKHLEQNTKELKASQENQRDLGNGLTVESFSNKIQNKCSGEEQKEHQQSSEAQDKSKLWLLKDRDLARQKEQERRRREAMVGTIDMTLQSDIMTMFENNFD

SEQ ID NO: 12706 - protein, 874 aa, Homo sapiens
MDLNTIKKRLENKYYAKASECIEDFNTMFSNCYLYNKPGDDIVLMAQALEKLFMQKLSQMPQEEQVVGVKERIKKGTQQNIAVSSAKEKSSPSATEKVFKQQEIPSVFPKTSISPLNVVQGASVNSSSQTAAQVTKGVKRKADTTTPATSAVKASSEFSPTFTEKSVALPPIKENMPKNVLPDSQQQYNVVKTVKVTEQLRHCSEILKEMLAKKHFSYAWPFYNPVDVNALGLHNYYDVVKNPMDLGTIKEKMDNQEYKDAYKFAADVRLMFMNCYKYNPPDHEVVTMARMLQDVFETHFSKIPIEPVESMPLCYIKTDITETTGRENTNEASSEGNSSDDSEDERVKRLAKLQEQLKAVHQQLQVLSQVPFRKLNKKKEKSKKEKKKEKVNNSNENPRKMCEQMRLKEKSKRNQPKKRKQQFIGLKSEDEDNAKPMNYDEKRQLSLNINKLPGDKLGRVVHIIQSREPSLSNSNPDEIEIDFETLKASTLRELEKYVSACLRKRPLKPPAKKIMMSKEELHSQKKQELEKRLLDVNNQLNSRKRQTKSDKTQPSKAVENVSRLSESSSSSSSSSESESSSSDLSSSDSSDSESEMFPKFTEVKPNDSPSKENVKKMKNECIPPEGRTGVTQIGYCVQDTTSANTTLVHQTTPSHVMPPNHHQLAFNYQELEHLQTVKNISPLQILPPSGDSEQLSNGITVMHPSGDSDTTMLESECQAPVQKDIKIKNADSWKSLGKPVKPSGVMKSSDELFNQFRKAAIEKEVKARTQELIRKHLEQNTKELKASQENQRDLGNGLTVESFSNKIQNKCSGEEQKEHQQSSEAQDKSKLWLLKDRDLARQKEQERRRREAMVGTIDMTLQSDIMTMFENNFD

SEQ ID NO: 12707 - protein, 654 aa, Homo sapiens
MKLSLVAAMLLLLSAARAEEEDKKEDVGTVVGIDLGTTYSCVGVFKNGRVEIIANDQGNRITPSYVAFTPEGERLIGDAAKNQLTSNPENTVFDAKRLIGRTWNDPSVQQDIKFLPFKVVEKKTKPYIQVDIGGGQTKTFAPEEISAMVLTKMKETAEAYLGKKVTHAVVTVPAYFNDAQRQATKDAGTIAGLNVMRIINEPTAAAIAYGLDKREGEKNILVFDLGGGTFDVSLLTIDNGVFEVVATNGDTHLGGEDFDQRVMEHFIKLYKKKTGKDVRKDNRAVQKLRREVEKAKRALSSQHQARIEIESFYEGEDFSETLTRAKFEELNMDLFRSTMKPVQKVLEDSDLKKSDIDEIVLVGGSTRIPKIQQLVKEFFNGKEPSRGINPDEAVAYGAAVQAGVLSGDQDTGDLVLLDVCPLTLGIETVGGVMTKLIPRNTVVPTKKSQIFSTASDNQPTVTIKVYEGERPLTKDNHLLGTFDLTGIPPAPRGVPQIEVTFEIDVNGILRVTAEDKGTGNKNKITITNDQNRLTPEEIERMVNDAEKFAEEDKKLKERIDTRNELESYAYSLKNQIGDKEKLGGKLSSEDKETMEKAVEEKIEWLESHQDADIEDFKAKKKELEEIVQPIISKLYGSAGPPPTGEEDTAEKDEL

SEQ ID NO: 12708 - protein, 399 aa, Homo sapiens
MAQRQPHSPNQTLISITNDTESSSSVVSNDNTNKGWSGDNSPGIEALCAIYITYAVIISVGILGNAILIKVFFKTKSMQTVPNIFITSLAFGDLLLLLTCVPVDATHYLAEGWLFGRIGCKVLSFIRLTSVGVSVFTLTILSADRYKAVVKPLERQPSNAILKTCVKAGCVWIVSMIFALPEAIFSNVYTFRDPNKNMTFESCTSYPVSKKLLQEIHSLLCFLVFYIIPLSIISVYYSLIARTLYKSTLNIPTEEQSHARKQIESRKRIARTVLVLVALFALCWLPNHLLYLYHSFTSQTYVDPSAMHFIFTIFSRVLAFSNSCVNPFALYWLSKSFQKHFKAQLFCCKAERPEPPVADTSLTTLAVMGTVPGTGSIQMSEISVTSFTGCSVKQAEDRF

SEQ ID NO: 12709 - protein, 1132 aa, Homo sapiens
MEPNDSTSTAVEEPDSLEVLVKTLDSQTRTFIVGAQMNVKEFKEHIAASVSIPSEKQRLIYQGRVLQDDKKLQEYNVGGKVIHLVERAPPQTHLPSGASSGTGSASATHGGGSPPGTRGPGASVHDRNANSYVMVGTFNLPSDGSAVDVHINMEQAPIQSEPRVRLVMAQHMIRDIQTLLSRMETLPYLQCRGGPQPQHSQPPPQPPAVTPEPVALSSQTSEPVESEAPPREPMEAEEVEERAPAQNPELTPGPAPAGPTPAPETNAPNHPSPAEYVEVLQELQRLESRLQPFLQRYYEVLGAAATTDYNNNHEGREEDQRLINLVGESLRLLGNTFVALSDLRCNLACTPPRHLHVVRPMSHYTTPMVLQQAAIPIQINVGTTVTMTGNGTRPPPTPNAEAPPPGPGQASSVAPSSTNVESSAEGAPPPGPAPPPATSHPRVIRISHQSVEPVVMMHMNIQDSGTQPGGVPSAPTGPLGPPGHGQTLGQQVPGFPTAPTRVVIARPTPPQARPSHPGGPPVSGTLQGAGLGTNASLAQMVSGLVGQLLMQPVLVAQGTPGMAPPPAPATASASAGTTNTATTAGPAPGGPAQPPPTPQPSMADLQFSQLLGNLLGPAGPGAGGSGVASPTITVAMPGVPAFLQGMTDFLQATQTAPPPPPPPPPPPPAPEQQTMPPPGSPSGGAGSPGGLGLESLSPEFFTSVVQGVLSSLLGSLGARAGSSESIAAFIQRLSGSSNIFEPGADGALGFFGALLSLLCQNFSMVDVVMLLHGHFQPLQRLQPQLRSFFHQHYLGGQEPTPSNIRMATHTLITGLEEYVRESFSLVQVQPGVDIIRTNLEFLQEQFNSIAAHVLHCTDSGFGARLLELCNQGLFECLALNLHCLGGQQMELAAVINGRIRRMSRGVNPSLVSWLTTMMGLRLQVVLEHMPVGPDAILRYVRRVGDPPQPLPEEPMEVQGAERASPEPQRENASPAPGTTAEEAMSRGPPPAPEGGSRDEQDGASAETEPWAAAVPPEWVPIIQQDIQSQRKVKPQPPLSDAYLSGMPAKRRKTMQGEGPQLLLSEAVSRAAKAAGARPLTSPESLSRDLEAPEVQESYRQQLRSDIQKRLQEDPNYSPQRFPNAQRAFADDP

SEQ ID NO: 12710 - protein, 1126 aa, Homo sapiens
MEPNDSTSTAVEEPDSLEVLVKTLDSQTRTFIVGAQMNVKEFKEHIAASVSIPSEKQRLIYQGRVLQDDKKLQEYNVGGKVIHLVERAPPQTHLPSGASSGTGSASATHGGGSPPGTRGPGASVHDRNANSYVMVGTFNLPSDGSAVDVHINMEQAPIQSEPRVRLVMAQHMIRDIQTLLSRMECRGGPQPQHSQPPPQPPAVTPEPVALSSQTSEPVESEAPPREPMEAEEVEERAPAQNPELTPGPAPAGPTPAPETNAPNHPSPAEYVEVLQELQRLESRLQPFLQRYYEVLGAAATTDYNNNHEGREEDQRLINLVGESLRLLGNTFVALSDLRCNLACTPPRHLHVVRPMSHYTTPMVLQQAAIPIQINVGTTVTMTGNGTRPPPTPNAEAPPPGPGQASSVAPSSTNVESSAEGAPPPGPAPPPATSHPRVIRISHQSVEPVVMMHMNIQDSGTQPGGVPSAPTGPLGPPGHGQTLGQQVPGFPTAPTRVVIARPTPPQARPSHPGGPPVSGTLQGAGLGTNASLAQMVSGLVGQLLMQPVLVAQGTPGMAPPPAPATASASAGTTNTATTAGPAPGGPAQPPPTPQPSMADLQFSQLLGNLLGPAGPGAGGSGVASPTITVAMPGVPAFLQGMTDFLQATQTAPPPPPPPPPPPPAPEQQTMPPPGSPSGGAGSPGGLGLESLSPEFFTSVVQGVLSSLLGSLGARAGSSESIAAFIQRLSGSSNIFEPGADGALGFFGALLSLLCQNFSMVDVVMLLHGHFQPLQRLQPQLRSFFHQHYLGGQEPTPSNIRMATHTLITGLEEYVRESFSLVQVQPGVDIIRTNLEFLQEQFNSIAAHVLHCTDSGFGARLLELCNQGLFECLALNLHCLGGQQMELAAVINGRIRRMSRGVNPSLVSWLTTMMGLRLQVVLEHMPVGPDAILRYVRRVGDPPQPLPEEPMEVQGAERASPEPQRENASPAPGTTAEEAMSRGPPPAPEGGSRDEQDGASAETEPWAAAVPPEWVPIIQQDIQSQRKVKPQPPLSDAYLSGMPAKRRKTMQGEGPQLLLSEAVSRAAKAAGARPLTSPESLSRDLEAPEVQESYRQQLRSDIQKRLQEDPNYSPQRFPNAQRAFADDP

SEQ ID NO: 12711 - protein, 1162 aa, Homo sapiens
MEPNDSTSTAVEEPDSLEVLVKTLDSQTRTFIVGAQMNVKEFKEHIAASVSIPSEKQRLIYQGRVLQDDKKLQEYNVGGKVIHLVERAPPQTHLPSGASSGTGSASATHGGGSPPGTRGPGASVHDRNANSYVMVGTFNLPSDGSAVDVHINMEQAPIQSEPRVRLVMAQHMIRDIQTLLSRMECRGGPQPQHSQPPPQPPAVTPEPVALSSQTSEPVESEAPPREPMEAEEVEERAPAQNPELTPGPAPAGPTPAPETNAPNHPSPAEYVEVLQELQRLESRLQPFLQRYYEVLGAAATTDYNNNHEGREEDQRLINLVGESLRLLGNTFVALSDLRCNLACTPPRHLHVVRPMSHYTTPMVLQQAAIPIQINVGTTVTMTGNGTRPPPTPNAEAPPPGPGQASSVAPSSTNVESSAEGAPPPGPAPPPATSHPRVIRISHQSVEPVVMMHMNIQDSGTQPGGVPSAPTGPLGPPGHGQTLGSTLIQLPSLPPEFMHAVAHQITHQAMVAAVASAAAGQQVPGFPTAPTRVVIARPTPPQARPSHPGGPPVSGTLQGAGLGTNASLAQMVSGLVGQLLMQPVLVAQGTPGMAPPPAPATASASAGTTNTATTAGPAPGGPAQPPPTPQPSMADLQFSQLLGNLLGPAGPGAGGSGVASPTITVAMPGVPAFLQGMTDFLQATQTAPPPPPPPPPPPPAPEQQTMPPPGSPSGGAGSPGGLGLESLSPEFFTSVVQGVLSSLLGSLGARAGSSESIAAFIQRLSGSSNIFEPGADGALGFFGALLSLLCQNFSMVDVVMLLHGHFQPLQRLQPQLRSFFHQHYLGGQEPTPSNIRMATHTLITGLEEYVRESFSLVQVQPGVDIIRTNLEFLQEQFNSIAAHVLHCTDSGFGARLLELCNQGLFECLALNLHCLGGQQMELAAVINGRIRRMSRGVNPSLVSWLTTMMGLRLQVVLEHMPVGPDAILRYVRRVGDPPQPLPEEPMEVQGAERASPEPQRENASPAPGTTAEEAMSRGPPPAPEGGSRDEQDGASAETEPWAAAVPPEWVPIIQQDIQSQRKVKPQPPLSDAYLSGMPAKRRKTMQGEGPQLLLSEAVSRAAKAAGARPLTSPESLSRDLEAPEVQESYRQQLRSDIQKRLQEDPNYSPQRFPNAQRAFADDP

SEQ ID NO: 12712 - protein, 903 aa, Homo sapiens
MEPNDSTSTAVEEPDSLEVLVKTLDSQTRTFIVGAQMNVKEFKEHIAASVSIPSEKQRLIYQGRVLQDDKKLQEYNVGGKVIHLVERAPPQTHLPSGASSGTGSASATHGGGSPPGTRGPGASVHDRNANSYVMVGTFNLPSDGSAVDVHINMEQAPIQSEPRVRLVMAQHMIRDIQTLLSRMECRGGPQPQHSQPPPQPPAVTPEPVALSSQTSEPVESEAPPREPMEAEEVEERAPAQNPELTPGPAPAGPTPAPETNAPNHPSPAEYVEVLQELQRLESRLQPFLQRYYEVLGAAATTDYNNNHEGREEDQRLINLVGESLRLLGNTFVALSDLRCNLACTPPRHLHVVRPMSHYTTPMVLQQAAIPIQINVGTTVTMTGNGTRPPPTPNAEAPPPGPGQASSVAPSSTNVESSAEGAPPPGPAPPPATSHPRVIRISHQSVEPVVMMHMNIQDSGTQPGGVPSAPTGPLGPPGHGQTLGQQVPGFPTAPTRVVIARPTPPQARPSHPGGPPVSGTLGAGLGTNASLAQMVSGLVGQLLMQPVLVAQGTPGSPGGLGLESLSPEFFTSVVQGVLSSLLGSLGARAGSSESIAAFIQRLSGSSNIFEPGADGALGFFGALLSLLCQNFSMVDVVMLLHGHFQPLQRLQPQLRSFFHQHYLGGQEPTPSNIRMATHTLITGLEEYVRESFSLVQVQPGVDIIRTNLEFLQEQFNSIAAHVLHCTDSGFGARLLELCNQGLFECLALNLHCLGGQQMELAAVINGRIRRMSRGVNPSLVSWLTTMMGLRLQVVLEHMPVGPDAILRYVRRVGDPPQPLPEEPMEVQGAERASPEPQEWVPIIQQDIQSQRKVKPQPPLSDAYLSGMPAKRRKLRSDIQKRLQEDPNYSPQRFPNAQRAFADDP

SEQ ID NO: 12713 - protein, 1077 aa, Homo sapiens
MEPNDSTSTAVEEPDSLEVLVKTLDSQTRTFIVGAQMNVKEFKEHIAASVSIPSEKQRLIYQGRVLQDDKKLQEYNVGGKVIHLVERAPPQTHLPSGASSGTGSASATHGGGSPPGTRGPGASVHDRNANSYVMVGTFNLPSDGSAVDVHINMEQAPIQSEPRVRLVMAQHMIRDIQTLLSRMECRGGPQPQHSQPPPQPPAVTPEPVALSSQTSEPVESEAPPREPMEAEEVEERAPAQNPELTPGPAPAGPTPAPETNAPNHPSPAEYVEVLQELQRLESRLQPFLQRYYEVLGAAATTDYNNNHEGREEDQRLINLVGESLRLLGNTFVALSDLRCNLACTPPRHLHVVRPMSHYTTPMVLQQAAIPIQINVGTTVTMTGNGTRPPPTPNAEAPPPGPGQASSVAPSSTNVESSAEGAPPPGPAPPPATSHPRVIRISHQSVEPVVMMHMNIQDSGTQPGGVPSAPTGPLGPPGHGQTLGQQVPGFPTAPTRVVIARPTPPQARPSHPGGPPVSGTLQGAGLGTNASLAQMVSGLVGQLLMQPVLVAQGTPGMAPPPAPATASASAGTTNTATTAGPAPGGPAQPPPTPQPSMADLQFSQLLGNLLGPAGPGAGGSGVASPTITVAMPGVPAFLQGMTDFLQATQTAPPPPPPPPPPPPAPEQQTMPPPGSPSGGAGSPGGLGLESLSPEFFTSVVQGVLSSLLGSLGARAGSSESIAAFIQRLSGSSNIFEPGADGALGFFGALLSLLCQNFSMVDVVMLLHGHFQPLQRLQPQLRSFFHQHYLGGQEPTPSNIRMATHTLITGLEEYVRESFSLVQVQPGVDIIRTNLEFLQEQFNSIAAHVLHCTDSGFGARLLELCNQGLFECLALNLHCLGGQQMELAAVINGRIRRMSRGVNPSLVSWLTTMMGLRLQVVLEHMPVGPDAILRYVRRVGDPPQPLPEEPMEVQGAERASPEPQRENASPAPGTTAEEAMSRGPPPAPEGGSRDEQDGASAETEPWAAAVPPEWVPIIQQDIQSQRKVKPQPPLSDAYLSGMPAKRRKLRSDIQKRLQEDPNYSPQRFPNAQRAFADDP

SEQ ID NO: 12714 - protein, 313 aa, Homo sapiens
MEEMSGESVVSSAVPAAATRTTSFKGTSPSSKYVKLNVGGALYYTTMQTLTKQDTMLKAMFSGRMEVLTDSEGWILIDRCGKHFGTILNYLRDGAVPLPESRREIEELLAEAKYYLVQGLVEECQAALQNKDTYEPFCKVPVITSSKEEQKLIATSNKPAVKLLYNRSNNKYSYTSNSDDNMLKNIELFDKLSLRFNGRVLFIKDVIGDEICCWSFYGQGRKIAEVCCTSIVYATEKKQTKVEFPEARIYEETLNILLYEAQDGRGPDNALLEATGGAAGRSHHLDEDEERERIERVRRIHIKRPDDRAHLHQ

SEQ ID NO: 12715 - protein, 290 aa, Homo sapiens
MEEMSGESVVSSAVPAAATRTTSFKGTSPSSKYVKLNVGGALYYTTMQTLTKQDTMLKAMFSGRMEVLTDSEGWILIDRCGKHFGTILNYLRDGAVPLPESRREIEELLAEAKYYLVQGLVEECQAALQNKDTYEPFCKVPVITSSKEEQKLIATSNKPAVKLLYNRSNNKYSYTRVLFIKDVIGDEICCWSFYGQGRKIAEVCCTSIVYATEKKQTKVEFPEARIYEETLNILLYEAQDGRGPDNALLEATGGAAGRSHHLDEDEERERIERVRRIHIKRPDDRAHLHQ

SEQ ID NO: 12716 - protein, 155 aa, Homo sapiens
MMAVFTSLWSPYQMLFCSNSDDNMLKNIELFDKLSLRFNGRVLFIKDVIGDEICCWSFYGQGRKIAEVCCTSIVYATEKKQTKVEFPEARIYEETLNILLYEAQDGRGPDNALLEATGGAAGRSHHLDEDEERERIERVRRIHIKRPDDRAHLHQ

SEQ ID NO: 12717 - protein, 547 aa, Homo sapiens
MAGTKNKTRAQAKTEKKAAIQAKAGAEREATGVVRPVAKTRAKAKAKTGSKTDAVAEMKAVSKNKVVAETKEGALSEPKTLGKAMGDFTPKAGNESTSSTCKNEAGTDAWFWAGEEATINSWFWNGEEAGNSFSTKNDKPEIGAQVCAEELEPAAGADCKPRSGAEEEEEENVIGNWFWEGDDTSFDPNPKPVSRIVKPQPVYEINEKNRPKDWSEVTIWPNAPAVTPAVLGFRSQAPSEASPPSYIVLASAEENACSLPVATACRPSRNTRSCSQPIPECRFDSDPCIQTIDEIRRQIRIREVNGIKPFACPCKMECYMDSEEFEKLVSLLKSTTDPLIHKIARIAMGVHNVHPFAQEFINEVGVVTLIESLLSFPSPEMRKKTVITLNPPSGDERQRKIELHVKHMCKETMSFPLNSPGQQSGLKILGQLTTDFVHHYIVANYFSELFHLLSSGNCKTRNLVLKLLLNMSENPTAARDMINMKALAALKLIFNQKEAKANLVSGVAIFINIKEHIRKGSIVVVDHLSYNTLMAIFREVKEIIETM

SEQ ID NO: 12718 - protein, 142 aa, Homo sapiens
MTVGARLRSKAESSLLRRGPRGRGRTEGDEEAAAILEHLEYADEAEAAAESGTSAADERGPGTRGARRVHFALLPERYEPLEEPAPSEQPRKRYRRKLKKYGKNVGKVIIKGCRYVVIGLQGFAAAYSAPFAVATSVVSFVR

SEQ ID NO: 12719 - protein, 181 aa, Homo sapiens
MGLQQEISLQPWCHHPAESCQTTTDMTERLSAEQIKEYKGVFEMFDEEGNGEVKTGELEWLMSLLGINPTKSELASMAKDVDRDNKGFFNCDGFLALMGVYHEKAQNQESELRAAFRVFDKEGKGYIDWNTLKYVLMNAGEPLNEVEAEQMMKEADKDGDRTIDYEEFVAMMTGESFKLIQ

SEQ ID NO: 12720 - protein, 417 aa, Homo sapiens
MLLSVPLLLGLLGLAVAEPAVYFKEQFLDGDGWTSRWIESKHKSDFGKFVLSSGKFYGDEEKDKGLQTSQDARFYALSASFEPFSNKGQTLVVQFTVKHEQNIDCGGGYVKLFPNSLDQTDMHGDSEYNIMFGPDICGPGTKKVHVIFNYKGKNVLINKDIRCKDDEFTHLYTLIVRPDNTYEVKIDNSQVESGSLEDDWDFLPPKKIKDPDASKPEDWDERAKIDDPTDSKPEDWDKPEHIPDPDAKKPEDWDEEMDGEWEPPVIQNPEYKGEWKPRQIDNPDYKGTWIHPEIDNPEYSPDPSIYAYDNFGVLGLDLWQVKSGTIFDNFLITNDEAYAEEFGNETWGVTKAAEKQMKDKQDEEQRLKEEEEDKKRKEEEEAEDKEDDEDKDEDEEDEEDKEEDEEEDVPGQAKDEL

SEQ ID NO: 12721 - protein, 1150 aa, Homo sapiens
MAVPARTCGASRPGPARTARPWPGCGPHPGPGTRRPTSGPPRPLWLLLPLLPLLAAPGASAYSFPQQHTMQHWARRLEQEVDGVMRIFGGVQQLREIYKDNRNLFEVQENEPQKLVEKVAGDIESLLDRKVQALKRLADAAENFQKAHRWQDNIKEEDIVYYDAKADAELDDPESEDVERGSKASTLRLDFIEDPNFKNKVNYSYAAVQIPTDIYKGSTVILNELNWTEALENVFMENRRQDPTLLWQVFGSATGVTRYYPATPWRAPKKIDLYDVRRRPWYIQGASSPKDMVIIVDVSGSVSGLTLKLMKTSVCEMLDTLSDDDYVNVASFNEKAQPVSCFTHLVQANVRNKKVFKEAVQGMVAKGTTGYKAGFEYAFDQLQNSNITRANCNKMIMMFTDGGEDRVQDVFEKYNWPNRTVRVFTFSVGQHNYDVTPLQWMACANKGYYFEIPSIGAIRINTQEYLDVLGRPMVLAGKEAKQVQWTNVYEDALGLGLVVTGTLPVFNLTQDGPGEKKNQLILGVMGIDVALNDIKRLTPNYTLGANGYVFAIDLNGYVLLHPNLKPQTTNFREPVTLDFLDAELEDENKEEIRRSMIDGNKGHKQIRTLVKSLDERYIDEVTRNYTWVPIRSTNYSLGLVLPPYSTFYLQANLSDQILQVKLPISKLKDFEFLLPSSFESEGHVFIAPREYCKDLNASDNNTEFLKNFIELMEKVTPDSKQCNNFLLHNLILDTGITQQLVERVWRDQDLNTYSLLAVFAATDGGITRVFPNKAAEDWTENPEPFNASFYRRSLDNHGYVFKPPHQDALLRPLELENDTVGILVSTAVELSLGRRTLRPAVVGVKLDLEAWAEKFKVLASNRTHQDQPQKCGPNSHCEMDCEVNNEDLLCVLIDDGGFLVLSNQNHQWDQVGRFFSEVDANLMLALYNNSFYTRKESYDYQAACAPQPPGNLGAAPRGVFVPTVADFLNLAWWTSAAAWSLFQQLLYGLIYHSWFQADPAEAEGSPETRESSCVMKQTQYYFGSVNASYNAIIDCGNCSRLFHAQRLTNTNLLFVVAEKPLCSQCEAGRLLQKETHSDGPEQCELVQRPRYRRGPHICFDYNATEDTSDCGRGASFPPSLGVLVSLQLLLLLGLPPRPQPQVLVHASRRL

SEQ ID NO: 12722 - protein, 1143 aa, Homo sapiens
MAVPARTCGASRPGPARTARPWPGCGPHPGPGTRRPTSGPPRPLWLLLPLLPLLAAPGASAYSFPQQHTMQHWARRLEQEVDGVMRIFGGVQQLREIYKDNRNLFEVQENEPQKLVEKVAGDIESLLDRKVQALKRLADAAENFQKAHRWQDNIKEEDIVYYDAKADAELDDPESEDVERGSKASTLRLDFIEDPNFKNKVNYSYAAVQIPTDIYKGSTVILNELNWTEALENVFMENRRQDPTLLWQVFGSATGVTRYYPATPWRAPKKIDLYDVRRRPWYIQGASSPKDMVIIVDVSGSVSGLTLKLMKTSVCEMLDTLSDDDYVNVASFNEKAQPVSCFTHLVQANVRNKKVFKEAVQGMVAKGTTGYKAGFEYAFDQLQNSNITRANCNKMIMMFTDGGEDRVQDVFEKYNWPNRTVRVFTFSVGQHNYDVTPLQWMACANKGYYFEIPSIGAIRINTQEYLDVLGRPMVLAGKEAKQVQWTNVYEDALGLGLVVTGTLPVFNLTQDGPGEKKNQLILGVMGIDVALNDIKRLTPNYTLGANGYVFAIDLNGYVLLHPNLKPQTTNFREPVTLDFLDAELEDENKEEIRRSMIDGNKGHKQIRTLVKSLDERYIDEVTRNYTWVPIRSTNYSLGLVLPPYSTFYLQANLSDQILQVKYFEFLLPSSFESEGHVFIAPREYCKDLNASDNNTEFLKNFIELMEKVTPDSKQCNNFLLHNLILDTGITQQLVERVWRDQDLNTYSLLAVFAATDGGITRVFPNKAAEDWTENPEPFNASFYRRSLDNHGYVFKPPHQDALLRPLELENDTVGILVSTAVELSLGRRTLRPAVVGVKLDLEAWAEKFKVLASNRTHQDQPQKCGPNSHCEMDCEVNNEDLLCVLIDDGGFLVLSNQNHQWDQVGRFFSEVDANLMLALYNNSFYTRKESYDYQAACAPQPPGNLGAAPRGVFVPTVADFLNLAWWTSAAAWSLFQQLLYGLIYHSWFQADPAEAEGSPETRESSCVMKQTQYYFGSVNASYNAIIDCGNCSRLFHAQRLTNTNLLFVVAEKPLCSQCEAGRLLQKETHSDGPEQCELVQRPRYRRGPHICFDYNATEDTSDCGRGASFPPSLGVLVSLQLLLLLGLPPRPQPQVLVHASRRL

SEQ ID NO: 12723 - protein, 1145 aa, Homo sapiens
MAVPARTCGASRPGPARTARPWPGCGPHPGPGTRRPTSGPPRPLWLLLPLLPLLAAPGASAYSFPQQHTMQHWARRLEQEVDGVMRIFGGVQQLREIYKDNRNLFEVQENEPQKLVEKVAGDIESLLDRKVQALKRLADAAENFQKAHRWQDNIKEEDIVYYDAKADAELDDPESEDVERGSKASTLRLDFIEDPNFKNKVNYSYAAVQIPTDIYKGSTVILNELNWTEALENVFMENRRQDPTLLWQVFGSATGVTRYYPATPWRAPKKIDLYDVRRRPWYIQGASSPKDMVIIVDVSGSVSGLTLKLMKTSVCEMLDTLSDDDYVNVASFNEKAQPVSCFTHLVQANVRNKKVFKEAVQGMVAKGTTGYKAGFEYAFDQLQNSNITRANCNKMIMMFTDGGEDRVQDVFEKYNWPNRTVRVFTFSVGQHNYDVTPLQWMACANKGYYFEIPSIGAIRINTQEYLDVLGRPMVLAGKEAKQVQWTNVYEDALGLGLVVTGTLPVFNLTQDGPGEKKNQLILGVMGIDVALNDIKRLTPNYTLGANGYVFAIDLNGYVLLHPNLKPQTTNFREPVTLDFLDAELEDENKEEIRRSMIDGNKGHKQIRTLVKSLDERYIDEVTRNYTWVPIRSTNYSLGLVLPPYSTFYLQANLSDQILQVKYFEFLLPSSFESEGHVFIAPREYCKDLNASDNNTEFLKNFIELMEKVTPDSKQCNNFLLHNLILDTGITQQLVERVWRDQDLNTYSLLAVFAATDGGITRVFPNKAAEDWTENPEPFNASFYRRSLDNHGYVFKPPHQDALLRPLELENDTVGILVSTAVELSLGRRTLRPAVVGVKLDLEAWAEKFKVLASNRTHQDQPQKCGPNSHCEMDCEVNNEDLLCVLIDDGGFLVLSNQNHQWDQVGRFFSEVDANLMLALYNNSFYTRKESYDYQAACAPQPPGNLGAAPRGVFVPTVADFLNLAWWTSAAAWSLFQQLLYGLIYHSWFQADPAEAEGSPETRESSCVMKQTQYYFGSVNASYNAIIDCGNCSRLFHAQRLTNTNLLFVVAEKPLCSQCEAGRLLQKETHCPADGPEQCELVQRPRYRRGPHICFDYNATEDTSDCGRGASFPPSLGVLVSLQLLLLLGLPPRPQPQVLVHASRRL

SEQ ID NO: 12724 - protein, 1076 aa, Homo sapiens
MQHWARRLEQEVDGVMRIFGGVQQLREIYKDNRNLFEVQENEPQKLVEKVAGDIESLLDRKVQALKRLADAAENFQKAHRWQDNIKEEDIVYYDAKADAELDDPESEDVERGSKASTLRLDFIEDPNFKNKVNYSYAAVQIPTDIYKGSTVILNELNWTEALENVFMENRRQDPTLLWQVFGSATGVTRYYPATPWRAPKKIDLYDVRRRPWYIQGASSPKDMVIIVDVSGSVSGLTLKLMKTSVCEMLDTLSDDDYVNVASFNEKAQPVSCFTHLVQANVRNKKVFKEAVQGMVAKGTTGYKAGFEYAFDQLQNSNITRANCNKMIMMFTDGGEDRVQDVFEKYNWPNRTVRVFTFSVGQHNYDVTPLQWMACANKGYYFEIPSIGAIRINTQEYLDVLGRPMVLAGKEAKQVQWTNVYEDALGLGLVVTGTLPVFNLTQDGPGEKKNQLILGVMGIDVALNDIKRLTPNYTLGANGYVFAIDLNGYVLLHPNLKPQTTNFREPVTLDFLDAELEDENKEEIRRSMIDGNKGHKQIRTLVKSLDERYIDEVTRNYTWVPIRSTNYSLGLVLPPYSTFYLQANLSDQILQVKYFEFLLPSSFESEGHVFIAPREYCKDLNASDNNTEFLKNFIELMEKVTPDSKQCNNFLLHNLILDTGITQQLVERVWRDQDLNTYSLLAVFAATDGGITRVFPNKAAEDWTENPEPFNASFYRRSLDNHGYVFKPPHQDALLRPLELENDTVGILVSTAVELSLGRRTLRPAVVGVKLDLEAWAEKFKVLASNRTHQDQPQKCGPNSHCEMDCEVNNEDLLCVLIDDGGFLVLSNQNHQWDQVGRFFSEVDANLMLALYNNSFYTRKESYDYQAACAPQPPGNLGAAPRGVFVPTVADFLNLAWWTSAAAWSLFQQLLYGLIYHSWFQADPAEAEGSPETRESSCVMKQTQYYFGSVNASYNAIIDCGNCSRLFHAQRLTNTNLLFVVAEKPLCSQCEAGRLLQKETHCPADGPEQCELVQRPRYRRGPHICFDYNATEDTSDCGRGASFPPSLGVLVSLQLLLLLGLPPRPQPQVLVHASRRL

SEQ ID NO: 12725 - protein, 1152 aa, Homo sapiens
MAVPARTCGASRPGPARTARPWPGCGPHPGPGTRRPTSGPPRPLWLLLPLLPLLAAPGASAYSFPQQHTMQHWARRLEQEVDGVMRIFGGVQQLREIYKDNRNLFEVQENEPQKLVEKVAGDIESLLDRKVQALKRLADAAENFQKAHRWQDNIKEEDIVYYDAKADAELDDPESEDVERGSKASTLRLDFIEDPNFKNKVNYSYAAVQIPTDIYKGSTVILNELNWTEALENVFMENRRQDPTLLWQVFGSATGVTRYYPATPWRAPKKIDLYDVRRRPWYIQGASSPKDMVIIVDVSGSVSGLTLKLMKTSVCEMLDTLSDDDYVNVASFNEKAQPVSCFTHLVQANVRNKKVFKEAVQGMVAKGTTGYKAGFEYAFDQLQNSNITRANCNKMIMMFTDGGEDRVQDVFEKYNWPNRTVRVFTFSVGQHNYDVTPLQWMACANKGYYFEIPSIGAIRINTQEYLDVLGRPMVLAGKEAKQVQWTNVYEDALGLGLVVTGTLPVFNLTQDGPGEKKNQLILGVMGIDVALNDIKRLTPNYTLGANGYVFAIDLNGYVLLHPNLKPQTTNFREPVTLDFLDAELEDENKEEIRRSMIDGNKGHKQIRTLVKSLDERYIDEVTRNYTWVPIRSTNYSLGLVLPPYSTFYLQANLSDQILQVKLPISKLKDFEFLLPSSFESEGHVFIAPREYCKDLNASDNNTEFLKNFIELMEKVTPDSKQCNNFLLHNLILDTGITQQLVERVWRDQDLNTYSLLAVFAATDGGITRVFPNKAAEDWTENPEPFNASFYRRSLDNHGYVFKPPHQDALLRPLELENDTVGILVSTAVELSLGRRTLRPAVVGVKLDLEAWAEKFKVLASNRTHQDQPQKCGPNSHCEMDCEVNNEDLLCVLIDDGGFLVLSNQNHQWDQVGRFFSEVDANLMLALYNNSFYTRKESYDYQAACAPQPPGNLGAAPRGVFVPTVADFLNLAWWTSAAAWSLFQQLLYGLIYHSWFQADPAEAEGSPETRESSCVMKQTQYYFGSVNASYNAIIDCGNCSRLFHAQRLTNTNLLFVVAEKPLCSQCEAGRLLQKETHCPADGPEQCELVQRPRYRRGPHICFDYNATEDTSDCGRGASFPPSLGVLVSLQLLLLLGLPPRPQPQVLVHASRRL

SEQ ID NO: 12726 - protein, 598 aa, Homo sapiens
MRGGGGCVLALGGQRGFQKERRRMASGNGLPSSSALVAKGPCALGPFPRYIWIHQDTPQDSLDKTCHEIWKRVQGLPEASQPWTSMEQLSVPVVGTLRGNELSFQEEALELSSGKDEISLLVEQEFLSLTKEHSILVEESSGELEVPGSSPEGTRELAPCILAPPLVAGSNERPRASIIVGDKLLKQKVAMPVISSRQDCDSATSTVTDILCAAEVKSSKGTEDRGRILGDSNLQVSKLLSQFPLKSTETSKVPDNKNVLDKTRVTKDFLQDNLFSGPGPKEPTGLSPFLLLPPRPPPARPDKLPELPAQKRQLPVFAKICSKPKADPAVERHHLMEWSPGTKEPKKGQGSLFLSQWPQSQKDACGEEGCCDAVGTASLTLPPKKPTCPAEKNLLYEFLGATKNPSGQPRLRNKVEVDGPELKFNAPVTVADKNNPKYTGNVFTPHFPTAMTSATLNQPLWLNLNYPPPPVFTNHSTFLQYQGLYPQQAARMPYQQALHPQLGCYSQQVMPYNPQQMGQQIFRSSYTPLLSYIPFVQPNYPYPQRTPPKMSANPRDPPLMAGDGPQYLFPQGYGFGSTSGGPLMHSPYFSSSGNGINF

SEQ ID NO: 12727 - protein, 408 aa, Homo sapiens
MPVISSRQDCDSATSTVTDILCAAEVKSSKGTEDRGRILGDSNLQVSKLLSQFPLKSTETSKVPDNKNVLDKTRVTKDFLQDNLFSGPGPKEPTGLSPFLLLPPRPPPARPDKLPELPAQKRQLPVFAKICSKPKADPAVERHHLMEWSPGTKEPKKGQGSLFLSQWPQSQKDACGEEGCCDAVGTASLTLPPKKPTCPAEKNLLYEFLGATKNPSGQPRLRNKVEVDGPELKFNAPVTVADKNNPKYTGNVFTPHFPTAMTSATLNQPLWLNLNYPPPPVFTNHSTFLQYQGLYPQQAARMPYQQALHPQLGCYSQQVMPYNPQQMGQQIFRSSYTPLLSYIPFVQPNYPYPQRTPPKMSANPRDPPLMAGDGPQYLFPQGYGFGSTSGGPLMHSPYFSSSGNGINF

SEQ ID NO: 12728 - protein, 458 aa, Homo sapiens
MAWASRLGLLLALLLPVVGASTPGTVVRLNKAALSYVSEIGKAPLQRALQVTVPHFLDWSGEALQPTRIRILNVHVPRLHLKFIAGFGVRLLAAANFTFKVFRAPEPLELTLPVELLADTRVTQSSIRTPVVSISACSLFSGHANEFDGSNSTSHALLVLVQKHIKAVLSNKLCLSISNLVQGVNVHLGTLIGLNPVGPESQIRYSMVSVPTVTSDYISLEVNAVLFLLGKPIILPTDATPFVLPRHVGTEGSMATVGLSQQLFDSALLLLQKAGALNLDITGQLRSDDNLLNTSALGRLIPEVARQFPEPMPVVLKVRLGATPVAMLHTNNATLRLQPFVEVLATASNSAFQSLFSLDVVVNLRLQLSVSKVKLQGTTSVLGDVQLTVASSNVGFIDTDQVRTLMGTVFEKPLLDHLNALLAMGIALPGVVNLHYVAPEIFVYEGYVVISSGLFYQS

SEQ ID NO: 12729 - protein, 110 aa, Homo sapiens
MADKVLKEKRKQFIRSVGEGTINGLLGELLETRVLSQEEIEIVKCENATVMDKARALLDSVIRKGAPACQICITYICEEDSHLAGTLGLSAGPTSGNHLTTQDSQIVLPS

SEQ ID NO: 12730 - protein, 1236 aa, Homo sapiens
MSTAAFHISSLLEKMTSSDKDFRFMATSDLMSELQKDSIQLDEDSERKVVKMLLRLLEDKNGEVQNLAVKCLGPLVVKVKEYQVETIVDTLCTNMRSDKEQLRDIAGIGLKTVLSELPPAATGSGLATNVCRKITGQLTSAIAQQEDVAVQLEALDILSDMLSRLGVPLGAFHASLLHCLLPQLSSPRLAVRKRAVGALGHLAAACSTDLFVELADHLLDRLPGPRVPTSPTAIRTLIQCLGSVGRQAGHRLGAHLDRLVPLVEDFCNLDDDELRESCLQAFEAFLRKCPKEMGPHVPNVTSLCLQYIKHDPNYNYDSDEDEEQMETEDSEFSEQESEDEYSDDDDMSWKVRRAAAKCIAALISSRPDLLPDFHCTLAPVLIRRFKEREENVKADVFTAYIVLLRQTQPPKGWLEAMEEPTQTGSNLHMLRGQVPLVVKALQRQLKDRSVRARQGCFSLLTELAGVLPGSLAEHMPVLVSGIIFSLADRSSSSTIRMDALAFLQGLLGTEPAEAFHPHLPILLPPVMACVADSFYKIAAEALVVLQELVRALWPLHRPRMLDPEPYVGEMSAVTLARLRATDLDQEVKERAISCMGHLVGHLGDRLGDDLEPTLLLLLDRLRNEITRLPAIKALTLVAVSPLQLDLQPILAEALHILASFLRKNQRALRLATLAALDALAQSQGLSLPPSAVQAVLAELPALVNESDMHVAQLAVDFLATVTQAQPASLVEVSGPVLSELLRLLRSPLLPAGVLAAAEGFLQALVGTRPPCVDYAKLISLLTAPVYEQAVDGGPGLHKQVFHSLARCVAALSAACPQEAASTASRLVCDARSPHSSTGVKVLAFLSLAEVGQVAGPGHQRELKAVLLEALGSPSEDVRAAASYALGRVGAGSLPDFLPFLLEQIEAEPRRQYLLLHSLREALGAAQPDSLKPYAEDIWALLFQRCEGAEEGTRGVVAECIGKLVLVNPSFLLPRLRKQLAAGRPHTRSTVITAVKFLISDQPHPIDPLLKSFIGEFMESLQDPDLNVRRATLAFFNSAVHNKPSLVRDLLDDILPLLYQETKIRRDLIREVEMGPFKHTVDDGLDVRKAAFECMYSLLESCLGQLDICEFLNHVEDGLKDHYDIRMLTFIMVARLATLCPAPVLQRVDRLIEPLRATCTAKVKAGSVKQEFEKQDELKRSAMRAVAALLTIPEVGKSPIMADFSSQIRSNPELAALFESIQKDSASAPSTDSMELS

SEQ ID NO: 12731 - protein, 1119 aa, Homo sapiens
MSTAAFHISSLLEKMTSSDKDFRFMATSDLMSELQKDSIQLDEDSERKVVKMLLRLLEDKNGEVQNLAVKWLGVPLGAFHASLLHCLLPQLSSPRLAVRKRAVGALGHLAAACSTDLFVELADHLLDRLPGPRVPTSPTAIRTLIQCLGSVGRQAGHRLGAHLDRLVPLVEDFCNLDDDELRESCLQAFEAFLRKCPKEMGPHVPNVTSLCLQYIKHDPNYNYDSDEDEEQMETEDSEFSEQESEDEYSDDDDMSWKVRRAAAKCIAALISSRPDLLPDFHCTLAPVLIRRFKEREENVKADVFTAYIVLLRQTQPPKGWLEAMEEPTQTGSNLHMLRGQVPLVVKALQRQLKDRSVRARQGCFSLLTELAGVLPGSLAEHMPVLVSGIIFSLADRSSSSTIRMDALAFLQGLLGTEPAEAFHPHLPILLPPVMACVADSFYKIAAEALVVLQELVRALWPLHRPRMLDPEPYVGEMSAVTLARLRATDLDQEVKERAISCMGHLVGHLGDRLGDDLEPTLLLLLDRLRNEITRLPAIKALTLVAVSPLQLDLQPILAEALHILASFLRKNQRALRLATLAALDALAQSQGLSLPPSAVQAVLAELPALVNESDMHVAQLAVDFLATVTQAQPASLVEVSGPVLSELLRLLRSPLLPAGVLAAAEGFLQALVGTRPPCVDYAKLISLLTAPVYEQAVDGGPGLHKQVFHSLARCVAALSAACPQEAASTASRLVCDARSPHSSTGVKVLAFLSLAEVGQVAGPGHQRELKAVLLEALGSPSEDVRAAASYALGRVGAGSLPDFLPFLLEQIEAEPRRQYLLLHSLREALGAAQPDSLKPYAEDIWALLFQRCEGAEEGTRGVVAECIGKLVLVNPSFLLPRLRKQLAAGRPHTRSTVITAVKFLISDQPHPIDPLLKSFIAVHNKPSLVRDLLDDILPLLYQETKIRRDLIREVEMGPFKHTVDDGLDVRKAAFECMYSLLESCLGQLDICEFLNHVEDGLKDHYDIRMLTFIMVARLATLCPAPVLQRVDRLIEPLRATCTAKVKAGSVKQEFEKQDELKRSAMRAVAALLTIPEVGKSPIMADFSSQIRSNPELAALFESIQKDSASAPSTDSMELS

SEQ ID NO: 12732 - protein, 278 aa, Homo sapiens
MTDLNKHIKQAQTQRKQLLEESRELHREKLLVQAENRFFLEYLTNKTEEYTEQPEKVWNSYLQKSGEIERRRQESASRYAEQISVLKTALLQKENIQSSLKRKLQAMRDIAILKEKQEKEIQTLQEETKKVQAETASKTREVQAQLLQEKRLLEKQLSEPDRRLLGKRKRRELNMKAQALKLAAKRFIFEYSCGINRENQQFKKELLQLIEQAQKLTATQSHLENRKQQLQQEQWYLESLIQARQRLQGSHNQCLNRQDVPKTTPSLPQGTKSRINPK

SEQ ID NO: 12733 - protein, 440 aa, Homo sapiens
MGSRGQGSHSKKTRSMPVILSPQRTGSGATGGPAARAYSVAEAVKQFRAGPAGTGAGCSLQGCWAAPRPFEHRTNKLRELSTLAHCSRELQTQVPDASAHSLAVTLSELHSCRDLQDECLDSRFAEGPRRLLPPYHSLINNFVKPEKLTKVETRLKEKIVAEMTDLNKHIKQAQTQRKQLLEESRELHREKLLVQAENRFFLEYLTNKTEEYTEQPEKVWNSYLQKSGEIERRRQESASRYAEQISVLKTALLQKENIQSSLKRKLQAMRDIAILKEKQEKEIQTLQEETKKVQAETASKTREVQAQLLQEKRLLEKQLSEPDRRLLGKRKRRELNMKAQALKLAAKRFIFEYSCGINRENQQFKKELLQLIEQAQKLTATQSHLENRKQQLQQEQWYLESLIQARQRLQGSHNQCLNRQDVPKTTPSLPQGTKSRINPK

SEQ ID NO: 12734 - protein, 329 aa, Homo sapiens
MEMSGLSFSEMEGCRNLLGLLDNDEIMALCDTVTNRLVQPQDRQDAVHAILAYSQSAEELLRRRKVHREVIFKYLATQGIVIPPATEKHNLIQHAKDYWQKQPQLKLKETPEPVTKTEDIHLFQQQVKEDKKAEKVDFRRLGEEFCHWFFGLLNSQNPFLGPPQDEWGPQHFWHDVKLRFYYNTSEQNVMDYHGAEIVSLRLLSLVKEEFLFLSPNLDSHGLKCASSPHGLVMVGVAGTVHRGNTCLGIFEQIFGLIRCPFVENTWKIKFINLKIMGESSLAPGTLPKPSVKFEQSDLEAFYNVITVCGTNEVRHNVKQASDSGTGDQV

SEQ ID NO: 12735 - protein, 327 aa, Homo sapiens
MSGLSFSEMEGCRNLLGLLDNDEIMALCDTVTNRLVQPQDRQDAVHAILAYSQSAEELLRRRKVHREVIFKYLATQGIVIPPATEKHNLIQHAKDYWQKQPQLKLKETPEPVTKTEDIHLFQQQVKEDKKAEKVDFRRLGEEFCHWFFGLLNSQNPFLGPPQDEWGPQHFWHDVKLRFYYNTSEQNVMDYHGAEIVSLRLLSLVKEEFLFLSPNLDSHGLKCASSPHGLVMVGVAGTVHRGNTCLGIFEQIFGLIRCPFVENTWKIKFINLKIMGESSLAPGTLPKPSVKFEQSDLEAFYNVITVCGTNEVRHNVKQASDSGTGDQV

SEQ ID NO: 12736 - protein, 346 aa, Homo sapiens
MMDKFRMIFQFLQSNQESFMNGICGIMALASAQMYSAFDFNCPCLPGYNAAYSAGILLAPPLVLFLLGLVMNNNVSMLAEEWKRPLGRRAKDPAVLRYMFCSMAQRALIAPVVWVAVTLLDGKCFLCAFCTAVPVSALGNGSLAPGLPAPELARLLARVPCPEIYDGDWLLAREVAVRYLRCISQALGWSFVLLTTLLAFVVRSVRPCFTQAAFLKSKYWSHYIDIERKLFDETCTEHAKAFAKVCIQQFFEAMNHDLELGHTHGTLATAPASAAAPTTPDGAEEEREKLRGITDQGTMNRLLTSWHKCKPPLRLGQEEPPLMGNGWAGGGPRPPRKEVATYFSKV

SEQ ID NO: 12737 - protein, 783 aa, Homo sapiens
MSQEKNEMFESEWSKEREREKQLASGLDTAEKALKVESEELQKSKSELICLYNEVHNLPGESESKDHFLIACDLLQRENSELETKVLKLSQEFAQLNHFTLGGKTAPSNLITSENTCKDPESNEPILETEIQSRKEETEELCPKLGERKQKEIPEESVKEGSFPREGQKEEGSQQNRDMKDEEKEQQLTMKPEEIVRLREELSHINQSLLQSQSSGDSSDDSGAQHPSSGEKLKYNQQGEVQQLHQNLHRLQILCNSAENELRYERGQNLDLKQHNSLLQEENIKIKIELKHAQQKLLDSTKMCSSLTAEYKHCQQKIKELELEVLKHTQSIKSQNNLQEKLVQEKSKVADAEEKILDLQRKLEHAHKVCLTDTCISEKQQLEEKIKEATQNEAKVKQQYQEEQQKRKLLYQNVDELHRQVRTLQDKENLLEMTCSQQQSRIQQQEALLKQLENEKRKYDEHVKSNQELSEKLSKLQQEKEALREEYLRLLKLLNVHVRNYNEKHHQQKVKLQKVKYRLTNEVELRDKRINQFEDEIGILQHKIEKEKAIQDQITAQNDTLLLEKRKLQEQVIEQEQLIHSNKWTISSIQSRVLYMDKENKQLQENSLRLTQQIGFLERIIRSIHIRRGENLKEFPVPKWWHRGKLASLPPTKKQKEIYSTEVFTSNNAELQHEDESVPEATEKWKHSEQMETTISDILESEVVNEILPLSNSSFSGKGLVESFASLQETEEIKSKEAMASSKSPEKSPENLVCSQNSEAGYINVASLKETHGIQEQDQKSEL

SEQ ID NO: 12738 - protein, 572 aa, Homo sapiens
MIHPPRPPKVLGLQHPSSGEKLKYNQQGEVQQLHQNLHRLQILCNSAENELRYERGQNLDLKQHNSLLQEENIKIKIELKHAQQKLLDSTKMCSSLTAEYKHCQQKIKELELEVLKHTQSIKSQNNLQEKLVQEKSKVADAEEKILDLQRKLEHAHKVCLTDTCISEKQQLEEKIKEATQNEAKVKQQYQEEQQKRKLLYQNVDELHRQVRTLQDKENLLEMTCSQQQSRIQQQEALLKQLENEKRKYDEHVKSNQELSEKLSKLQQEKEALREEYLRLLKLLNVHVRNYNEKHHQQKVKLQKVKYRLTNEVELRDKRINQFEDEIGILQHKIEKEKAIQDQITAQNDTLLLEKRKLQEQVIEQEQLIHSNKWTISSIQSRVLYMDKENKQLQENSLRLTQQIGFLERIIRSIHIRRGENLKEFPVPKWWHRGKLASLPPTKKQKEIYSTEVFTSNNAELQHEDESVPEATEKWKHSEQMETTISDILESEVVNEILPLSNSSFSGKGLVESFASLQETEEIKSKEAMASSKSPEKSPENLVCSQNSEAGYINVASLKETHGIQEQDQKSEL

SEQ ID NO: 12739 - protein, 511 aa, Homo sapiens
MSKVARSSSESDVQLWETEEDDMTEGDLGYGLGRKPGGIYEIEFSHRSRKRSDGKNFSPPPFPRKGEERNEASFQYSKHKSQQDTFPQVSRISNYRRQSSTVDSNSELSNEELRQCLNETLEEVEMLKTELEASQRQLRGKEEALKILQSMAILGKATSHTQAVLQKTMEQNRSLEKEINALQWEIEFDHNRFKNIEESWIQKYDRLNCENAVLKENLKVKTEEIKMLKSDNAVLNQRYLEALAMLDIKQQKMAQENMCCDKSGFAEASGLELAVLGACLCHGPGGNPCSCARMAASTRKLLLQLKQELEILQKSKEEAYVMADAFRIAFEQQLMRKNDQALQLTQMDKMHKKATKWMNWKHLKEDGFPSPRSKKTFGQRLLGMLPSENSSKRMEDQDSPQEVLKMLIDLLNDKEEALAHQRKVSYMLARALEDKDTASNENKEKNPIKENFPFNNPWRKTSEFSVLGDPIHSSVCILNSVGCICSIQHSQIDPNYRTLKRSHSLPSSIIF

SEQ ID NO: 12740 - protein, 386 aa, Homo sapiens
MLKTELEASQRQLRGKEEALKILQSMAILGKATSHTQAVLQKTMEQNRSLEKEINALQWEIEFDHNRFKNIEESWIQKYDRLNCENAVLKENLKVKTEEIKMLKSDNAVLNQRYLEALAMLDIKQQKMAQENMCCDKSGFAEASGLELAVLGACLCHGPGGNPCSCARMAASTRKLLLQLKQELEILQKSKEEAYVMADAFRIAFEQQLMRKNDQALQLTQMDKMHKKATKWMNWKHLKEDGFPSPRSKKTFGQRLLGMLPSENSSKRMEDQDSPQEVLKMLIDLLNDKEEALAHQRKVSYMLARALEDKDTASNENKEKNPIKENFPFNNPWRKTSEFSVLGDPIHSSVCILNSVGCICSIQHSQIDPNYRTLKRSHSLPSSIIF

SEQ ID NO: 12741 - protein, 223 aa, Homo sapiens
MPKKFQGENTKSAAARARRAEAKAAADAKKQKELEDAYWKDDDKHVMRKEQRKEEKEKRRLDQLERKKETQRLLEEEDSKLKGGKAPRVATSSKVTRAQIEDTLRRDHQLREAPDTAEKAKSHLEVPLEENVNRRVLEEGSVEARTIEDAIAVLSVAEEAADRHPERRMRAAFTAFEEAQLPRLKQENPNMRLSQLKQLLKKEWLRSPDNPMNQRAVPFNAPK

SEQ ID NO: 12742 - protein, 305 aa, Homo sapiens
MLGRNTWKTSAFSFLVEQMWAPLWSRSMRPGRWCSQRSCAWQTSNNTLHPLWTVPVSVPGGTRQSPINIQWRDSVYDPQLKPLRVSYEAASCLYIWNTGYLFQVEFDDATEASGISGGPLENHYRLKQFHFHWGAVNEGGSEHTVDGHAYPAELHLVHWNSVKYQNYKEAVVGENGLAVIGVFLKLGAHHQTLQRLVDILPEIKHKDARAAMRPFDPSTLLPTCWDYWTYAGSLTTPPLTESVTWIIQKEPVEVAPSQLSAFRTLLFSALGEEEKMMVNNYRPLQPLMNRKVWASFQATNEGTRS

SEQ ID NO: 12743 - protein, 770 aa, Homo sapiens
MSNEVETSATNGQPDQQAAPKAPSKKEKKKGPEKTDEYLLARFKGDGVKYKAKLIGIDDVPDARGDKMSQDSMMKLKGMAAAGRSQGQHKQRIWVNISLSGIKIIDEKTGVIEHEHPVNKISFIARDVTDNRAFGYVCGGEGQHQFFAIKTGQQAEPLVVDLKDLFQVIYNVKKKEEEKKKIEEASKAVENGSEALMILDDQTNKLKSGVDQMDLFGDMSTPPDLNSPTESKDILLVDLNSEIDTNQNSLRENPFLTNGITSCSLPRPTPQASFLPENAFSANLNFFPTPNPDPFRDDPFTQPDQSTPSSFDSLKSPDQKKENSSSSSTPLSNGPLNGDVDYFGQQFDQISNRTGKQEAQAGPWPFSSSQTQPAVRTQNGVSEREQNGFSVKSSPNPFVGSPPKGLSIQNGVKQDLESSVQSSPHDSIAIIPPPQSTKPGRGRRTAKSSANDLLASDIFAPPVSEPSGQASPTGQPTALQPNPLDLFKTSAPAPVGPLVGLGGVTVTLPQAGPWNTASLVFNQSPSMAPGAMMGGQPSGFSQPVIFGTSPAVSGWNQPSPFAASTPPPVPVVWGPSASVAPNAWSTTSPLGNPFQSNIFPAPAVSTQPPSMHSSLLVTPPQPPPRAGPPKDISSDAFTALDPLGDKEIKDVKEMFKDFQLRQPPAVPARKGEQTSSGTLSAFASYFNSKVGIPQENADHDDFDANQLLNKINEPPKPAPRQVSLPVTKSTDNAFENPFFKDSFGSSQASVASSQPVSSEMYRDPFGNPFA

SEQ ID NO: 12744 - protein, 552 aa, Homo sapiens
MSNEVETSATNGQPDQQAAPKAPSKKEKKKGPEKTDEYLLARFKGDGVKYKAKLIGIDDVPDARGDKMSQDSMMKLKGMAAAGRSQGQHKQRIWVNISLSGIKIIDEKTGVIEHEHPVNKISFIARDVTDNRAFGYVCGGEGQHQFFAIKTGQQAEPLVVDLKDLFQVIYNVKKKEEEKKKIEEASKAVENGSEALMILDDQTNKLKSGVDQMDLFGDMSTPPDLNSPTSSANDLLASDIFAPPVSEPSGQASPTGQPTALQPNPLDLFKTSAPAPVGPLVGLGGVTVTLPQAGPWNTASLVFNQSPSMAPGAMMGGQPSGFSQPVIFGTSPAVSGWNQPSPFAASTPPPVPVVWGPSASVAPNAWSTTSPLGNPFQSNIFPAPAVSTQPPSMHSSLLVTPPQPPPRAGPPKDISSDAFTALDPLGDKEIKDVKEMFKDFQLRQPPAVPARKGEQTSSGTLSAFASYFNSKVGIPQENADHDDFDANQLLNKINEPPKPAPRQVSLPVTKSTDNAFENPFFKDSFGSSQASVASSQPVSSEMYRDPFGNPFA

SEQ ID NO: 12745 - protein, 749 aa, Homo sapiens
MSNEVETSATNGQPDQQAAPKAPSKKEKKKGPEKTDEYLLARFKGDGVKYKAKLIGIDDVPDARGDKMSQDSMMKLKGMAAAGRSQGQHKQRIWVNISLSGIKIIDEKTGVIEHEHPVNKISFIARDVTDNRAFGYVCGGEGQHQFFAIKTGQQAEPLVVDLKDLFQVIYNVKKKEEEKKKIEEASKAVENGSEALMILDDQTNKLKSESKDILLVDLNSEIDTNQNSLRENPFLTNGITSCSLPRPTPQASFLPENAFSANLNFFPTPNPDPFRDDPFTQPDQSTPSSFDSLKSPDQKKENSSSSSTPLSNGPLNGDVDYFGQQFDQISNRTGKQEAQAGPWPFSSSQTQPAVRTQNGVSEREQNGFSVKSSPNPFVGSPPKGLSIQNGVKQDLESSVQSSPHDSIAIIPPPQSTKPGRGRRTAKSSANDLLASDIFAPPVSEPSGQASPTGQPTALQPNPLDLFKTSAPAPVGPLVGLGGVTVTLPQAGPWNTASLVFNQSPSMAPGAMMGGQPSGFSQPVIFGTSPAVSGWNQPSPFAASTPPPVPVVWGPSASVAPNAWSTTSPLGNPFQSNIFPAPAVSTQPPSMHSSLLVTPPQPPPRAGPPKDISSDAFTALDPLGDKEIKDVKEMFKDFQLRQPPAVPARKGEQTSSGTLSAFASYFNSKVGIPQENADHDDFDANQLLNKINEPPKPAPRQVSLPVTKSTDNAFENPFFKDSFGSSQASVASSQPVSSEMYRDPFGNPFA

SEQ ID NO: 12746 - protein, 446 aa, Homo sapiens
MEETIKDPPTSAVLLDHCHFSQVIFNSVEKFYIPGGDVTCHYTFTQHFIPRRKDWIGIFRVGWKTTREYYTFMWVTLPIDLNNKSAKQQEVQFKAYYLPKDDEYYQFCYVDEDGVVRGASIPFQFRPENEEDILVVTTQGEVEEIEQHNKELCKENQELKDSCISLQKQNSDMQAELQKKQEELETLQSINKKLELKVKEQKDYWETELLQLKEQNQKMSSENEKMGIRVDQLQAQLSTQEKEMEKLVQGDQDKTEQLEQLKKENDHLFLSLTEQRKDQKKLEQTVEQMKQNETTAMKKQQELMDENFDLSKRLSENEIICNALQRQKERLEGENDLLKRENSRLLSYMGLDFNSLPYQVPTSDEGGARQNPGLAYGNPYSGIQESSSPSPLSIKKCPICKADDICDHTLEQQQMQPLCFNCPICDKIFPATEKQIFEDHVFCHSL

SEQ ID NO: 12747 - protein, 404 aa, Homo sapiens
MEETIKDPPTSAVLLDHCHFSQVIFNSVEKFYIPGGDVTCHYTFTQHFIPRRKDWIGIFRVGWKTTREYYTFMWVTLPIDLNNKSAKQQEVQFKAYYLPKDDEYYQFCYVDEDGVVRGASIPFQFRPENEEDILVVTTQEELETLQSINKKLELKVKEQKDYWETELLQLKEQNQKMSSENEKMGIRVDQLQAQLSTQEKEMEKLVQGDQDKTEQLEQLKKENDHLFLSLTEQRKDQKKLEQTVEQMKQNETTAMKKQQELMDENFDLSKRLSENEIICNALQRQKERLEGENDLLKRENSRLLSYMGLDFNSLPYQVPTSDEGGARQNPGLAYGNPYSGIQESSSPSPLSIKKCPICKADDICDHTLEQQQMQPLCFNCPICDKIFPATEKQIFEDHVFCHSL

SEQ ID NO: 12748 - protein, 467 aa, Homo sapiens
MEETIKDPPTSAVLLDHCHFSQVIFNSVEKFYIPGGDVTCHYTFTQHFIPRRKDWIGIFRCSLNQTIQLLITPDTGSIWHQVGWKTTREYYTFMWVTLPIDLNNKSAKQQEVQFKAYYLPKDDEYYQFCYVDEDGVVRGASIPFQFRPENEEDILVVTTQGEVEEIEQHNKELCKENQELKDSCISLQKQNSDMQAELQKKQEELETLQSINKKLELKVKEQKDYWETELLQLKEQNQKMSSENEKMGIRVDQLQAQLSTQEKEMEKLVQGDQDKTEQLEQLKKENDHLFLSLTEQRKDQKKLEQTVEQMKQNETTAMKKQQELMDENFDLSKRLSENEIICNALQRQKERLEGENDLLKRENSRLLSYMGLDFNSLPYQVPTSDEGGARQNPGLAYGNPYSGIQESSSPSPLSIKKCPICKADDICDHTLEQQQMQPLCFNCPICDKIFPATEKQIFEDHVFCHSL

SEQ ID NO: 12749 - protein, 470 aa, Homo sapiens
MEETIKDPPTSAVLLDHCHFSQVIFNSVEKFYIPGGDVTCHYTFTQHFIPRRKDWIGIFRAFKCFQDKLEQELLKWRSQGQKLQVGWKTTREYYTFMWVTLPIDLNNKSAKQQEVQFKAYYLPKDDEYYQFCYVDEDGVVRGASIPFQFRPENEEDILVVTTQGEVEEIEQHNKELCKENQELKDSCISLQKQNSDMQAELQKKQEELETLQSINKKLELKVKEQKDYWETELLQLKEQNQKMSSENEKMGIRVDQLQAQLSTQEKEMEKLVQGDQDKTEQLEQLKKENDHLFLSLTEQRKDQKKLEQTVEQMKQNETTAMKKQQELMDENFDLSKRLSENEIICNALQRQKERLEGENDLLKRENSRLLSYMGLDFNSLPYQVPTSDEGGARQNPGLAYGNPYSGIQESSSPSPLSIKKCPICKADDICDHTLEQQQMQPLCFNCPICDKIFPATEKQIFEDHVFCHSL

SEQ ID NO: 12750 - protein, 374 aa, Homo sapiens
MWVTLPIDLNNKSAKQQEVQFKAYYLPKDDEYYQFCYVDEDGVVRGASIPFQFRPENEEDILVVTTQGEVEEIEQHNKELCKENQELKDSCISLQKQNSDMQAELQKKQEELETLQSINKKLELKVKEQKDYWETELLQLKEQNQKMSSENEKMGIRVDQLQAQLSTQEKEMEKLVQGDQDKTEQLEQLKKENDHLFLSLTEQRKDQKKLEQTVEQMKQNETTAMKKQQELMDENFDLSKRLSENEIICNALQRQKERLEGENDLLKRENSRLLSYMGLDFNSLPYQVPTSDEGGARQNPGLAYGNPYSGIQESSSPSPLSIKKCPICKADDICDHTLEQQQMQPLCFNCPICDKIFPATEKQIFEDHVFCHSL

SEQ ID NO: 12751 - protein, 243 aa, Homo sapiens
MRPLLVLLLLGLAAGSPPLDDNKIPSLCPGHPGLPGTPGHHGSQGLPGRDGRDGRDGAPGAPGEKGEGGRPGLPGPRGDPGPRGEAGPAGPTGPAGECSVPPRSAFSAKRSESRVPPPSDAPLPFDRVLVNEQGHYDAVTGKFTCQVPGVYYFAVHATVYRASLQFDLVKNGESIASFFQFFGGWPKPASLSGGAMVRLEPEDQVWVQVGVGDYIGIYASIKTDSTFSGFLVYSDWHSSPVFA

SEQ ID NO: 12752 - protein, 331 aa, Homo sapiens
MTSPHFSSYDEGPLDVSMAATNLENQLHSAQKNLLFLQREHASTLKGLHSEIRRLQQHCTDLTYELTVKSSEQTGDGTSKSSELKKRCEELEAQLKVKENENAELLKELEQKNAMITVLENTIKEREKKYLEELKAKSHKLTLLSSELEQRASTIAYLTSQLHAAKKKLMSSSGTSDASPSGSPVLASYKPAPPKDKLPETPRRRMKKSLSAPLHPEFEEVYRFGAESRKLLLREPVDAMPDPTPFLLARESAEVHLIKERPLVIPPIASDRSGEQHSPAREKPHKAHVGVAHRIHHATPPQAQPEVKTLAVDQVNGGKVVRKHSGTDRTV

SEQ ID NO: 12753 - protein, 314 aa, Homo sapiens
MAATNLENQLHSAQKNLLFLQREHASTLKGLHSEIRRLQQHCTDLTYELTVKSSEQTGDGTSKSSELKKRCEELEAQLKVKENENAELLKELEQKNAMITVLENTIKEREKKYLEELKAKSHKLTLLSSELEQRASTIAYLTSQLHAAKKKLMSSSGTSDASPSGSPVLASYKPAPPKDKLPETPRRRMKKSLSAPLHPEFEEVYRFGAESRKLLLREPVDAMPDPTPFLLARESAEVHLIKERPLVIPPIASDRSGEQHSPAREKPHKAHVGVAHRIHHATPPQAQPEVKTLAVDQVNGGKVVRKHSGTDRTV

SEQ ID NO: 12754 - protein, 796 aa, Homo sapiens
MKENYCLQAALVCLGMLCHSHAFAPERRGHLRPSFHGHHEKGKEGQVLQRSKRGWVWNQFFVIEEYTGPDPVLVGRLHSDIDSGDGNIKYILSGEGAGTIFVIDDKSGNIHATKTLDREERAQYTLMAQAVDRDTNRPLEPPSEFIVKVQDINDNPPEFLHETYHANVPERSNVGTSVIQVTASDADDPTYGNSAKLVYSILEGQPYFSVEAQTGIIRTALPNMDREAKEEYHVVIQAKDMGGHMGGLSGTTKVTITLTDVNDNPPKFPQSVYQMSVSEAAVPGEEVGRVKAKDPDIGENGLVTYNIVDGDGMESFEITTDYETQEGVIKLKKPVDFETKRAYSLKVEAANVHIDPKFISNGPFKDTVTVKISVEDADEPPMFLAPSYIHEVQENAAAGTVVGRVHAKDPDAANSPIRYSIDRHTDLDRFFTINPEDGFIKTTKPLDREETAWLNITVFAAEIHNRHQEAKVPVAIRVLDVNDNAPKFAAPYEGFICESDQTKPLSNQPIVTISADDKDDTANGPRFIFSLPPEIIHNPNFTVRDNRDNTAGVYARRGGFSRQKQDLYLLPIVISDGGIPPMSSTNTLTIKVCGCDVNGALLSCNAEAYILNAGLSTGALIAILACIVILLVIVVLFVTLRRQKKEPLIVFEEEDVRENIITYDDEGGGEEDTEAFDIATLQNPDGINGFIPRKDIKPEYQYMPRPGLRPAPNSVDVDDFINTRIQEADNDPTAPPYDSIQIYGYEGRGSVAGSLSSLESATTDSDLDYDYLQNWGPRFKKLADLYGSKDTFDDDS

SEQ ID NO: 12755 - protein, 693 aa, Homo sapiens
MKENYCLQAALVCLGMLCHSHAFAPERRGHLRPSFHGHHEKGKEGQVLQRSKRGWVWNQFFVIEEYTGPDPVLVGRLHSDIDSGDGNIKYILSGEGAGTIFVIDDKSGNIHATKTLDREERAQYTLMAQAVDRDTNRPLEPPSEFIVKVQDINDNPPEFLHETYHANVPERSNVGTSVIQVTASDADDPTYGNSAKLVYSILEGQPYFSVEAQTGIIRTALPNMDREAKEEYHVVIQAKDMGGHMGGLSGTTKVTITLTDVNDNPPKFPQSVYQMSVSEAAVPGEEVGRVKAKDPDIGENGLVTYNIVDGDGMESFEITTDYETQEGVIKLKKPVDFETKRAYSLKVEAANVHIDPKFISNGPFKDTVTVKISVEDADEPPMFLAPSYIHEVQENAAAGTVVGRVHAKDPDAANSPIRYSIDRHTDLDRFFTINPEDGFIKTTKPLDREETAWLNITVFAAEIHNRHQEAKVPVAIRVLDVNDNAPKFAAPYEGFICESDQTKPLSNQPIVTISADDKDDTANGPRFIFSLPPEIIHNPNFTVRDNRDNTAGVYARRGGFSRQKQDLYLLPIVISDGGIPPMSSTNTLTIKVCGCDVNGALLSCNAEAYILNAGLSTGALIAILACIVILLGCPSLMEPPSPREDMRLLYLGFQLMLFSYVKVNRRFCLLGVFIKLPFLYVVATESPTTLTSL

SEQ ID NO: 12756 - protein, 705 aa, Homo sapiens
MWLLYLLVPALFCRAGGSIPIPQKLFGEVTSPLFPKPYPNNFETTTVITVPTGYRVKLVFQQFDLEPSEGCFYDYVKISADKKSLGRFCGQLGSPLGNPPGKKEFMSQGNKMLLTFHTDFSNEENGTIMFYKGFLAYYQAVDLDECASRSKSGEEDPQPQCQHLCHNYVGGYFCSCRPGYELQEDTHSCQAECSSELYTEASGYISSLEYPRSYPPDLRCNYSIRVERGLTLHLKFLEPFDIDDHQQVHCPYDQLQIYANGKNIGEFCGKQRPPDLDTSSNAVDLLFFTDESGDSRGWKLRYTTEIIKCPQPKTLDEFTIIQNLQPQYQFRDYFIATCKQGYQLIEGNQVLHSFTAVCQDDGTWHRAMPRCKIKDCGQPRNLPNGDFRYTTTMGVNTYKARIQYYCHEPYYKMQTRAGSRESEQGVYTCTAQGIWKNEQKGEKIPRCLPVCGKPVNPVEQRQRIIGGQKAKMGNFPWQVFTNIHGRGGGALLGDRWILTAAHTLYPKEHEAQSNASLDVFLGHTNVEELMKLGNHPIRRVSVHPDYRQDESYNFEGDIALLELENSVTLGPNLLPICLPDNDTFYDLGLMGYVSGFGVMEEKIAHDLRFVRLPVANPQACENWLRGKNRMDVFSQNMFCAGHPSLKQDACQGDSGGVFAVRDPNTDRWVATGIVSWGIGCSRGYGFYTKVLNYVDWIKKEMEEED

SEQ ID NO: 12757 - protein, 814 aa, Homo sapiens
MDAAFLLVLGLLAQSLCLSLGVPGWRRPTTLYPWRRAPALSRVRRAWVIPPISVSENHKRLPYPLVQIKSDKQQLGSVIYSIQGPGVDEEPRGVFSIDKFTGKVFLNAMLDREKTDRFRLRAFALDLGGSTLEDPTDLEIVVVDQNDNRPAFLQEAFTGRVLEGAVPGTYVTRAEATDADDPETDNAALRFSILQQGSPELFSIDELTGEIRTVQVGLDREVVAVYNLTLQVADMSGDGLTATASAIITLDDINDNAPEFTRDEFFMEAIEAVSGVDVGRLEVEDRDLPGSPNWVARFTILEGDPDGQFTIRTDPKTNEGVLSIVKALDYESCEHYELKVSVQNEAPLQAAALRAERGQAKVRVHVQDTNEPPVFQENPLRTSLAEGAPPGTLVATFSARDPDTEQLQRLSYSKDYDPEDWLQVDAATGRIQTQHVLSPASPFLKGGWYRAIVLAQDDASQPRTATGTLSIEILEVNDHAPVLAPPPPGSLCSEPHQGPGLLLGATDEDLPPHGAPFHFQLSPRLPELGRNWSLSQVNVSHARLRPRHQVPEGLHRLSLLLRDSGQPPQQREQPLNVTVCRCGKDGVCLPGAAALLAGGTGLSLGALVIVLASALLLLVLVLLVALRARFWKQSRGKGLLHGPQDDLRDNVLNYDEQGGGEEDQDAYDISQLRHPTALSLPLGPPPLRRDAPQGRLHPQPPRVLPTSPLDIADFINDGLEAADSDPSVPPYDTALIYDYEGDGSVAGTLSSILSSQGDEDQDYDYLRDWGPRFARLADMYGHPCGLEYGARWDHQAREGLSPGALLPRHRGRTA

SEQ ID NO: 12758 - protein, 333 aa, Homo sapiens
MRIWWLLLAIEICTGNINSQDTCRQGHPGIPGNPGHNGLPGRDGRDGAKGDKGDAGEPGCPGSPGKDGTSGEKGERGADGKVEAKGIKGDQGSRGSPGKHGPKGLAGPMGEKGLRGETGPQGQKGNKGDVGPTGPEGPRGNIGPLGPTGLPGPMGPIGKPGPKGEAGPTGPQGEPGVRGIRGWKGDRGEKGKIGETLVLPKSAFTVGLTVLSKFPSSDVPIKFDKILYNEFNHYDTAVGKFTCHIAGVYYFTYHITVFSRNVQVSLVKNGVKILHTRDAYVSSEDQASGSIVLQLKLGDEMWLQVTGGERFNGLFADEDDDTTFTGFLLFSSQ

SEQ ID NO: 12759 - protein, 99 aa, Homo sapiens
MRIWWLLLAIEICTGNINSQDTCRQGHPGIPGNPGHNGLPGRDGRDGAKGDKGDAGEPGCPGSPGKDGTSGEKGERGADGKVEAKGIKEMFRCLWSKME

SEQ ID NO: 12760 - protein, 626 aa, Homo sapiens
MLAFAARTVVKPLGFLKPFSLMKASSRFKAHQDALPRLPVPPLQQSLDHYLKALQPIVSEEEWAHTKQLVDEFQASGGVGERLQKGLERRARKTENWLSEWWLKTAYLQYRQPVVIYSSPGVMLPKQDFVDLQGQLRFAAKLIEGVLDFKVMIDNETLPVEYLGGKPLCMNQYYQILSSCRVPGPKQDTVSNFSKTKKPPTHITVVHNYQFFELDVYHSDGTPLTADQIFVQLEKIWNSSLQTNKEPVGILTSNHRNSWAKAYNTLIKDKVNRDSVRSIQKSIFTVCLDATMPRVSEDVYRSHVAGQMLHGGGSRLNSGNRWFDKTLQFIVAEDGSCGLVYEHAAAEGPPIVTLLDYVIEYTKKPELVRSPLVPLPMPKKLRFNITPEIKSDIEKAKQNLSIMIQDLDITVMVFHHFGKDFPKSEKLSPDAFIQMALQLAYYRIYGQACATYESASLRMFHLGRTDTIRSASMDSLTFVKAMDDSSVTEHQKVELLRKAVQAHRGYTDRAIRGEAFDRHLLGLKLQAIEDLVSMPDIFMDTSYAIAMHFHLSTSQVPAKTDCVMFFGPVVPDGYGVCYNPMEAHINFSLSAYNSCAETNAARLAHYLEKALLDMRALLQSHPRAKL

SEQ ID NO: 12761 - protein, 605 aa, Homo sapiens
MKASSRFKAHQDALPRLPVPPLQQSLDHYLKALQPIVSEEEWAHTKQLVDEFQASGGVGERLQKGLERRARKTENWLSEWWLKTAYLQYRQPVVIYSSPGVMLPKQDFVDLQGQLRFAAKLIEGVLDFKVMIDNETLPVEYLGGKPLCMNQYYQILSSCRVPGPKQDTVSNFSKTKKPPTHITVVHNYQFFELDVYHSDGTPLTADQIFVQLEKIWNSSLQTNKEPVGILTSNHRNSWAKAYNTLIKDKVNRDSVRSIQKSIFTVCLDATMPRVSEDVYRSHVAGQMLHGGGSRLNSGNRWFDKTLQFIVAEDGSCGLVYEHAAAEGPPIVTLLDYVIEYTKKPELVRSPLVPLPMPKKLRFNITPEIKSDIEKAKQNLSIMIQDLDITVMVFHHFGKDFPKSEKLSPDAFIQMALQLAYYRIYGQACATYESASLRMFHLGRTDTIRSASMDSLTFVKAMDDSSVTEHQKVELLRKAVQAHRGYTDRAIRGEAFDRHLLGLKLQAIEDLVSMPDIFMDTSYAIAMHFHLSTSQVPAKTDCVMFFGPVVPDGYGVCYNPMEAHINFSLSAYNSCAETNAARLAHYLEKALLDMRALLQSHPRAKL

SEQ ID NO: 12762 - protein, 544 aa, Homo sapiens
MLAFAARTVVKPLGFLKPFSLMKASSRFKAHQDALPRLPVPPLQQSLDHYLKALQPIVSEEEWAHTKQLVDEFQASGGVGERLQKGLERRARKTENWLSEWWLKTAYLQYRQPVVIYSSPGVMLPKQDFVDLQGQLRFAAKLIEGVLDFKVMIDNETLPVEYLGGKPLCMNQYYQILSSCRVPGPKQDTVSNFSKTKKPPTHITVVHNYQFFELDVYHSDGTPLTADQIFVQLEKIWNSSLQTNKEPVGILTSNHRNSWAKAYNTLIKDKVNRDSVRSIQKKPELVRSPLVPLPMPKKLRFNITPEIKSDIEKAKQNLSIMIQDLDITVMVFHHFGKDFPKSEKLSPDAFIQMALQLAYYRIYGQACATYESASLRMFHLGRTDTIRSASMDSLTFVKAMDDSSVTEHQKVELLRKAVQAHRGYTDRAIRGEAFDRHLLGLKLQAIEDLVSMPDIFMDTSYAIAMHFHLSTSQVPAKTDCVMFFGPVVPDGYGVCYNPMEAHINFSLSAYNSCAETNAARLAHYLEKALLDMRALLQSHPRAKL

SEQ ID NO: 12763 - protein, 289 aa, Homo sapiens
MFVLLYVTSFAICASGQPRGNQLKGENYSPRYICSIPGLPGPPGPPGANGSPGPHGRIGLPGRDGRDGRKGEKGEKGTAGLRGKTGPLGLAGEKGDQGETGKKGPIGPEGEKGEVGPIGPPGPKGDRGEQGDPGLPGVCRCGSIVLKSAFSVGITTSYPEERLPIIFNKVLFNEGEHYNPATGKFICAFPGIYYFSYDITLANKHLAIGLVHNGQYRIKTFDANTGNHDVASGSTVIYLQPEDEVWLEIFFTDQNGLFSDPGWADSLFSGFLLYVDTDYLDSISEDDEL

SEQ ID NO: 12764 - protein, 296 aa, Homo sapiens
MSRQEPKMFVLLYVTSFAICASGQPRGNQLKGENYSPRYICSIPGLPGPPGPPGANGSPGPHGRIGLPGRDGRDGRKGEKGEKGTAGLRGKTGPLGLAGEKGDQGETGKKGPIGPEGEKGEVGPIGPPGPKGDRGEQGDPGLPGVCRCGSIVLKSAFSVGITTSYPEERLPIIFNKVLFNEGEHYNPATGKFICAFPGIYYFSYDITLANKHLAIGLVHNGQYRIKTFDANTGNHDVASGSTVIYLQPEDEVWLEIFFTDQNGLFSDPGWADSLFSGFLLYVDTDYLDSISEDDEL

SEQ ID NO: 12765 - protein, 337 aa, Homo sapiens [sequence omitted]

SEQ ID NO: 12766 - protein, 790 aa, Homo sapiens
MKITSTSCICPVLVCLCFVQRCYGTAHHSSIKVMRNQTKHIEGETEVHHRPKRGWVWNQFFVLEEHMGPDPQYVGKLHSNSDKGDGSVKYILTGEGAGTIFIIDDTTGDIHSTKSLDREQKTHYVLHAQAIDRRTNKPLEPESEFIIKVQDINDNAPKFTDGPYIVTVPEMSDMGTSVLQVTATDADDPTYGNSARVVYSILQGQPYFSVDPKTGVIRTALHNMDREAREHYSVVIQAKDMAGQVGGLSGSTTVNITLTDVNDNPPRFPQKHYQLYVPESAQVGSAVGKIKANDADTGSNADMTYSIINGDGMGIFSISTDKETREGILSLKKPLNYEKKKSYTLNIEGANTHLDFRFSHLGPFKDATMLKIIVGDVDEPPLFSMPSYLMEVYENAKIGTVVGTVLAQDPDSTNSLVRYFINYNVEDDRFFNIDANTGTIRTTKVLDREETPWYNITVTASEIDNPDLLSHVTVGIRVLDVNDNPPELAREYDIIVCENSKPGQVIHTISATDKDDFANGPRFNFFLDERLPVNPNFTLKDNEDNTASILTRRRRFSRTVQDVYYLPIMISDGGIPSLSSSSTLTIRVCACERDGRVRTCHAEAFLSSAGLSTGALIAILLCVLILLAIVVLFITLRRSKKEPLIISEEDVRENVVTYDDEGGGEEDTEAFDITALRNPSAAEELKYRRDIRPEVKLTPRHQTSSTLESIDVQEFIKQRLAEADLDPSVPPYDSLQTYAYEGQRSEAGSISSLDSATTQSDQDYHYLGDWGPEFKKLAELYGEIESERTT

SEQ ID NO: 12767 - protein, 574 aa, Homo sapiens
MKITSTSCICPVLVCLCFVQRCYGTAHHSSIKVMRNQTKHIEGETEVHHRPKRGWVWNQFFVLEEHMGPDPQYVGKLHSNSDKGDGSVKYILTGEGAGTIFIIDDTTGDIHSTKSLDREQKTHYVLHAQAIDRRTNKPLEPESEFIIKVQDINDNAPKFTDGPYIVTVPEMSDMGTSVLQVTATDADDPTYGNSARVVYSILQGQPYFSVDPKTGVIRTALHNMDREAREHYSVVIQAKDMAGQVGGLSGSTTVNITLTDVNDNPPRFPQKHYQLYVPESAQVGSAVGKIKANDADTGSNADMTYSIINGDGMGIFSISTDKETREGILSLKKPLNYEKKKSYTLNIEGANTHLDFRFSHLGPFKDATMLKIIVGDVDEPPLFSMPSYLMEVYENAKIGTVVGTVLAQDPDSTNSLVRYFINYNVEDDRFFNIDANTGTIRTTKVLDREETPWYNITVTASEIDNPDLLSHVTVGIRVLDVNDNPPELAREYDIIVCENSKPGQVIHTISATDKDDFANGPRFNFFLDERLPVNPNFTLKDNEAAAPSPSGFVHAREMGVCGPAMQKPSCPRLV

SEQ ID NO: 12768 - protein, 126 aa, Homo sapiens
MASASTQPAALSAEQAKVVLAEVIQAFSAPENAVRMDEARDNACNDMGKMLQFVLPVATQIQQEVIKAYGFSCDGEGVLKFARLVKSYEAQDPEIASLSGKLKALFLPPMTLPPHGPAAGGSVAAS

SEQ ID NO: 12769 - protein, 828 aa, Homo sapiens
MRPRPEGRGLRAGVALSPALLLLLLLPPPPTLLGRLWAAGTPSPSAPGARQDGALGAGRVKRGWVWNQFFVVEEYTGTEPLYVGKIHSDSDEGDGAIKYTISGEGAGTIFLIDELTGDIHAMERLDREQKTFYTLRAQARDRATNRLLEPESEFIIKVQDINDSEPRFLHGPYIGSVAELSPTGTSVMQVMASDADDPTYGSSARLVYSVLDGEHHFTVDPKTGVIRTAVPDLDRESQERYEVVIQATDMAGQLGGLSGSTTVTIVVTDVNDNPPRFPQKMYQFSIQESAPIGTAVGRVKAEDSDVGENTDMTYHLKDESSSGGDVFKVTTDSDTQEAIIVVQKRLDFESQPVHTVILEALNKFVDPRFADLGTFRDQAIVRVAVTDVDEPPEFRPPSGLLEVQEDAQVGSLVGVVTARDPDAANRPVRYAIDRESDLDQIFDIDADTGAIVTGKGLDRETAGWHNITVLAMEADNHAQLSRASLRIRILDVNDNPPELATPYEAAVCEDAKPGQLIQTISVVDRDEPQGGHRFYFRLVPEAPSNPHFSLLDIQDNTAAVHTQHVGFNRQEQDVFFLPILVVDSGPPTLSSTGTLTIRICGCDSSGTIQSCNTTAFVMAASLSPGALIALLVCVLILVVLVLLILTLRRHHKSHLSSDEDEDMRDNVIKYNDEGGGEQDTEAYDMSALRSLYDFGELKGGDGGGSAGGGAGGGSGGGAGSPPQAHLPSERHSLPQGPPSPEPDFSVFRDFISRKVALADGDLSVPPYDAFQTYAFEGADSPAASLSSLHSGSSGSEQDFAYLSSWGPRFRPLAALYAGHRGDDEAQAS

SEQ ID NO: 12770 - protein, 1445 aa, Homo sapiens
MQGPPLLTAAHLLCVCTAALAVAPGPRFLVTAPGIIRPGGNVTIGVELLEHCPSQVTVKAELLKTASNLTVSVLEAEGVFEKGSFKTLTLPSLPLNSADEIYELRVTGRTQDEILFSNSTRLSFETKRISVFIQTDKALYKPKQEVKFRIVTLFSDFKPYKTSLNILIKDPKSNLIQQWLSQQSDLGVISKTFQLSSHPILGDWSIQVQVNDQTYYQSFQVSEYVLPKFEVTLQTPLYCSMNSKHLNGTITAKYTYGKPVKGDVTLTFLPLSFWGKKKNITKTFKINGSANFSFNDEEMKNVMDSSNGLSEYLDLSSPGPVEILTTVTESVTGISRNVSTNVFFKQHDYIIEFFDYTTVLKPSLNFTATVKVTRADGNQLTLEERRNNVVITVTQRNYTEYWSGSNSGNQKMEAVQKINYTVPQSGTFKIEFPILEDSSELQLKAYFLGSKSSMAVHSLFKSPSKTYIQLKTRDENIKVGSPFELVVSGNKRLKELSYMVVSRGQLVAVGKQNSTMFSLTPENSWTPKACVIVYYIEDDGEIISDVLKIPVQLVFKNKIKLYWSKVKAEPSEKVSLRISVTQPDSIVGIVAVDKSVNLMNASNDITMENVVHELELYNTGYYLGMFMNSFAVFQECGLWVLTDANLTKDYIDGVYDNAEYAERFMEENEGHIVDIHDFSLGSSPHVRKHFPETWIWLDTNMGYRIYQEFEVTVPDSITSWVATGFVISEDLGLGLTTTPVELQAFQPFFIFLNLPYSVIRGEEFALEITIFNYLKDATEVKVIIEKSDKFDILMTSNEINATGHQQTLLVPSEDGATVLFPIRPTHLGEIPITVTALSPTASDAVTQMILVKAEGIEKSYSQSILLDLTDNRLQSTLKTLSFSFPPNTVTGSERVQITAIGDVLGPSINGLASLIRMPYGCGEQNMINFAPNIYILDYLTKKKQLTDNLKEKALSFMRQGYQRELLYQREDGSFSAFGNYDPSGSTWLSAFVLRCFLEADPYIDIDQNVLHRTYTWLKGHQKSNGEFWDPGRVIHSELQGGNKSPVTLTAYIVTSLLGYRKYQPNIDVQESIHFLESEFSRGISDNYTLALITYALSSVGSPKAKEALNMLTWRAEQEGGMQFWVSSESKLSDSWQPRSLDIEVAAYALLSHFLQFQTSEGIPIMRWLSRQRNSLGGFASTQDTTVALKALSEFAALMNTERTNIQVTVTGPSSPSPVKFLIDTHNRLLLQTAELAVVQPTAVNISANGFGFAICQLNVVYNVKASGSSRRRRSIQNQEAFDLDVAVKENKDDLNHVDLNVCTSFSGPGRSGMALMEVNLLSGFMVPSEAISLSETVKKVEYDHGKLNLYLDSVNETQFCVNIPAVRNFKVSNTQDASVSIVDYYEPRRQAVRSYNSEVKLSSCDLCSDVQGCRPCEDGASGSHHHSSVIFIFCFKLLYFMELWL

SEQ ID NO: 12771 - protein, 1368 aa, Homo sapiens
MQGPPLLTAAHLLCVCTAALAVAPGPRFLVTAPGIIRPGGNVTIGVELLEHCPSQVTVKAELLKTASNLTVSVLEAEGVFEKGSFKTLTLPSDPKSNLIQQWLSQQSDLGVISKTFQLSSHPILGDWSIQVQVNDQTYYQSFQVSEYVLPKFEVTLQTPLYCSMNSKHLNGTITAKYTYGKPVKGDVTLTFLPLSFWGKKKNITKTFKINGSANFSFNDEEMKNVMDSSNGLSEYLDLSSPGPVEILTTVTESVTGISRNVSTNVFFKQHDYIIEFFDYTTVLKPSLNFTATVKVTRADGNQLTLEERRNNVVITVTQRNYTEYWSGSNSGNQKMEAVQKINYTVPQSGTFKIEFPILEDSSELQLKAYFLGSKSSMAVHSLFKSPSKTYIQLKTRDENIKVGSPFELVVSGNKRLKELSYMVVSRGQLVAVGKQNSTMFSLTPENSWTPKACVIVYYIEDDGEIISDVLKIPVQLVFKNKIKLYWSKVKAEPSEKVSLRISVTQPDSIVGIVAVDKSVNLMNASNDITMENVVHELELYNTGYYLGMFMNSFAVFQECGLWVLTDANLTKDYIDGVYDNAEYAERFMEENEGHIVDIHDFSLGSSPHVRKHFPETWIWLDTNMGYRIYQEFEVTVPDSITSWVATGFVISEDLGLGLTTTPVELQAFQPFFIFLNLPYSVIRGEEFALEITIFNYLKDATEVKVIIEKSDKFDILMTSNEINATGHQQTLLVPSEDGATVLFPIRPTHLGEIPITVTALSPTASDAVTQMILVKAEGIEKSYSQSILLDLTDNRLQSTLKTLSFSFPPNTVTGSERVQITAIGDVLGPSINGLASLIRMPYGCGEQNMINFAPNIYILDYLTKKKQLTDNLKEKALSFMRQGYQRELLYQREDGSFSAFGNYDPSGSTWLSAFVLRCFLEADPYIDIDQNVLHRTYTWLKGHQKSNGEFWDPGRVIHSELQGGNKSPVTLTAYIVTSLLGYRKYQPNIDVQESIHFLESEFSRGISDNYTLALITYALSSVGSPKAKEALNMLTWRAEQEGGMQFWVSSESKLSDSWQPRSLDIEVAAYALLSHFLQFQTSEGIPIMRWLSRQRNSLGGFASTQDTTVALKALSEFAALMNTERTNIQVTVTGPSSPSPVKFLIDTHNRLLLQTAELAVVQPTAVNISANGFGFAICQLNVVYNVKASGSSRRRRSIQNQEAFDLDVAVKENKDDLNHVDLNVCTSFSGPGRSGMALMEVNLLSGFMVPSEAISLSETVKKVEYDHGKLNLYLDSVNETQFCVNIPAVRNFKVSNTQDASVSIVDYYEPRRQAVRSYNSEVKLSSCDLCSDVQGCRPCEDGASGSHHHSSVIFIFCFKLLYFMELWL

SEQ ID NO: 12772 - protein, 665 aa, Homo sapiens
MQGPPLLTAAHLLCVCTAALAVAPGPRFLVTAPGIIRPGGNVTIGVELLEHCPSQVTVKAELLKTASNLTVSVLEAEGVFEKGSFKTLTLPSLPLNSADEIYELRVTGRTQDEILFSNSTRLSFETKRISVFIQTDKALYKPKQEVKFRIVTLFSDFKPYKTSLNILIKDPKSNLIQQWLSQQSDLGVISKTFQLSSHPILGDWSIQVQVNDQTYYQSFQVSEYVLPKFEVTLQTPLYCSMNSKHLNGTITAKYTYGKPVKGDVTLTFLPLSFWGKKKNITKTFKINGSANFSFNDEEMKNVMDSSNGLSEYLDLSSPGPVEILTTVTESVTGISRNVSTNVFFKQHDYIIEFFDYTTVLKPSLNFTATVKVTRADGNQLTLEERRNNVVITVTQRNYTEYWSGSNSGNQKMEAVQKINYTVPQSGTFKIEFPILEDSSELQLKAYFLGSKSSMAVHSLFKSPSKTYIQLKTRDENIKVGSPFELVVSGNKRLKELSYMVVSRGQLVAVGKQNSTMFSLTPENSWTPKACVIVYYIEDDGEIISDVLKIPVQLVFKNKIKLYWSKVKAEPSEKVSLRISVTQPDSIVGIVAVDKSVNLMNASNDITMENVVHELELYNTGYYLGMFMNSFAVFQECGLWVLTDANLTKDYIDGVYDNLFGTQEAL

SEQ ID NO: 12773 - protein, 1428 aa, Homo sapiens
MQGPPLLTAAHLLCVCTAALAVAPGPRFLVTAPGIIRPGGNVTIGVELLEHCPSQVTVKAELLKTASNLTVSVLEAEGVFEKGSFKTLTLPSLPLNSADEIYELRVTGRTQDEILFSNSTRLSFETKRISVFIQTDKALYKPKQEVKFRIVTLFSDFKPYKTSLNILIKDPKSNLIQQWLSQQSDLGVISKTFQLSSHPILGDWSIQVQVNDQTYYQSFQVSEYVLPKFEVTLQTPLYCSMNSKHLNGTITAKYTYGKPVKGDVTLTFLPLSFWGKKKNITKTFKINGSANFSFNDEEMKNVMDSSNGLSEYLDLSSPGPVEILTTVTESVTGISRNVSTNVFFKQHDYIIEFFDYTTVLKPSLNFTATVKVTRADGNQLTLEERRNNVVITVTQRNYTEYWSGSNSGNQKMEAVQKINYTVPQSGTFKIEFPILEDSSELQLKAYFLGSKSSMAVHSLFKSPSKTYIQLKTRDENIKVGSPFELVVSGNKRLKELSYMVVSRGQLVAVGKQNSTMFSLTPENSWTPKACVIVYYIEDDGEIISDVLKIPVQLVFKNKIKLYWSKVKAEPSEKVSLRISVTQPDSIVGIVAVDKSVNLMNASNDITMENVVHELELYNTGYYLGMFMNSFAVFQECGLWVLTDANLTKDYIDGVYDNAEYAERFMEENEGHIVDIHDFSLGSSPHVRKHFPETWIWLDTNMGYRIYQEFEVTVPDSITSWVATGFVISEDLGLGLTTTPVELQAFQPFFIFLNLPYSVIRGEEFALEITIFNYLKDATEVKVIIEKSDKFDILMTSNEINATGHQQTLLVPSEDGATVLFPIRPTHLGEIPITVTALSPTASDAVTQMILVKAEGIEKSYSQSILLDLTDNRLQSTLKTLSFSFPPNTVTGSERVQITAIGDVLGPSINGLASLIRMPYGCGEQNMINFAPNIYILDYLTKKKQLTDNLKEKALSFMRQGYQRELLYQREDGSFSAFGNYDPSGSTWLSAFVLRCFLEADPYIDIDQNVLHRTYTWLKGHQKSNGEFWDPGRVIHSELQGGNKSPVTLTAYIVTSLLGYRKYQPNIDVQESIHFLESEFSRGISDNYTLALITYALSSVGSPKAKEALNMLTWRAEQEGGMQFWVSSESKLSDSWQPRSLDIEVAAYALLSHFLQFQTSEGIPIMRWLSRQRNSLGGFASTQDTTVALKALSEFAALMNTERTNIQVTVTGPSSPSPLAVVQPTAVNISANGFGFAICQLNVVYNVKASGSSRRRRSIQNQEAFDLDVAVKENKDDLNHVDLNVCTSFSGPGRSGMALMEVNLLSGFMVPSEAISLSETVKKVEYDHGKLNLYLDSVNETQFCVNIPAVRNFKVSNTQDASVSIVDYYEPRRQAVRSYNSEVKLSSCDLCSDVQGCRPCEDGASGSHHHSSVIFIFCFKLLYFMELWL

SEQ ID NO: 12774 - protein, 390 aa, Homo sapiens
MATGDLKRSLRNLEQVLRLLNYPEEVDCVGLIKGDPAASLPIISYSFTSYSPYVTELIMESNVELIAKNDLRFIDAVYKLLRDQFNYKPILTKKQFIQCGFAEWKIQIVCDILNCVMKKHKELSSLQKIPSQQRKKISSGKSEPPLGNEKISAEAVGVDISGRFMTSGKKKAVVIRHLYNEDNVDISEDTLSPITDVNEAVDVSDLNATEIKMPEVKVPEIKAEQQDVNVNPEITALQTMLAECQENLKKLTSIEKRLDCLEQKMKGKVMVDENTWTNLLSRVTLLETEMLLSKKNDEFIEFNEVSEDYASCSDMDLLNPHRKSEVERPASIPLSSGYSTASSDSTPRASTVNYCGLNEISEETTIQKMERMKKMFEETAELLKCPNHYL

SEQ ID NO: 12775 - protein, 399 aa, Homo sapiens
MATGDLKRSLRNLEQVLRLLNYPEEVDCVGLIKGDPAASLPIISYSFTSYSPYVTELIMESNVELIAKNDLRFIDAVYKLLRDQFNYKPILTKKQFIQCGFAEWKIQIVCDILNCVMKKHKELSSLQKIPSQQRKKISSGKSEPPLGNEKISAEAVGVDISGRFMTSGKKKAVVIRHLYNEDNVDISEDTLSPITDVNEAVDVSDLNATEIKMPEVKVPEIKAEQQDVNVNPEITALQTMLAECQENLKKLTSIEKRLDCLEQKMKGKVMVDENTWTNLLSRVTLLETEMLLSKKNDEFIEFNEVSEDYASCSDMDLLNPHRKSEVERPASIPLSSGYSTASSDSTPRASTVNYCGLNEISENFPAWSATSSCSSLSWLLRGHTSYLSSQSFAWPLSCV

SEQ ID NO: 12776 - protein, 736 aa, Homo sapiens
MGSPLRFDGRVVLVTGAGAGLGRAYALAFAERGALVVVNDLGGDFKGVGKGSLAADKVVEEIRRRGGKAVANYDSVEEGEKVVKTALDAFGRIDVVVNNAGILRDRSFARISDEDWDIIHRVHLRGSFQVTRAAWEHMKKQKYGRIIMTSSASGIYGNFGQANYSAAKLGLLGLANSLAIEGRKSNIHCNTIAPNAGSRMTQTVMPEDLVEALKPEYVAPLVLWLCHESCEENGGLFEVGAGWIGKLRWERTLGAIVRQKNHPMTPEAVKANWKKICDFENASKPQSIQESTGSIIEVLSKIDSEGGVSANHTSRATSTATSGFAGAIGQKLPPFSYAYTELEAIMYALGVGASIKDPKDLKFIYEGSSDFSCLPTFGVIIGQKSMMGGGLAEIPGLSINFAKVLHGEQYLELYKPLPRAGKLKCEAVVADVLDKGSGVVIIMDVYSYSEKELICHNQFSLFLVGSGGFGGKRTSDKVKVAVAIPNRPPDAVLTDTTSLNQAALYRLSGDWNPLHIDPNFASLAGFDKPILHGLCTFGFSARRVLQQFADNDVSRFKAIKARFAKPVYPGQTLQTEMWKEGNRIHFQTKVQETGDIVISNAYVDLAPTSGTSAKTPSEGGKLQSTFVFEEIGRRLKDIGPEVVKKVNAVFEWHITKGGNIGAKWTIDLKSGSGKVYQGPAKGAADTTIILSDEDFMEVVLGKLDPQKAFFSGRLKARGNIMLSQKLQMILKDYAKL

SEQ ID NO: 12777 - protein, 761 aa, Homo sapiens
MVILEAPHLLRRKEPETPGLSSRIGPSLCPGFCRKRSVSCCFQNLCNNPMEKIISQCRFFVSMNDLGGDFKGVGKGSLAADKVVEEIRRRGGKAVANYDSVEEGEKVVKTALDAFGRIDVVVNNAGILRDRSFARISDEDWDIIHRVHLRGSFQVTRAAWEHMKKQKYGRIIMTSSASGIYGNFGQANYSAAKLGLLGLANSLAIEGRKSNIHCNTIAPNAGSRMTQTVMPEDLVEALKPEYVAPLVLWLCHESCEENGGLFEVGAGWIGKLRWERTLGAIVRQKNHPMTPEAVKANWKKICDFENASKPQSIQESTGSIIEVLSKIDSEGGVSANHTSRATSTATSGFAGAIGQKLPPFSYAYTELEAIMYALGVGASIKDPKDLKFIYEGSSDFSCLPTFGVIIGQKSMMGGGLAEIPGLSINFAKVLHGEQYLELYKPLPRAGKLKCEAVVADVLDKGSGVVIIMDVYSYSEKELICHNQFSLFLVGSGGFGGKRTSDKVKVAVAIPNRPPDAVLTDTTSLNQAALYRLSGDWNPLHIDPNFASLAGFDKPILHGLCTFGFSARRVLQQFADNDVSRFKAIKARFAKPVYPGQTLQTEMWKEGNRIHFQTKVQETGDIVISNAYVDLAPTSGTSAKTPSEGGKLQSTFVFEEIGRRLKDIGPEVVKKVNAVFEWHITKGGNIGAKWTIDLKSGSGKVYQGPAKGAADTTIILSDEDFMEVVLGKLDPQKAFFSGRLKARGNIMLSQKLQMILKDYAKL

SEQ ID NO: 12778 - protein, 718 aa, Homo sapiens
MGSPLRFDGRVVLVTGAGAVNDLGGDFKGVGKGSLAADKVVEEIRRRGGKAVANYDSVEEGEKVVKTALDAFGRIDVVVNNAGILRDRSFARISDEDWDIIHRVHLRGSFQVTRAAWEHMKKQKYGRIIMTSSASGIYGNFGQANYSAAKLGLLGLANSLAIEGRKSNIHCNTIAPNAGSRMTQTVMPEDLVEALKPEYVAPLVLWLCHESCEENGGLFEVGAGWIGKLRWERTLGAIVRQKNHPMTPEAVKANWKKICDFENASKPQSIQESTGSIIEVLSKIDSEGGVSANHTSRATSTATSGFAGAIGQKLPPFSYAYTELEAIMYALGVGASIKDPKDLKFIYEGSSDFSCLPTFGVIIGQKSMMGGGLAEIPGLSINFAKVLHGEQYLELYKPLPRAGKLKCEAVVADVLDKGSGVVIIMDVYSYSEKELICHNQFSLFLVGSGGFGGKRTSDKVKVAVAIPNRPPDAVLTDTTSLNQAALYRLSGDWNPLHIDPNFASLAGFDKPILHGLCTFGFSARRVLQQFADNDVSRFKAIKARFAKPVYPGQTLQTEMWKEGNRIHFQTKVQETGDIVISNAYVDLAPTSGTSAKTPSEGGKLQSTFVFEEIGRRLKDIGPEVVKKVNAVFEWHITKGGNIGAKWTIDLKSGSGKVYQGPAKGAADTTIILSDEDFMEVVLGKLDPQKAFFSGRLKARGNIMLSQKLQMILKDYAKL

SEQ ID NO: 12779 - protein, 171 aa, Homo sapiens
MEHSTFLSGLVLATLLSQVSPFKIPIEELEDRVFVNCNTSITWVEGTVGTLLSDITRLDLGKRILDPRGIYRCNGTDIYKDKESTVQVHYRMCQSCVELDPATVAGIIVTDVIATLLLALGVFCFAGHETGRLSGAADTQALLRNDQVYQPLRDRDDAQYSHLGGNWARNK

SEQ ID NO: 12780 - protein, 127 aa, Homo sapiens
MEHSTFLSGLVLATLLSQVSPFKIPIEELEDRVFVNCNTSITWVEGTVGTLLSDITRLDLGKRILDPRGIYRCNGTDIYKDKESTVQVHYRTADTQALLRNDQVYQPLRDRDDAQYSHLGGNWARNK

SEQ ID NO: 12781 - protein, 664 aa, Homo sapiens
MERPEEGKQSPPPQPWGRLLRLGAEEGEPHVLLRKREWTIGRRRGCDLSFPSNKLVSGDHCRIVVDEKSGQVTLEDTSTSGTVINKLKVVKKQTCPLQTGDVIYLVYRKNEPEHNVAYLYESLSEKQGMTQESFEANKENVFHGTKDTSGAGAGRGADPRVPPSSPATQVCFEEPQPSTSTSDLFPTASASSTEPSPAGRERSSSCGSGGGGISPKGSGPSVASDEVSSFASALPDRKTASFSSLEPQDQEDLEPVKKKMRGDGDLDLNGQLLVAQPRRNAQTVHEDVRAAAGKPDKMEETLTCIICQDLLHDCVSLQPCMHTFCAACYSGWMERSSLCPTCRCPVERICKNHILNNLVEAYLIQHPDKSRSEEDVQSMDARNKITQDMLQPKVRRSFSDEEGSSEDLLELSDVDSESSDISQPYVVCRQCPEYRRQAAQPPHCPAPEGEPGAPQALGDAPSTSVSLTTAVQDYVCPLQGSHALCTCCFQPMPDRRAEREQDPRVAPQQCAVCLQPFCHLYWGCTRTGCYGCLAPFCELNLGDKCLDGVLNNNSYESDILKNYLATRGLTWKNMLTESLVALQRGVFLLSDYRVTGDTVLCYCCGLRSFRELTYQYRQNIPASELPVAVTSRPDCYWGRNCRTQVKAHHAMKFNHICEQTRFKN

SEQ ID NO: 12782 - protein, 652 aa, Homo sapiens
MERPEEGKQSPPPQPWGRLLRLGAEEGEPHVLLRKREWTIGRRRGCDLSFPSNKLVSGDHCRIVVDEKSGQVTLEDTSTSGTVINKLKVVKKQTCPLQTGDVIYLVYRKNEPEHNVAYLYESLSEKQGMTQESFDTSGAGAGRGADPRVPPSSPATQVCFEEPQPSTSTSDLFPTASASSTEPSPAGRERSSSCGSGGGGISPKGSGPSVASDEVSSFASALPDRKTASFSSLEPQDQEDLEPVKKKMRGDGDLDLNGQLLVAQPRRNAQTVHEDVRAAAGKPDKMEETLTCIICQDLLHDCVSLQPCMHTFCAACYSGWMERSSLCPTCRCPVERICKNHILNNLVEAYLIQHPDKSRSEEDVQSMDARNKITQDMLQPKVRRSFSDEEGSSEDLLELSDVDSESSDISQPYVVCRQCPEYRRQAAQPPHCPAPEGEPGAPQALGDAPSTSVSLTTAVQDYVCPLQGSHALCTCCFQPMPDRRAEREQDPRVAPQQCAVCLQPFCHLYWGCTRTGCYGCLAPFCELNLGDKCLDGVLNNNSYESDILKNYLATRGLTWKNMLTESLVALQRGVFLLSDYRVTGDTVLCYCCGLRSFRELTYQYRQNIPASELPVAVTSRPDCYWGRNCRTQVKAHHAMKFNHICEQTRFKN

SEQ ID NO: 12783 - protein, 623 aa, Homo sapiens
MERPEEGKQSPPPQPWGRLLRLGAEEGEPHVLLRKREWTIGRRRGCDLSFPSNKLVSGDHCRIVVDEKSGQVTLEDTSTSGTVINKLKVVKKQTCPLQTGDVIYLVYRKNEPEHNVAYLYESLSEKQGMTQESFEMVPCCVAQAGLKLLGSSDPPTLASQSIVITGSGGGGISPKGSGPSVASDEVSSFASALPDRKTASFSSLEPQDQEDLEPVKKKMRGDGDLDLNGQLLVAQPRRNAQTVHEDVRAAAGKPDKMEETLTCIICQDLLHDCVSLQPCMHTFCAACYSGWMERSSLCPTCRCPVERICKNHILNNLVEAYLIQHPDKSRSEEDVQSMDARNKITQDMLQPKVRRSFSDEEGSSEDLLELSDVDSESSDISQPYVVCRQCPEYRRQAAQPPHCPAPEGEPGAPQALGDAPSTSVSLTTAVQDYVCPLQGSHALCTCCFQPMPDRRAEREQDPRVAPQQCAVCLQPFCHLYWGCTRTGCYGCLAPFCELNLGDKCLDGVLNNNSYESDILKNYLATRGLTWKNMLTESLVALQRGVFLLSDYRVTGDTVLCYCCGLRSFRELTYQYRQNIPASELPVAVTSRPDCYWGRNCRTQVKAHHAMKFNHICEQTRFKN

SEQ ID NO: 12784 - protein, 663 aa, Homo sapiens
MERPEEGKQSPPPQPWGRLLRLGAEEGEPHVLLRKREWTIGRRRGCDLSFPSNKLVSGDHCRIVVDEKSGQVTLEDTSTSGTVINKLKVVKKQTCPLQTGDVIYLVYRKNEPEHNVAYLYESLSEKQGMTQESFEANKENVFHGTKDTSGAGAGRGADPRVPPSSPATQVCFEEPQPSTSTSDLFPTASASSTEPSPAGRERSSSCGSGGGGISPKGSGPSVASDEVSSFASALPDRKTASFSSLEPQDQEDLEPVKKKMRGDGDLDLNGQLLVAQPRRNAQTVHEDVRAAAGKPDKMEETLTCIICQDLLHDCVSLQPCMHTFCAACYSGWMERSSLCPTCRCPVERICKNHILNNLVEAYLIQHPDKSRSEEDVQSMDARNKITQDMLQPKVRRSFSDEEGSSEDLLELSDVDSESSDISQPYVVCRQCPEYRRQAAQPPHCPAPEGEPGAPQALGDAPSTSVSLTTVQDYVCPLQGSHALCTCCFQPMPDRRAEREQDPRVAPQQCAVCLQPFCHLYWGCTRTGCYGCLAPFCELNLGDKCLDGVLNNNSYESDILKNYLATRGLTWKNMLTESLVALQRGVFLLSDYRVTGDTVLCYCCGLRSFRELTYQYRQNIPASELPVAVTSRPDCYWGRNCRTQVKAHHAMKFNHICEQTRFKN

SEQ ID NO: 12785 - protein, 572 aa, Homo sapiens
MERPEEGKQSPPPQPWGRLLRLGAEEGEPHVLLRKREWTIGRRRGCDLSFPSNKLVSGDHCRIVVDEKSGQVTLEDTSTSGTVINKLKVVKKQTCPLQTGDVIYLVYRKNEPEHRSGGGGISPKGSGPSVASDEVSSFASALPDRKTASFSSLEPQDQEDLEPVKKKMRGDGDLDLNGQLLVAQPRRNAQTVHEDVRAAAGKPDKMEETLTCIICQDLLHDCVSLQPCMHTFCAACYSGWMERSSLCPTCRCPVERICKNHILNNLVEAYLIQHPDKSRSEEDVQSMDARNKITQDMLQPKVRRSFSDEEGSSEDLLELSDVDSESSDISQPYVVCRQCPEYRRQAAQPPHCPAPEGEPGAPQALGDAPSTSVSLTTAVQDYVCPLQGSHALCTCCFQPMPDRRAEREQDPRVAPQQCAVCLQPFCHLYWGCTRTGCYGCLAPFCELNLGDKCLDGVLNNNSYESDILKNYLATRGLTWKNMLTESLVALQRGVFLLSDYRVTGDTVLCYCCGLRSFRELTYQYRQNIPASELPVAVTSRPDCYWGRNCRTQVKAHHAMKFNHICEQTRFKN

SEQ ID NO: 12786 - protein, 182 aa, Homo sapiens
MEQGKGLAVLILAIILLQGTLAQSIKGNHLVKVYDYQEDGSVLLTCDAEAKNITWFKDGKMIGFLTEDKKKWNLGSNAKDPRGMYQCKGSQNKSKPLQVYYRMCQNCIELNAATISGFLFAEIVSIFVLAVGVYFIAGQDGVRQSRASDKQTLLPNDQLYQPLKDREDDQYSHLQGNQLRRN

SEQ ID NO: 12787 - protein, 1065 aa, Homo sapiens
MKILILGIFLFLCSTPAWAKEKHYYIGIIETTWDYASDHGEKKLISVDTEHSNIYLQNGPDRIGRLYKKALYLQYTDETFRTTIEKPVWLGFLGPIIKAETGDKVYVHLKNLASRPYTFHSHGITYYKEHEGAIYPDNTTDFQRADDKVYPGEQYTYMLLATEEQSPGEGDGNCVTRIYHSHIDAPKDIASGLIGPLIICKKDSLDKEKEKHIDREFVVMFSVVDENFSWYLEDNIKTYCSEPEKVDKDNEDFQESNRMYSVNGYTFGSLPGLSMCAEDRVKWYLFGMGNEVDVHAAFFHGQALTNKNYRIDTINLFPATLFDAYMVAQNPGEWMLSCQNLNHLKAGLQAFFQVQECNKSSSKDNIRGKHVRHYYIAAEEIIWNYAPSGIDIFTKENLTAPGSDSAVFFEQGTTRIGGSYKKLVYREYTDASFTNRKERGPEEEHLGILGPVIWAEVGDTIRVTFHNKGAYPLSIEPIGVRFNKNNEGTYYSPNYNPQSRSVPPSASHVAPTETFTYEWTVPKEVGPTNADPVCLAKMYYSAVDPTKDIFTGLIGPMKICKKGSLHANGRQKDVDKEFYLFPTVFDENESLLLEDNIRMFTTAPDQVDKEDEDFQESNKMHSMNGFMYGNQPGLTMCKGDSVVWYLFSAGNEADVHGIYFSGNTYLWRGERRDTANLFPQTSLTLHMWPDTEGTFNVECLTTDHYTGGMKQKYTVNQCRRQSEDSTFYLGERTYYIAAVEVEWDYSPQREWEKELHHLQEQNVSNAFLDKGEFYIGSKYKKVVYRQYTDSTFRVPVERKAEEEHLGILGPQLHADVGDKVKIIFKNMATRPYSIHAHGVQTESSTVTPTLPGETLTYVWKIPERSGAGTEDSACIPWAYYSTVDQVKDLYSGLIGPLIVCRRPYLKVFNPRRKLEFALLFLVFDENESWYLDDNIKTYSDHPEKVNKDDEEFIESNKMHAINGRMFGNLQGLTMHVGDEVNWYLMGMGNEIDLHTVHFHGHSFQYKHRGVYSSDVFDIFPGTYQTLEMFPRTPGIWLLHCHVTDHIHAGMETTYTVLQNEDTKSG

SEQ ID NO: 12788 - protein, 87 aa, Homo sapiens
MAVSVLRLTVVLGLLVLFLTCYADDKPDKPDDKPDDSGKDPKPDFPKFLSLLGTEIIENAVEFILRSMSRSTGFMEFDDNEGKHSSK

SEQ ID NO: 12789 - protein, 72 aa, Homo sapiens
MAVSVLRLTVVLGLLVLFLTCYADDKPDKPDDKPDDSGKDPKPDFPKFLSLLGTEIIENAVEFILRSMSRST

SEQ ID NO: 12790 - protein, 165 aa, Homo sapiens
MADFDEIYEEEEDEERALEEQLLKYSPDPVVVRGSGHVTVFGLSNKFESEFPSSLTGKVAPEEFKASINRVNSCLKKNLPVNVRWLLCGCLCCCCTLGCSMWPVICLSKRTRRSIEKLLEWENNRLYHKLCLHWRLSKRKCETNNMMEYVILIEFLPKTPIFRPD

SEQ ID NO: 12791 - protein, 176 aa, Homo sapiens
MAAAGRGREQDSARFVYVTRFGSHQCSGVLQLGGRGAQGLWGQGPGAGCRQEKPREAMAVAGVQGGSELPLGSQLRVPTTPGVEAAASASSQLRASRVQSGTRQSARAGLIQKDAAKKYDFPIPLNEASKIMKKKKKVLVWNRVYKVISRMLEENEKYRHRLKCQRLSSESSNYTR

SEQ ID NO: 12792 - protein, 229 aa, Homo sapiens
MGNASFGSKEQKLLKRLRLLPALLILRAFKPHRKIRDYRVVVVGTAGVGKSTLLHKWASGNFRHEYLPTIENTYCQLLGCSHGVLSLHITDSKSGDGNRALQRHVIARGHAFVLVYSVTKKETLEELKAFYELICKIKGNNLHKFPIVLVGNKSDDTHREVALNDGATCAMEWNCAFMEISAKTDVNVQELFHMLLNYKKKPTTGLQEPEKKSQMPNTTEKLLDKCIIM

SEQ ID NO: 12793 - protein, 92 aa, Homo sapiens
MGQSLQEGRKQGRLLPAPSAHFLKHAHLASPSEVGGEPEIGSLCASHVLHMSPLYSVNLQVSPGSLTFHSLSLRSTSTRLQPQSTYIVGPLC

SEQ ID NO: 12794 - protein, 294 aa, Homo sapiens
MALLTPQGVKEVFQLQRPQGRERLRRLLNWEEFDEQRDSRRSILLDTLYESIIFAVGKGFPWVEVAQVVKFTEELLRETKGCSITEAVTILGNKLRDYRGHFNTTHLLALCDYFHHTFIRHYKLYQYVLGQDQQVDLTVAHLEVCMPPHPLPLAEGMDRDLWIHEQQVATLTEAEAQKRADVLLLKEALRLERENSLQKAFAAAAPAQPGQVLERQELESLICQAVHTQMELLQELLQRQIQNTFAILDLKLQKKTLNLNAPTPIPPPITSHAGQEEALKPQRASKGKKAKARK

SEQ ID NO: 12795 - protein, 1302 aa, Homo sapiens
MELYFGEYQHVQQEYGVHLRLASDDTQKSRSSQNSKAGSYGVSIRVQGIDGHPYIVLNNTERCLAGTSFSENGPPFPPPVINNLPLHSSNGSVPKENSEELQLPENPYAQPSPIRNLKQPLLHEGKNGVLDRKDGSVKPSHLLNFQRHPELLQPYDPEKNELNLQNHQPSESNWLKTLTEEGINNKKPWTCFPKPSNSQPTSPSLEDPAKSGVTAIRLCSSVVIEDPKKQTSVCVNVQSCTKERVGEEALFTSGRPLTAHSPHAHPETKKTRPDVLPFRRQDSAGPVLDGARSRRSSSSSTTPTSANSLYRFLLDDQECAIHADNVNRHENRRYIPFLPGTGRDIDTGSIPGVDQLIEKFDQKPGLQRRGRSGKRNRINTDDRKRSRSVDSAFPFGLQGNSEYLIEFSRNLGKSSEHLLRPSQVCPQRPLSQERRGKQSVGRTFAKLQGAAHGASCAHSRPPQPNIDGKVLETEGSQESTVIRAPSLGAQSKKEEEVKTATATLMLQNRATATSPDSGAKKISVKTFPSASNTQATPDLLKGQQELTQQTNEETAKQILYNYLKEGSTDNDDATKRKVNLVFEKIQTLKSRAAGSAQGNNQACNSTSEVKDLLEQKSKLTIEVAELQRQLQLEVKNQQNIKEERERMRANLEELRSQHNEKVEENSTLQQRLEESEGELRKNLEELFQVKMEREQHQTEIRDLQDQLSEMHDELDSAKRSEDREKGALIEELLQAKQDLQDLLIAKEEQEDLLRKRERELTALKGALKEEVSSHDQEMDKLKEQYDAELQALRESVEEATKNVEVLASRSNTSEQDQAGTEMRVKLLQEENEKLQGRSEELERRVAQLQRQIEDLKGDEAKAKETLKKYEGEIRQLEEALVHARKEEKEAVSARRALENELEAAQGNLSQTTQEQKQLSEKLKEESEQKEQLRRLKNEMENERWHLGKTIEKLQKEMADIVEASRTSTLELQNQLDEYKEKNRRELAEMQRQLKEKTLEAEKSRLTAMKMQDEMRLMEEELRDYQRAQDEALTKRQLLEQTLKDLEYELEAKSHLKDDRSRLVKQMEDKVSQLEMELEEERNNSDLLSERISRSREQMEQLRNELLQERAARQDLECDKISLERQNKDLKSRIIHLEGSYRSSKEGLVVQMEARIAELEDRLESEERDRANLQLSNRRLERKVKELVMQVDDEHLSLTDQKDQLSLRLKAMKRQVEEAEEEIDRLESSKKKLQRELEEQMDMNEHLQGQLNSMKKDLRLKKLPSKVLDDMDDDDDLSTDGGSLYEAPVSYTFSKDSTVASQI

SEQ ID NO: 12796 - protein, 612 aa, Homo sapiens
MEREQHQTEIRDLQDQLSEMHDELDSAKRSEDREKGALIEELLQAKQDLQDLLIAKEEQEDLLRKRERELTALKGALKEEVSSHDQEMDKLKEQYDAELQALRESVEEATKNVEVLASRSNTSEQDQAGTEMRVKLLQEENEKLQGRSEELERRVAQLQRQIEDLKGDEAKAKETLKKYEGEIRQLEEALVHARKEEKEAVSARRALENELEAAQGNLSQTTQEQKQLSEKLKEESEQKEQLRRLKNEMENERWHLGKTIEKLQKEMADIVEASRTSTLELQNQLDEYKEKNRRELAEMQRQLKEKTLEAEKSRLTAMKMQDEMRLMEEELRDYQRAQDEALTKRQLLEQTLKDLEYELEAKSHLKDDRSRLVKQMEDKVSQLEMELEEERNNSDLLSERISRSREQMEQLRNELLQERAARQDLECDKISLERQNKDLKSRIIHLEGSYRSSKEGLVVQMEARIAELEDRLESEERDRANLQLSNRRLERKVKELVMQVDDEHLSLTDQKDQLSLRLKAMKRQVEEAEEEIDRLESSKKKLQRELEEQMDMNEHLQGQLNSMKKDLRLKKLPSKVLDDMDDDDDLSTDGGSLYEAPVSYTFSKDSTVASQI

SEQ ID NO: 12797 - protein, 360 aa, Homo sapiens
MAEPDLECEQIRLKCIRKEGFFTVPPEHRLGRCRSVKEFEKLNRIGEGTYGIVYRARDTQTDEIVALKKVRMDKEKDGIPISSLREITLLLRLRHPNIVELKEVVVGNHLESIFLVMGYCEQDLASLLENMPTPFSEAQVKCIVLQVLRGLQYLHRNFIIHRDLKVSNLLMTDKGCVKTADFGLARAYGVPVKPMTPKVVTLWYRAPELLLGTTTQTTSIDMWAVGCILAELLAHRPLLPGTSEIHQIDLIVQLLGTPSENIWPGFSKLPLVGQYSLRKQPYNNLKHKFPWLSEAGLRLLHFLFMYDPKKRATAGDCLESSYFKEKPLPCEPELMPTFPHHRNKRAAPATSEGQSKRCKP

SEQ ID NO: 12798 - protein, 289 aa, Homo sapiens
MDKEKDGIPISSLREITLLLRLRHPNIVELKEVVVGNHLESIFLVMGYCEQDLASLLENMPTPFSEAQVKCIVLQVLRGLQYLHRNFIIHRDLKVSNLLMTDKGCVKTADFGLARAYGVPVKPMTPKVVTLWYRAPELLLGTTTQTTSIDMWAVGCILAELLAHRPLLPGTSEIHQIDLIVQLLGTPSENIWPGFSKLPLVGQYSLRKQPYNNLKHKFPWLSEAGLRLLHFLFMYDPKKRATAGDCLESSYFKEKPLPCEPELMPTFPHHRNKRAAPATSEGQSKRCKP

SEQ ID NO: 12799 - protein, 283 aa, Homo sapiens
MDKEKDGIPISSLREITLLLRLRHPNIVELKEVVVGNHLESIFLVMGYCEQDLASLLENMPTPFSEAQVKCIVLQVLRGLQYLHRNFIIHRDLKVSNLLMTDKGCVKTADFGLARAYGVPVKPMTPKVVTLWYRAPELLLGTTTQTTSIDMWAVGCILAELLAHRPLLPGTSEIHQIDLIVQLLGTPSENIWPGFSKLPLVGQYSLRKQPYNNLKHKFPWLSEAGLRLLHFLFMATAGDCLESSYFKEKPLPCEPELMPTFPHHRNKRAAPATSEGQSKRCKP

SEQ ID NO: 12800 - protein, 272 aa, Homo sapiens
MDKEKDGIPISSLREITLLLRLRHPNIVELKEVVVGNHLESIFLVMGYCEQDLASLLENMPTPFSEAQVKCIVLQVLRGLQYLHRNFIIHRDLKVSNLLMTDKGCVKTADFGLARAYGVPVKPMTPKVVTLWYRAPELLLGTTTQTTSIDMWAVGCILAELLAHRPLLPGTSEIHQIDLIVQLLGTPSENIWPGFSKLPLVGQYSLRKQPYNNLKHKFPWLSEAGLRLLHFLFMYDPKKRATAGDCLESSYFKEKPLRLPISGVCEGCREPG

SEQ ID NO: 12801 - protein, 188 aa, Homo sapiens
MAEPDLECEQIRLKCIRKEGFFTVPPEHRLGRCRSVKEFEKLNRIGEDRARDTQTDEIVALKKVRMDKEKDGIPISSLREITLLLRLRHPNIVELKEVVVGNHLESIFLVMGYCEQDLASLLENMPTPFSEAQVKCIVLQVLRGLQYLHRNFIIHRDLKVSNLLMTDKGCVKTGGCNLGQALSLDGTW

SEQ ID NO: 12802 - protein, 154 aa, Homo sapiens
MAEPDLECEQIRLKCIRKEGFFTVPPEHRLGRCRSVKEFEKLNRIGEDRARDTQTDEIVALKKVRMDKEKDGIPISSLREITLLLRLRHPNIVELKEVVVGNHLESIFLVMGYCEQDLASLLENMPTPFSEAQVRGRGAWGGGMGFMGPCGAHL

SEQ ID NO: 12803 - protein, 289 aa, Homo sapiens
MDKEKDGIPISSLREITLLLRLRHPNIVELKEVVVGNHLESIFLVMGYCEQDLASLLENMPTPFSEAQVKCIVLQVLRGLQYLHRNFIIHRDLKVSNLLMTDKGCVKTGGCNLGQALSLDGTWMTPKVVTLWYRAPELLLGTTTQTTSIDMWAVGCILAELLAHRPLLPGTSEIHQIDLIVQLLGTPSENIWPGFSKLPLVGQYSLRKQPYNNLKHKFPWLSEAGLRLLHFLFMYDPKKRATAGDCLESSYFKEKPLPCEPELMPTFPHHRNKRAAPATSEGQSKRCKP

SEQ ID NO: 12804 - protein, 1710 aa, Homo sapiens
MNGHSDEESVRNSSGESSQSDDDSGSASGSGSGSSSGSSSDGSSSQSGSSDSDSGSESGSQSESESDTSRENKVQAKPPKVDGAEFWKSSPSILAVQRSAILKKQQQQQQQQQHQASSNSGSEEDSSSSEDSDDSSSEVKRKKHKDEDWQMSGSGSPSQSGSDSESEEEREKSSCDETESDYEPKNKVKSRKPQNRSKSKNGKKILGQKKRQIDSSEEDDDEEDYDNDKRSSRRQATVNVSYKEDEEMKTDSDDLLEVCGEDVPQPEEEEFETIERFMDCRIGRKGATGATTTIYAVEADGDPNAGFEKNKEPGEIQYLIKWKGWSHIHNTWETEETLKQQNVRGMKKLDNYKKKDQETKRWLKNASPEDVEYYNCQQELTDDLHKQYQIVERIIAHSNQKSAAGYPDYYCKWQGLPYSECSWEDGALISKKFQACIDEYFSRNQSKTTPFKDCKVLKQRPRFVALKKQPSYIGGHEGLELRDYQLNGLNWLAHSWCKGNSCILADEMGLGKTIQTISFLNYLFHEHQLYGPFLLVVPLSTLTSWQREIQTWASQMNAVVYLGDINSRNMIRTHEWTHHQTKRLKFNILLTTYEILLKDKAFLGGLNWAFIGVDEAHRLKNDDSLLYKTLIDFKSNHRLLITGTPLQNSLKELWSLLHFIMPEKFSSWEDFEEEHGKGREYGYASLHKELEPFLLRRVKKDVEKSLPAKVEQILRMEMSALQKQYYKWILTRNYKALSKGSKGSTSGFLNIMMELKKCCNHCYLIKPPDNNEFYNKQEALQHLIRSSGKLILLDKLLIRLRERGNRVLIFSQMVRMLDILAEYLKYRQFPFQRLDGSIKGELRKQALDHFNAEGSEDFCFLLSTRAGGLGINLASADTVVIFDSDWNPQNDLQAQARAHRIGQKKQVNIYRLVTKGSVEEDILERAKKKMVLDHLVIQRMDTTGKTVLHTGSAPSSSTPFNKEELSAILKFGAEELFKEPEGEEQEPQEMDIDEILKRAETHENEPGPLTVGDELLSQFKVANFSNMDEDDIELEPERNSKNWEEIIPEDQRRRLEEEERQKELEEIYMLPRMRNCAKQISFNGSEGRRSRSRRYSGSDSDSISEGKRPKKRGRPRTIPRENIKGFSDAEIRRFIKSYKKFGGPLERLDAIARDAELVDKSETDLRRLGELVHNGCIKALKDSSSGTERTGGRLGKVKGPTFRISGVQVNAKLVISHEEELIPLHKSIPSDPEERKQYTIPCHTKAAHFDIDWGKEDDSNLLIGIYEYGYGSWEMIKMDPDLSLTHKILPDDPDKKPQAKQLQTRADYLIKLLSRDLAKKEALSGAGSSKRRKARAKKNKAMKSIKVKEEIKSDSSPLPSEKSDEDDDKLSESKSDGRERSKKSSVSDAPVHITASGEPVPISEESEELDQKTFSICKERMRPVKAALKQLDRPEKGLSEREQLEHTRQCLIKIGDHITECLKEYTNPEQIKQWRKNLWIFVSKFTEFDARKLHKLYKHAIKKRQESQQNSDQNSNLNPHVIRNPDVERLKENTNHDDSSRDSYSSDRHLTQYHDHHKDRHQGDSYKKSDSRKRPYSSFSNGKDHRDWDHYKQDSRYYSDREKHRKLDDHRSRDHRSNLEGSLKDRSHSDHRSHSDHRLHSDHRSSSEYTHHKSSRDYRYHSDWQMDHRASSSGPRSPLDQRSPYGSRSPFEHSVEHKSTPEHTWSSRKT

SEQ ID NO: 12805 - protein, 1709 aa, Homo sapiens
MNGHSDEESVRNSSGESSQSDDDSGSASGSGSGSSSGSSSDGSSSQSGSSDSDSGSESGSQSESESDTSRENKVQAKPPKVDGAEFWKSSPSILAVQRSAILKKQQQQQQQQQHQASSNSGSEEDSSSSEDSDDSSSEVKRKKHKDEDWQMSGSGSPSQSGSDSESEEEREKSSCDETESDYEPKNKVKSRKPQNRSKSKNGKKILGQKKRQIDSSEEDDDEEDYDNDKRSSRRQATVNVSYKEDEEMKTDSDDLLEVCGEDVPQPEEEEFETIERFMDCRIGRKGATGATTTIYAVEADGDPNAGFEKNKEPGEIQYLIKWKGWSHIHNTWETEETLKQQNVRGMKKLDNYKKKDQETKRWLKNASPEDVEYYNCQQELTDDLHKQYQIVERIIAHSNQKSAAGYPDYYCKWQGLPYSECSWEDGALISKKFQACIDEYFSRNQSKTTPFKDCKVLKQRPRFVALKKQPSYIGGHEGLELRDYQLNGLNWLAHSWCKGNSCILADEMGLGKTIQTISFLNYLFHEHQLYGPFLLVVPLSTLTSWQREIQTWASQMNAVVYLGDINSRNMIRTHEWTHHQTKRLKFNILLTTYEILLKDKAFLGGLNWAFIGVDEAHRLKNDDSLLYKTLIDFKSNHRLLITGTPLQNSLKELWSLLHFIMPEKFSSWEDFEEEHGKGREYGYASLHKELEPFLLRRVKKDVEKSLPAKVEQILRMEMSALQKQYYKWILTRNYKALSKGSKGSTSGFLNIMMELKKCCNHCYLIKPPDNNEFYNKQEALQHLIRSSGKLILLDKLLIRLRERGNRVLIFSQMVRMLDILAEYLKYRQFPFQRLDGSIKGELRKQALDHFNAEGSEDFCFLLSTRAGGLGINLASADTVVIFDSDWNPQNDLQAQARAHRIGQKKQVNIYRLVTKGSVEEDILERAKKKMVLDHLVIQRMDTTGKTVLHTGSAPSSSTPFNKEELSAILKFGAEELFKEPEGEEQEPQEMDIDEILKRAETHENEPGPLTVGDELLSQFKVANFSNMDEDDIELEPERNSKNWEEIIPEDQRRRLEEEERQKELEEIYMLPRMRNCAKQISFNGSEGRRSRSRRYSGSDSDSISEGKRPKKRGRPRTIPRENIKGFSDAEIRRFIKSYKKFGGPLERLDAIARDAELVDKSETDLRRLGELVHNGCIKALKDSSSGTERTGGRLGKVKGPTFRISGVQVNAKLVISHEEELIPLHKSIPSDPEERKQYTIPCHTKAAHFDIDWGKEDDSNLLIGIYEYGYGSWEMIKMDPDLSLTHKILPDDPDKKPQAKQLQTRADYLIKLLSRDLAKKEALSGAGSSKRRKARAKKNKAMKSIKVKEEIKSDSSPLPSEKSDEDDDKLSESKSDGRERSKKSSVSDAPVHITASGEPVPISEESEELDQKTFSICKERMRPVKAALKQLDRPEKGLSEREQLEHTRQCLIKIGDHITECLKEYTNPEQIKQWRKNLWIFVSKFTEFDARKLHKLYKHAIKKRQESQQNSDQNSNLNPHVIRNPDVERLKENTNHDDSSRDSYSSDRHLTQYHDHHKDRHQGDSYKKSDSRKRPYSSFSNGKDHRDWDHYKQDSRYYSDREKHRKLDDHRSRDHRSNLEGSLKDRSHSDHRSHSDHRLHSDHRSSSEYTHHKSSRDYRYHSDWQMDHRASSSGPRSPLDQRSYGSRSPFEHSVEHKSTPEHTWSSRKT

SEQ ID NO: 12806 - protein, 523 aa, Homo sapiens
MKKFKRRLSLTLRGSQTIDESLSELAEQMTIEENSSKDNEPIVKNGRPPTSHSMHSFLHQYTGSFKKPPLRRPHSVIGGSLGSFMAMPRNGSRLDIVHENLKMGSDGESDQASGTSSDEVQSPTGVCLRNRIHRRISMEDLNKRLSLPADIRIPDGYLEKLQINSPPFDQPMSRRSRRASLSEIGFGKMETYIKLEKLGEGTYATVYKGRSKLTENLVALKEIRLEHEEGAPCTAIREVSLLKDLKHANIVTLHDIVHTDKSLTLVFEYLDKDLKQYMDDCGNIMSMHNVKLFLYQILRGLAYCHRRKVLHRDLKPQNLLINEKGELKLADFGLARAKSVPTKTYSNEVVTLWYRPPDVLLGSSEYSTQIDMWGVGCIFFEMASGRPLFPGSTVEDELHLIFRLLGTPSQETWPGISSNEEFKNYNFPKYKPQPLINHAPRLDSEGIELITKFLQYESKKRVSAEEAMKHVYFRSLGPRIHALPESVSIFSLKEIQLQKDPGFRNSSYPETGHGKNRRQSMLF

SEQ ID NO: 12807 - protein, 523 aa, Homo sapiens
MKKFKRRLSLTLRGSQTIDESLSELAEQMTIEENSSKDNEPIVKNGRPPTSHSMHSFLHQYTGSFKKPPLRRPHSVIGGSLGSFMAMPRNGSRLDIVHENLKMGSDGESDQASGTSSDEVQSPTGVCLRNRIHRRISMEDLNKRLSLPADIRIPDGYLEKLQINSPPFDQPMSRRSRRASLSEIGFGKMETYIKLEKLGEGTYATVYKGRSKLTENLVALKEIRLEHEEGAPCTAIREVSLLKDLKHANIVTLHDIVHTDKSLTLVFEYLDKDLKQYMDDCGNIMSMHNVKLFLYQILRGLAYCHRRKVLHRDLKPQNLLINEKGELKLADFGLARAKSVPTKTYSNEVVTLWYRPPDVLLGSSEYSTQIDMWGVGCIFFEMASGRPLFPGSTVEDELHLIFRLLGTPSQETWPGISSNEEFKNYNFPKYKPQPLINHAPRLDSEGIELITKFLQYESKKRVSAEEAMKHVYFRSLGPRIHALPESVSIFSLKEIQLQKDPGFRNSSYPETGVFVINHFTCRS

SEQ ID NO: 12808 - protein, 1912 aa, Homo sapiens
MASGLGSPSPCSAGSEEEDMDALLNNSLPPPHPENEEDPEEDLSETETPKLKKKKKPKKPRDPKIPKSKRQKKERMLLCRQLGDSSGEGPEFVEEEEEVALRSDSEGSDYTPGKKKKKKLGPKKEKKSKSKRKEEEEEEDDDDDSKEPKSSAQLLEDWGMEDIDHVFSEEDYRTLTNYKAFSQFVRPLIAAKNPKIAVSKMMMVLGAKWREFSTNNPFKGSSGASVAAAAAAAVAVVESMVTATEVAPPPPPVEVPIRKAKTKEGKGPNARRKPKGSPRVPDAKKPKPKKVAPLKIKLGGFGSKRKRSSSEDDDLDVESDFDDASINSYSVSDGSTSRSSRSRKKLRTTKKKKKGEEEVTAVDGYETDHQDYCEVCQQGGEIILCDTCPRAYHMVCLDPDMEKAPEGKWSCPHCEKEGIQWEAKEDNSEGEEILEEVGGDLEEEDDHHMEFCRVCKDGGELLCCDTCPSSYHIHCLNPPLPEIPNGEWLCPRCTCPALKGKVQKILIWKWGQPPSPTPVPRPPDADPNTPSPKPLEGRPERQFFVKWQGMSYWHCSWVSELQLELHCQVMFRNYQRKNDMDEPPSGDFGGDEEKSRKRKNKDPKFAEMEERFYRYGIKPEWMMIHRILNHSVDKKGHVHYLIKWRDLPYDQASWESEDVEIQDYDLFKQSYWNHRELMRGEEGRPGKKLKKVKLRKLERPPETPTVDPTVKYERQPEYLDATGGTLHPYQMEGLNWLRFSWAQGTDTILADEMGLGKTVQTAVFLYSLYKEGHSKGPFLVSAPLSTIINWEREFEMWAPDMYVVTYVGDKDSRAIIRENEFSFEDNAIRGGKKASRMKKEASVKFHVLLTSYELITIDMAILGSIDWACLIVDEAHRLKNNQSKFFRVLNGYSLQHKLLLTGTPLQNNLEELFHLLNFLTPERFHNLEGFLEEFADIAKEDQIKKLHDMLGPHMLRRLKADVFKNMPSKTELIVRVELSPMQKKYYKYILTRNFEALNARGGGNQVSLLNVVMDLKKCCNHPYLFPVAAMEAPKMPNGMYDGSALIRASGKLLLLQKMLKNLKEGGHRVLIFSQMTKMLDLLEDFLEHEGYKYERIDGGITGNMRQEAIDRFNAPGAQQFCFLLSTRAGGLGINLATADTVIIYDSDWNPHNDIQAFSRAHRIGQNKKVMIYRFVTRASVEERITQVAKKKMMLTHLVVRPGLGSKTGSMSKQELDDILKFGTEELFKDEATDGGGDNKEGEDSSVIHYDDKAIERLLDRNQDETEDTELQGMNEYLSSFKVAQYVVREEEMGEEEEVEREIIKQEESVDPDYWEKLLRHHYEQQQEDLARNLGKGKRIRKQVNYNDGSQEDRDWQDDQSDNQSDYSVASEEGDEDFDERSEAPRRPSRKGLRNDKDKPLPPLLARVGGNIEVLGFNARQRKAFLNAIMRYGMPPQDAFTTQWLVRDLRGKSEKEFKAYVSLFMRHLCEPGADGAETFADGVPREGLSRQHVLTRIGVMSLIRKKVQEFEHVNGRWSMPELAEVEENKKMSQPGSPSPKTPTPSTPGDTQPNTPAPVPPAEDGIKIEENSLKEEESIEGEKEVKSTAPETAIECTQAPAPASEDEKVVVEPPEGEEKVEKAEVKERTEEPMETEPKGAADVEKVEEKSAIDLTPIVVEDKEEKKEEEEKKEVMLQNGETPKDLNDEKQKKNIKQRFMFNIADGGFTELHSLWQNEERAATVTKKTYEIWHRRHDYWLLAGIINHGYARWQDIQNDPRYAILNEPFKGEMNRGNFLEIKNKFLARRFKLLEQALVIEEQLRRAAYLNMSEDPSHPSMALNTRFAEVECLAESHQHLSKESMAGNKPANAVLHKVLKQLEELLSDMKADVTRLPATIARIPPVAVRLQMSERNILSRLANRAPEPTPQQVAQQQ

SEQ ID NO: 12809 - protein, 1940 aa, Homo sapiens
MASGLGSPSPCSAGSEEEDMDALLNNSLPPPHPENEEDPEEDLSETETPKLKKKKKPKKPRDPKIPKSKRQKKERMLLCRQLGDSSGEGPEFVEEEEEVALRSDSEGSDYTPGKKKKKKLGPKKEKKSKSKRKEEEEEEDDDDDSKEPKSSAQLLEDWGMEDIDHVFSEEDYRTLTNYKAFSQFVRPLIAAKNPKIAVSKMMMVLGAKWREFSTNNPFKGSSGASVAAAAAAAVAVVESMVTATEVAPPPPPVEVPIRKAKTKEGKGPNARRKPKGSPRVPDAKKPKPKKVAPLKIKLGGFGSKRKRSSSEDDDLDVESDFDDASINSYSVSDGSTSRSSRSRKKLRTTKKKKKGEEEVTAVDGYETDHQDYCEVCQQGGEIILCDTCPRAYHMVCLDPDMEKAPEGKWSCPHCEKEGIQWEAKEDNSEGEEILEEVGGDLEEEDDHHMEFCRVCKDGGELLCCDTCPSSYHIHCLNPPLPEIPNGEWLCPRCTCPALKGKVQKILIWKWGQPPSPTPVPRPPDADPNTPSPKPLEGRPERQFFVKWQGMSYWHCSWVSELQLELHCQVMFRNYQRKNDMDEPPSGDFGGDEEKSRKRKNKDPKFAEMEERFYRYGIKPEWMMIHRILNHSVDKKGHVHYLIKWRDLPYDQASWESEDVEIQDYDLFKQSYWNHRELMRGEEGRPGKKLKKVKLRKLERPPETPTVDPTVKYERQPEYLDATGGTLHPYQMEGLNWLRFSWAQGTDTILADEMGLGKTVQTAVFLYSLYKEGHSKGPFLVSAPLSTIINWEREFEMWAPDMYVVTYVGDKDSRAIIRENEFSFEDNAIRGGKKASRMKKEASVKFHVLLTSYELITIDMAILGSIDWACLIVDEAHRLKNNQSKFFRVLNGYSLQHKLLLTGTPLQNNLEELFHLLNFLTPERFHNLEGFLEEFADIAKEDQIKKLHDMLGPHMLRRLKADVFKNMPSKTELIVRVELSPMQKKYYKYILTRNFEALNARGGGNQVSLLNVVMDLKKCCNHPYLFPVAAMEAPKMPNGMYDGSALIRASGKLLLLQKMLKNLKEGGHRVLIFSQMTKMLDLLEDFLEHEGYKYERIDGGITGNMRQEAIDRFNAPGAQQFCFLLSTRAGGLGINLATADTVIIYDSDWNPHNDIQAFSRAHRIGQNKKVMIYRFVTRASVEERITQVAKKKMMLTHLVVRPGLGSKTGSMSKQELDDILKFGTEELFKDEATDGGGDNKEGEDSSVIHYDDKAIERLLDRNQDETEDTELQGMNEYLSSFKVAQYVVREEEMGEEEEVEREIIKQEESVDPDYWEKLLRHHYEQQQEDLARNLGKGKRIRKQVNYNDGSQEDRGVCGRPRPPPMGRSTRAVGPAHLPSLPPDWQDDQSDNQSDYSVASEEGDEDFDERSEAPRRPSRKGLRNDKDKPLPPLLARVGGNIEVLGFNARQRKAFLNAIMRYGMPPQDAFTTQWLVRDLRGKSEKEFKAYVSLFMRHLCEPGADGAETFADGVPREGLSRQHVLTRIGVMSLIRKKVQEFEHVNGRWSMPELAEVEENKKMSQPGSPSPKTPTPSTPGDTQPNTPAPVPPAEDGIKIEENSLKEEESIEGEKEVKSTAPETAIECTQAPAPASEDEKVVVEPPEGEEKVEKAEVKERTEEPMETEPKGAADVEKVEEKSAIDLTPIVVEDKEEKKEEEEKKEVMLQNGETPKDLNDEKQKKNIKQRFMFNIADGGFTELHSLWQNEERAATVTKKTYEIWHRRHDYWLLAGIINHGYARWQDIQNDPRYAILNEPFKGEMNRGNFLEIKNKFLARRFKLLEQALVIEEQLRRAAYLNMSEDPSHPSMALNTRFAEVECLAESHQHLSKESMAGNKPANAVLHKVLKQLEELLSDMKADVTRLPATIARIPPVAVRLQMSERNILSRLANRAPEPTPQQVAQQQ

SEQ ID NO: 12810 - protein, 201 aa, Homo sapiens
MGNLFGRKKQSRVTEQDKAILQLKQQRDKLRQYQKRIAQQLERERALARQLLRDGRKERAKLLLKKKRYQEQLLDRTENQISSLEAMVQSIEFTQIEMKVMEGLQFGNECLNKMHQVMSIEEVERILDETQEAVEYQRQIDELLAGSFTQEDEDAILEELSAITQEQIELPEVPSEPLPEKIPENVPVKARPRQAELVAAS

SEQ ID NO: 12811 - protein, 223 aa, Homo sapiens
MTWRHHVRLLFTVSLALQIINLGNSYQREKHNGGREEVTKVATQKHRQSPLNWTSSHFGEVTGSAEGWGPEEPLPYSRAFGEGASARPRCCRNGGTCVLGSFCVCPAHFTGRYCEHDQRRSECGALEHGAWTLRACHLCRCIFGALHCLPLQTPDRCDPKDFLASHAHGPSAGGAPSLLLLLPCALLHRLLRPDAPAHPRSLVPSVLQRERRPCGRPGLGHRL

SEQ ID NO: 12812 - protein, 1395 aa, Homo sapiens
MLLPLPPQSSKPVPKKSQSSKIVPSHHDPSEKTGENCQTKISPSSLQESPSSLQGALKKRSAFEDLTNASQCQPVQPKKEANKEFVKVVSKKINRNTHALGLAKKNKRNLKWHKLEVTPVVASTTVVPNIMEKPLILDISTTSKTPNTEEASLFRKPLVLKEEPTIEDETLINKSLSLKKCSNHEEVSLLEKLQPLQEESDSDDAFVIEPMTFKKTHKTEEAAITKKTLSLKKKMCASQRKQSCQEESLAVQDVNMEEDSFFMESMSFKKKPKTEESIPTHKLSSLKKKCTIYGKICHFRKPPVLQTTICGAMSSIKKPTTEKETLFQELSVLQEKHTTEHEMSILKKSLALQKTNFKEDSLVKESLAFKKKPSTEEAIMMPVILKEQCMTEGKRSRLKPLVLQEITSGEKSLIMKPLSIKEKPSTEKESFSQEPSALQKKHTTQEEVSILKEPSSLLKSPTEESPFDEALAFTKKCTIEEAPPTKKPLILKRKHATQGTMSHLKKPLILQTTSGEKSLIKEPLPFKEEKVSLKKKCTTQEMMSICPELLDFQDMIGEDKNSFFMEPMSFRKNPTTEETVLTKTSLSLQEKKITQGKMSHLKKPLVLQKITSEEESFYKKLLPFKMKSTTEEKFLSQEPSALKEKHTTLQEVSLSKESLAIQEKATTEEEFSQELFSLHVKHTNKSGSLFQEALVLQEKTDAEEDSLKNLLALQEKSTMEEESLINKLLALKEELSAEAATNIQTQLSLKKKSTSHGKVFFLKKQLALNETINEEEFLNKQPLALEGYPSIAEGETLFKKLLAMQEEPSIEKEAVLKEPTIDTEAHFKEPLALQEEPSTEKEAVLKEPSVDTEAHFKETLALQEKPSIEQEALFKRHSALWEKPSTEKETIFKESLDLQEKPSIKKETLLKKPLALKMSTINEAVLFEDMIALNEKPTTGKELSFKEPLALQESPTYKEDTFLKTLLVPQVGTSPNVSSTAPESITSKSSIATMTSVGKSGTINEAFLFEDMITLNEKPTTGKELSFKEPLALQESPTCKEDTFLETFLIPQIGTSPYVFSTTPESITEKSSIATMTSVGKSRTTTESSACESASDKPVSPQAKGTPKEITPREDIDEDSSDPSFNPMYAKEIFSYMKEREEQFILTDYMNRQIEITSDMRAILVDWLVEVQVSFEMTHETLYLAVKLVDLYLMKAVCKKDKLQLLGATAFMIAAKFEEHNSPRVDDFVYICDDNYQRSEVLSMEINILNVLKCDINIPIAYHFLRRYARCIHTNMKTLTLSRYICEMTLQEYHYVQEKASKLAAASLLLALYMKKLGYWVPFLEHYSGYSISELHPLVRQLNKLLTFSSYDSLKAVYYKYSHPVFFEVAKIPALDMLKLEEILNCDCEAQGLVL

SEQ ID NO: 12813 - protein, 291 aa, Homo sapiens
MLLPLPPQSSKPVPKKSQSSKIVPSHHDPSEKTGENCQTKISPSSLQESPSSLQGALKKRSAFEDLTNVSFEMTHETLYLAVKLVDLYLMKAVCKKDKLQLLGATAFMIAAKFEEHNSPRVDDFVYICDDNYQRSEVLSMEINILNVLKCDINIPIAYHFLRRYARCIHTNMKTLTLSRYICEMTLQEYHYVQEKASKLAAASLLLALYMKKLGYWVPFLEHYSGYSISELHPLVRQLNKLLTFSSYDSLKAVYYKYSHPVFFEVAKIPALDMLKLEEILNCDCEAQGLVL

SEQ ID NO: 12814 - protein, 111 aa, Homo sapiens
MLLPLPPQSSKPVPKKSQSSKIVPSHHDPSEKTGENCQTKISPSSLQESPSSLQGALKKRSAFEDLTNASQCQPVQPKKEANKEFVKVVSKKINRNTHALGLAKKNKRNLK

SEQ ID NO: 12815 - protein, 486 aa, Homo sapiens
MNGTLDHPDQPDLDAIKMFVGQVPRTWSEKDLRELFEQYGAVYEINVLRDRSQNPPQSKGCCFVTFYTRKAALEAQNALHNMKVLPGMHHPIQMKPADSEKNNAVEDRKLFIGMISKKCTENDIRVMFSSFGQIEECRILRGPDGLSRGCAFVTFTTRAMAQTAIKAMHQAQTMEGCSSPMVVKFADTQKDKEQKRMAQQLQQQMQQISAASVWGNLAGLNTLGPQYLALYLQLLQQTASSGNLNTLSSLHPMGGLNAMQLQNLAALAAAASAAQNTPSGTNALTTSSSPLSVLTSSGSSPSSSSSNSVNPIASLGALQTLAGATAGLNVGSLAGMAALNGGLGSSGLSNGTGSTMEALTQAYSGIQQYAAAALPTLYNQNLLTQQSIGAAGSQKEGPEGANLFIYHLPQEFGDQDLLQMFMPFGNVVSAKVFIDKQTNLSKCFGFVSYDNPVSAQAAIQSMNGFQIGMKRLKVQLKRSKNDSKPY

SEQ ID NO: 12816 - protein, 482 aa, Homo sapiens
MNGTLDHPDQPDLDAIKMFVGQVPRTWSEKDLRELFEQYGAVYEINVLRDRSQNPPQSKGCCFVTFYTRKAALEAQNALHNMKVLPGMHHPIQMKPADSEKNNAVEDRKLFIGMISKKCTENDIRVMFSSFGQIEECRILRGPDGLSRGCAFVTFTTRAMAQTAIKAMHQAQTMEGCSSPMVVKFADTQKDKEQKRMAQQLQQQMQQISAASVWGNLAGLNTLGPQYLALLQQTASSGNLNTLSSLHPMGGLNAMQLQNLAALAAAASAAQNTPSGTNALTTSSSPLSVLTSSGSSPSSSSSNSVNPIASLGALQTLAGATAGLNVGSLAGMAALNGGLGSSGLSNGTGSTMEALTQAYSGIQQYAAAALPTLYNQNLLTQQSIGAAGSQKEGPEGANLFIYHLPQEFGDQDLLQMFMPFGNVVSAKVFIDKQTNLSKCFGFVSYDNPVSAQAAIQSMNGFQIGMKRLKVQLKRSKNDSKPY

SEQ ID NO: 12817 - protein, 483 aa, Homo sapiens
MNGTLDHPDQPDLDAIKMFVGQVPRTWSEKDLRELFEQYGAVYEINVLRDRSQNPPQSKGCCFVTFYTRKAALEAQNALHNMKVLPGMHHPIQMKPADSEKNNAVEDRKLFIGMISKKCTENDIRVMFSSFGQIEECRILRGPDGLSRGCAFVTFTTRAMAQTAIKAMHQAQTMEGCSSPMVVKFADTQKDKEQKRMAQQLQQQMQQISAASVWGNLAGLNTLGPQYLALLQQTASSGNLNTLSSLHPMGGLNAMQLQNLAALAAAASAAQNTPSGTNALTTSSSPLSVLTSSAGSSPSSSSSNSVNPIASLGALQTLAGATAGLNVGSLAGMAALNGGLGSSGLSNGTGSTMEALTQAYSGIQQYAAAALPTLYNQNLLTQQSIGAAGSQKEGPEGANLFIYHLPQEFGDQDLLQMFMPFGNVVSAKVFIDKQTNLSKCFGFVSYDNPVSAQAAIQSMNGFQIGMKRLKVQLKRSKNDSKPY

SEQ ID NO: 12818 - protein, 512 aa, Homo sapiens
MAAFKLDFLPEMMVDHCSLNSSPVSKKMNGTLDHPDQPDLDAIKMFVGQVPRTWSEKDLRELFEQYGAVYEINVLRDRSQNPPQSKGCCFVTFYTRKAALEAQNALHNMKVLPGMHHPIQMKPADSEKNNVEDRKLFIGMISKKCTENDIRVMFSSFGQIEECRILRGPDGLSRGCAFVTFTTRAMAQTAIKAMHQAQTMEGCSSPMVVKFADTQKDKEQKRMAQQLQQQMQQISAASVWGNLAGLNTLGPQYLALYLQLLQQTASSGNLNTLSSLHPMGGLNAMQLQNLAALAAAASAAQNTPSGTNALTTSSSPLSVLTSSGSSPSSSSSNSVNPIASLGALQTLAGATAGLNVGSLAGMAALNGGLGSSGLSNGTGSTMEALTQAYSGIQQYAAAALPTLYNQNLLTQQSIGAAGSQKEGPEGANLFIYHLPQEFGDQDLLQMFMPFGNVVSAKVFIDKQTNLSKCFGFVSYDNPVSAQAAIQSMNGFQIGMKRLKVQLKRSKNDSKPY

SEQ ID NO: 12819 - protein, 468 aa, Homo sapiens
MFVGQVPRTWSEKDLRELFEQYGAVYEINVLRDRSQNPPQSKGCCFVTFYTRKAALEAQNALHNMKVLPGMHHPIQMKPADSEKNNVEDRKLFIGMISKKCTENDIRVMFSSFGQIEECRILRGPDGLSRGCAFVTFTTRAMAQTAIKAMHQAQTMEGCSSPMVVKFADTQKDKEQKRMAQQLQQQMQQISAASVWGNLAGLNTLGPQYLALYLQLLQQTASSGNLNTLSSLHPMGGLNAMQLQNLAALAAAASAAQNTPSGTNALTTSSSPLSVLTSSGSSPSSSSSNSVNPIASLGALQTLAGATAGLNVGSLAGMAALNGGLGSSGLSNGTGSTMEALTQAYSGIQQYAAAALPTLYNQNLLTQQSIGAAGSQKEGPEGANLFIYHLPQEFGDQDLLQMFMPFGNVVSAKVFIDKQTNLSKCFGFVSYDNPVSAQAAIQSMNGFQIGMKRLKVQLKRSKNDSKPY

SEQ ID NO: 12820 - protein, 485 aa, Homo sapiens
MNGTLDHPDQPDLDAIKMFVGQVPRTWSEKDLRELFEQYGAVYEINVLRDRSQNPPQSKGCCFVTFYTRKAALEAQNALHNMKVLPGMHHPIQMKPADSEKNNVEDRKLFIGMISKKCTENDIRVMFSSFGQIEECRILRGPDGLSRGCAFVTFTTRAMAQTAIKAMHQAQTMEGCSSPMVVKFADTQKDKEQKRMAQQLQQQMQQISAASVWGNLAGLNTLGPQYLALYLQLLQQTASSGNLNTLSSLHPMGGLNAMQLQNLAALAAAASAAQNTPSGTNALTTSSSPLSVLTSSGSSPSSSSSNSVNPIASLGALQTLAGATAGLNVGSLAGMAALNGGLGSSGLSNGTGSTMEALTQAYSGIQQYAAAALPTLYNQNLLTQQSIGAAGSQKEGPEGANLFIYHLPQEFGDQDLLQMFMPFGNVVSAKVFIDKQTNLSKCFGFVSYDNPVSAQAAIQSMNGFQIGMKRLKVQLKRSKNDSKPY

SEQ ID NO: 12821 - protein, 164 aa, Homo sapiens
MGDLPGLVRLSIALRIQPNDGPVFYKVDGQRFGQNRTIKLLTGSSYKVEVKIKPSTLQVENISIGGVLVPLELKSKEPDGDRVVYTGTYDTEGVTPTKSGERQPIQITMPFTDIGTFETVWQVKFYNYHKRDHCQWGSPFSVIEYECKPNETRSLMWVNKESFL

SEQ ID NO: 12822 - protein, 128 aa, Homo sapiens
MGDLPGLVRLSIALRIQPNDGPVFYKVDGQRFGQNRTIKLLTGSSYKVEVKIKPSTLQVENISIGGVLVPLELKSKEPDGDRVVYTGTYDTEGVTPTKSGERQPIQITMPECLEQRPQEISLTYECEE

SEQ ID NO: 12823 - protein, 511 aa, Homo sapiens
MVPSFLSLSFSSLGLWASGLILVLGFLKLIHLLLRRQTLAKAMDKFPGPPTHWLFGHALEIQETGSLDKVVSWAHQFPYAHPLWFGQFIGFLNIYEPDYAKAVYSRGDPKAPDVYDFFLQWIGRGLLVLEGPKWLQHRKLLTPGFHYDVLKPYVAVFTESTRIMLDKWEEKAREGKSFDIFCDVGHMALNTLMKCTFGRGDTGLGHRDSSYYLAVSDLTLLMQQRLVSFQYHNDFIYWLTPHGRRFLRACQVAHDHTDQVIRERKAALQDEKVRKKIQNRRHLDFLDILLGARDEDDIKLSDADLRAEVDTFMFEGHDTTTSGISWFLYCMALYPEHQHRCREEVREILGDQDFFQWDDLGKMTYLTMCIKESFRLYPPVPQVYRQLSKPVTFVDGRSLPAGSLISMHIYALHRNSAVWPDPEVFDSLRFSTENASKRHPFAFMPFSAGPRNCIGQQFAMSEMKVVTAMCLLRFEFSLDPSRLPIKMPQLVLRSKNGFHLHLKPLGPGSGK

SEQ ID NO: 12824 - protein, 512 aa, Homo sapiens
MVPSFLSLSFSSLGLWASGLILVLGFLKLIHLLLRRQTLAKAMDKFPGPPTHWLFGHALEIQETGSLDKVVSWAHQFPYAHPLWFGQFIGFLNIYEPDYAKAVYSRGDPKAPDVYDFFLQWIGRGLLVLEGPKWLQHRKLLTPGFHYDVLKPYVAVFTESTRIMLDKWEEKAREGKSFDIFCDVGHMALNTLMKCTFGRGDTGLGHSRDSSYYLAVSDLTLLMQQRLVSFQYHNDFIYWLTPHGRRFLRACQVAHDHTDQVIRERKAALQDEKVRKKIQNRRHLDFLDILLGARDEDDIKLSDADLRAEVDTFMFEGHDTTTSGISWFLYCMALYPEHQHRCREEVREILGDQDFFQWDDLGKMTYLTMCIKESFRLYPPVPQVYRQLSKPVTFVDGRSLPAGSLISMHIYALHRNSAVWPDPEVFDSLRFSTENASKRHPFAFMPFSAGPRNCIGQQFAMSEMKVVTAMCLLRFEFSLDPSRLPIKMPQLVLRSKNGFHLHLKPLGPGSGK

SEQ ID NO: 12825 - protein, 442 aa, Homo sapiens
MRGAMELEPELLLQEARENVEAAQSYRRELGHRLEGLREARRQIKESASQTRDVLKQHFNDLKGTLGKLLDERLVTLLQEVDTIEQETIKPLDDCQKLIEHGVNTAEDLVREGEIAMLGGVGEENEKLWSFTKKASHIQLDSLPEVPLLVDVPCLSAQLDDSILNIVKDHIFKHGTVASRPPVQIEELIEKPGGIIVRWCKVDDDFTAQDYRLQFRKCTSNHFEDVYVGSETEFIVLHIDPNVDYQFRVCARGDGRQEWSPWSVPQIGHSTLVPHEWTAGFEGYSLSSRRNIALRNDSESSGVLYSRAPTYFCGQTLTFRVETVGQPDRRDSIGVCAEKQDGYDSLQRDQAVCISTNGAVFVNGKEMTNQLPAVTSGSTVTFDIEAVTLGTTSNNEGGHFKLRVTISSNNREVVFDWLLDQSCGSLYFGCSFFYPGWKVLVF

SEQ ID NO: 12826 - protein, 438 aa, Homo sapiens
MELEPELLLQEARENVEAAQSYRRELGHRLEGLREARRQIKESASQTRDVLKQHFNDLKGTLGKLLDERLVTLLQEVDTIEQETIKPLDDCQKLIEHGVNTAEDLVREGEIAMLGGVGEENEKLWSFTKKASHIQLDSLPEVPLLVDVPCLSAQLDDSILNIVKDHIFKHGTVASRPPVQIEELIEKPGGIIVRWCKVDDDFTAQDYRLQFRKCTSNHFEDVYVGSETEFIVLHIDPNVDYQFRVCARGDGRQEWSPWSVPQIGHSTLVPHEWTAGFEGYSLSSRRNIALRNDSESSGVLYSRAPTYFCGQTLTFRVETVGQPDRRDSIGVCAEKQDGYDSLQRDQAVCISTNGAVFVNGKEMTNQLPAVTSGSTVTFDIEAVTLGTTSNNEGGHFKLRVTISSNNREVVFDWLLDQSCGSLYFGCSFFYPGWKVLVF

SEQ ID NO: 12827 - protein, 773 aa, Homo sapiens
MAEAHQAVAFQFTVTPDGIDLRLSHEALRQIYLSGLHSWKKKFIRFKNGIITGVYPASPSSWLIVVVGVMTTMYAKIDPSLGIIAKINRTLETANCMSSQTKNVVSGVLFGTGLWVALIVTMRYSLKVLLSYHGWMFTEHGKMSRATKIWMGMVKIFSGRKPMLYSFQTSLPRLPVPAVKDTVNRYLQSVRPLMKEEDFKRMTALAQDFAVGLGPRLQWYLKLKSWWATNYVSDWWEEYIYLRGRGPLMVNSNYYAMDLLYILPTHIQAARAGNAIHAILLYRRKLDREEIKPIRLLGSTIPLCSAQWERMFNTSRIPGEETDTIQHMRDSKHIVVYHRGRYFKVWLYHDGRLLKPREMEQQMQRILDNTSEPQPGEARLAALTAGDRVPWARCRQAYFGRGKNKQSLDAVEKAAFFVTLDETEEGYRSEDPDTSMDSYAKSLLHGRCYDRWFDKSFTFVVFKNGKMGLNAEHSWADAPIVAHLWEYVMSIDSLQLGYAEDGHCKGDINPNIPYPTRLQWDIPGECQEVIETSLNTANLLANDVDFHSFPFVAFGKGIIKKCRTSPDAFVQLALQLAHYKDMGKFCLTYEASMTRLFREGRTETVRSCTTESCDFVRAMVDPAQTVEQRLKLFKLASEKHQHMYRLAMTGSGIDRHLFCLYVVSKYLAVESPFLKEVLSEPWRLSTSQTPQQQVELFDLENNPEYVSSGGGFGPVADDGYGVSYILVGENLINFHISSKFSCPETDSHRFGRHLKEAMTDIITLFGLSSNSKK

SEQ ID NO: 12828 - protein, 756 aa, Homo sapiens
MAEAHQAVAFQFTVTPDGIDLRLSHEALRQIYLSGLHSWKKKFIRFKNGIITGVYPASPSSWLIVVVGVMTTMYAKIDPSLGIIAKINRTLETANCMSSQTKNVVSGVLFGTGLWVALIVTMRYSLKVLLSYHGWMFTEHGKMSRATKIWMGMVKIFSGRKPMLYSFQTSLPRLPVPAVKDTVNRYLQSVRPLMKEEDFKRMTALAQDFAVGLGPRLQWYLKLKSWWATNYVSDWWEEYIYLRGRGPLMVNSNYYAMDLLYILPTHIQAARAGNAIHAILLYRRKLDREEIKPIRLLGSTIPLCSAQWERMFNTSRIPGEETDTIQHMRDSKHIVVYHRGRYFKVWLYHDGRLLKPREMEQQMQRILDNTSEPQPGEARLAALTAGDRVPWARCRQAYFGRGKNKQSLDAVEKAAFFVTLDETEEGYRSEDPDTSMDSYAKSLLHGRCYDRWFDKSFTFVVFKNGKMGLNAEHSWADAPIVAHLWEYVMSIDSLQLGYAEDGHCKGDINPNIPYPTRLQWDIPGECQEVIETSLNTANLLANDVDFHSFPFVAFGKGIIKKCRTSPDAFVQLALQLAHYKDMGKFCLTYEASMTRLFREGRTETVRSCTTESCDFVRAMVDPAQTVEQRLKLFKLASEKHQHMYRLAMTGSGIDRHLFCLYVVSKYLAVESPFLKEVLSEPWRLSTSQTPQQQVELFDLENNPEYVSSGGGFGPVADDGYGVSYILVGENLINFHISSKFSCPETGIISQGPSSDT

SEQ ID NO: 12829 - protein, 509 aa, Homo sapiens
MAAAAGMLLLGLLQAGGSVLGQAMEKVTGGNLLSMLLIACAFTLSLVYLIRLAAGHLVQLPAGVKSPPYIFSPIPFLGHAIAFGKSPIEFLENAYEKYGPVFSFTMVGKTFTYLLGSDAAALLFNSKNEDLNAEDVYSRLTTPVFGKGVAYDVPNPVFLEQKKMLKSGLNIAHFKQHVSIIEKETKEYFESWGESGEKNVFEALSELIILTASHCLHGKEIRSQLNEKVAQLYADLDGGFSHAAWLLPGWLPLPSFRRRDRAHREIKDIFYKAIQKRRQSQEKIDDILQTLLDATYKDGRPLTDDEVAGMLIGLLLAGQHTSSTTSAWMGFFLARDKTLQKKCYLEQKTVCGENLPPLTYDQLKDLNLLDRCIKETLRLRPPIMIMMRMARTPQTVAGYTIPPGHQVCVSPTVNQRLKDSWVERLDFNPDRYLQDNPASGEKFAYVPFGAGRHRCIGENFAYVQIKTIWSTMLRLYEFDLIDGYFPTVNYTTMIHTPENPVIRYKRRSK

SEQ ID NO: 12830 - protein, 404 aa, Homo sapiens
MVGKTFTYLLGSDAAALLFNSKNEDLNAEDVYSRLTTPVFGKGVAYDVPNPVFLEQKKMLKSGLNIAHFKQHVSIIEKETKEYFESWGESGEKNVFEALSELIILTASHCLHGKEIRSQLNEKVAQLYADLDGGFSHAAWLLPGWLPLPSFRRRDRAHREIKDIFYKAIQKRRQSQEKIDDILQTLLDATYKDGRPLTDDEVAGMLIGLLLAGQHTSSTTSAWMGFFLARDKTLQKKCYLEQKTVCGENLPPLTYDQLKDLNLLDRCIKETLRLRPPIMIMMRMARTPQTVAGYTIPPGHQVCVSPTVNQRLKDSWVERLDFNPDRYLQDNPASGEKFAYVPFGAGRHRCIGENFAYVQIKTIWSTMLRLYEFDLIDGYFPTVNYTTMIHTPENPVIRYKRRSK

SEQ ID NO: 12831 - protein, 770 aa, Homo sapiens
MDFSKFLADDFDVKEWINAAFRAGSKEAASGKADGHAATLVMKLQLFIQEVNHAVEETSHQALQNMPKVLRDVEALKQEASFLKEQMILVKEDIKKFEQDTSQSMQVLVEIDQVKSRMQLAAESLQEADKWSTLSADIEETFKTQDIAVISAKLTGMQNSLMMLVDTPDYSEKCVHLEALKNRLEALASPQIVAAFTSQAVDQSKVFVKVFTEIDRMPQLLAYYYKCHKVQLLAAWQELCQSDLSLDRQLTGLYDALLGAWHTQIQWATQVFQKPHEVVMVLLIQTLGALMPSLPSCLSNGVERAGPEQELTRLLEFYDATAHFAKGLEMALLPHLHEHNLVKVTELVDAVYDPYKPYQLKYGDMEESNLLIQMSAVPLEHGEVIDCVQELSHSVNKLFGLASAAVDRCVRFTNGLGTCGLLSALKSLFAKYVSDFTSTLQSIRKKCKLDHIPPNSLFQEDWTAFQNSIRIIATCGELLRHCGDFEQQLANRILSTAGKYLSDSCSPRSLAGFQESILTDKKNSAKNPWQEYNYLQKDNPAEYASLMEILYTLKEKGSSNHNLLAAPRAALTRLNQQAHQLAFDSVFLRIKQQLLLISKMDSWNTAGIGETLTDELPAFSLTPLEYISNIGQYIMSLPLNLEPFVTQEDSALELALHAGKLPFPPEQGDELPELDNMADNWLGSIARATMQTYCDAILQIPELSPHSAKQLATDIDYLINVMDALGLQPSRTLQHIVTLLKTRPEDYRQVSKGLPRRLATTVATMRSVNY

SEQ ID NO: 12832 - protein, 537 aa, Homo sapiens
MAAQCVTKVALNVSCANLLDKDIGSKSDPLCVLFLNTSGQQWYEVERTERIKNCLNPQFSKTFIIDYYFEVVQKLKFGVYDIDNKTIELSDDDFLGECECTLGQIVSSKKLTRPLVMKTGRPAGKGSITISAEEIKDNRVVLFEMEARKLDNKDLFGKSDPYLEFHKQTSDGNWLMVHRTEVVKNNLNPVWRPFKISLNSLCYGDMDKTIKVECYDYDNDGSHDLIGTFQTTMTKLKEASRSSPVEFECINEKKRQKKKSYKNSGVISVKQCEITVECTFLDYIMGGCQLNFTVGVDFTGSNGDPRSPDSLHYISPNGVNEYLTALWSVGLVIQDYDADKMFPAFGFGAQIPPQWQVSHEFPMNFNPSNPYCNGIQGIVEAYRSCLPQIKLYGPTNFSPIINHVARFAAAATQQQTASQYFVLLIITDGVITDLDETRQAIVNASRLPMSIIIVGVGGADFSAMEFLDGDGGSLRSPLGEVAIRDIVQFVPFRQFQNAPKEALAQCVLAEIPQQVVGYFNTYKLLPPKNPATKQQKQ

SEQ ID NO: 12833 - protein, 105 aa, Homo sapiens
MPLSPGLLLLLLSGATATAALPLEGGPTGRDSEHMQEAAGIRKSSLLTFLAWWFEWTSQASAGPLIGEEAREVARRQEGAPPQQSARRDRMPCRNFFWKTFSSCK

SEQ ID NO: 12834 - protein, 393 aa, Homo sapiens
MWWRVLSLLAWFPLQEASLTNHTETITVEEGQTLTLKCVTSLRKNSSLQWLTPSGFTIFLNEYPALKNSKYQLLHHSANQLSITVPNVTLQDEGVYKCLHYSDSVSTKEVKVIVLATPFKPILEASVIRKQNGEEHVVLMCSTMRSKPPPQITWLLGNSMEVSGGTLHEFETDGKKCNTTSTLIIHTYGKNSTVDCIIRHRGLQGRKLVAPFRFEDLVTDEETASDALERNSLSSQDPQQPTSTVSVTEDSSTSEIDKEEKEQTTQDPDLTTEANPQYLGLARKKSGILLLTLVSFLIFILFIIVQLFIMKLRKAHVIWKKENEVSEHTLESYRSRSNNEETSSEEKNGQSSHPMRCMNYITKLYSEAKTKRKENVQHSKLEEKHIQVPESIV

SEQ ID NO: 12835 - protein, 194 aa, Homo sapiens
MWVKLLSIVAEFCFSPFLVTDEETASDALERNSLSSQDPQQPTSTVSVTEDSSTSEIDKEEKEQTTQDPDLTTEANPQYLGLARKKSGILLLTLVSFLIFILFIIVQLFIMKLRKAHVIWKKENEVSEHTLESYRSRSNNEETSSEEKNGQSSHPMRCMNYITKLYSEAKTKRKENVQHSKLEEKHIQVPESIV

SEQ ID NO: 12836 - protein, 183 aa, Homo sapiens
MEPEEGTPLWRLQKLPAELGPQLLHKIIDGICGRAYPVYQDYHTVWESEEWMHVLEDIAKFFKAIVGKNLPDEEIFQQLNQLNSLHQETIMKCVKSRKDEIKQALSREIVAISSAQLQDFDWQVKLALSSDKIAALRMPLLSLHLDVKENGEVKPYSIEMSREELQNLIQSLEAANKVVLQLK

SEQ ID NO: 12837 - protein, 514 aa, Homo sapiens
MSSPISKSRSLAAFLQQLRSPRQPPRLVTSTAYTSPQPREVPVCPLTAGGETQNAAALPGPTSWPLLGSLLQILWKGGLKKQHDTLVEYHKKYGKIFRMKLGSFESVHLGSPCLLEALYRTESAYPQRLEIKPWKAYRDYRKEGYGLLILEGEDWQRVRSAFQKKLMKPGEVMKLDNKINEVLADFMGRIDELCDERGHVEDLYSELNKWSFESICLVLYEKRFGLLQKNAGDEAVNFIMAIKTMMSTFGRMMVTPVELHKSLNTKVWQDHTLAWDTIFKSVKACIDNRLEKYSQQPSADFLCDIYHQNRLSKKELYAAVTELQLAAVETTANSLMWILYNLSRNPQVQQKLLKEIQSVLPENQVPRAEDLRNMPYLKACLKESMRLTPSVPFTTRTLDKATVLGEYALPKGTVLMLNTQVLGSSEDNFEDSSQFRPERWLQEKEKINPFAHLPFGVGKRMCIGRRLAELQLHLALCWIVRKYDIQATDNEPVEMLHSGTLVPSRELPIAFCQR

SEQ ID NO: 12838 - protein, 448 aa, Homo sapiens
MSSPISKSRSLAAFLQQLRSPRQPPRLVTSTAYTSPQPREVPVCPLTAGGETQNAAALPGPTSWPLLGSLLQILWKGGLKKQHDTLVEYHKKYGKIFRMKLGSFESVHLGSPCLLEALYRTESAYPQRLEIKPWKAYRDYRKEGYGLLILEGEDWQRVRSAFQKKLMKPGEVMKLDNKINEVLADFMGRIDELCDERGHVEDLYSELNKWSFESICLVLYEKRFGLLQKNAGDEAVNFIMAIKTMMSTFGRMMVTPVELHKSLNTKVWQDHTLAWDTIFKSVKACIDNRLEKYSQQPSADFLCDIYHQNRLSKKELYAAVTELQLAAVETTANSLMWILYNLSRNPQVQQKLLKEIQSVLPENQVPRAEDLRNMPYLKACLKESMRLTPSVPFTTRTLDKATVLGEYALPKGIVRKYDIQATDNEPVEMLHSGTLVPSRELPIAFCQR

SEQ ID NO: 12839 - protein, 372 aa, Homo sapiens
MYSCFSHREGEDWQRVRSAFQKKLMKPGEVMKLDNKINEVLADFMGRIDELCDERGHVEDLYSELNKWSFESICLVLYEKRFGLLQKNAGDEAVNFIMAIKTMMSTFGRMMVTPVELHKSLNTKVWQDHTLAWDTIFKSVKACIDNRLEKYSQQPSADFLCDIYHQNRLSKKELYAAVTELQLAAVETTANSLMWILYNLSRNPQVQQKLLKEIQSVLPENQVPRAEDLRNMPYLKACLKESMRLTPSVPFTTRTLDKATVLGEYALPKGTVLMLNTQVLGSSEDNFEDSSQFRPERWLQEKEKINPFAHLPFGVGKRMCIGRRLAELQLHLALCWIVRKYDIQATDNEPVEMLHSGTLVPSRELPIAFCQR

SEQ ID NO: 12840 - protein, 305 aa, Homo sapiens
MDDKELIEYFKSQMKEDPDMASAVAAIRTLLEFLKRDKGETIQGLRANLTSAIETLCGVDSSVAVSSGGELFLRFISLASLEYSDYSKCKKIMIERGELFLRRISLSRNKIADLCHTFIKDGATILTHAYSRVVLRVLEAAVAAKKRFSVYVTESQPDLSGKKMAKALCHLNVPVTVVLDAAVGYIMEKADLVIVGAEGVVENGGIINKIGTNQMAVCAKAQNKPFYVVAESFKFVRLFPLNQQDVPDKFKYKADTLKVAQTGQDLKEEHPWVDYTAPSLITLLFTDLGVLTPSAVSDELIKLYL

SEQ ID NO: 12841 - protein, 222 aa, Homo sapiens
MDDKELIEYFKSQMKEDPDMASAVAAIRTLLEFLKRDKGETIQGLRANLTSAIETLCGVDSSVAVSSGGELFLRFISLASLEYSDYSKCKKIMIERGELFLRRISLSRNKIADLCHTFIKDGATILTHAYSRVVLRVLEAAVAAKKRFSVYVTESQPDLSGQVPFCSVMCPAIILQSKLRITVQQDQNQNVPPACQQSALPFIVPFPAFGRKITEFAAGRSI

SEQ ID NO: 12842 - protein, 144 aa, Homo sapiens
MDPQEMVVKNPYAHISIPRAHLRPDLGQQLEVASTCSSSSEMQPLPVGPCAPEPTHLLQPTEVPGPKGAKGNQGAAPIQNQQAWQQPGNPYSSSQRQAGLTYAGPPPAGRGDDIAHHCCCCPCCHCCHCPPFCRCHSCCCCVIS

SEQ ID NO: 12843 - protein, 1406 aa, Homo sapiens
MALKNINYLLIFYLSFSLLIYIKNSFCNKNNTRCLSNSCQNNSTCKDFSKDNDCSCSDTANNLDKDCDNMKDPCFSNPCQGSATCVNTPGERSFLCKCPPGYSGTICETTIGSCGKNSCQHGGICHQDPIYPVCICPAGYAGRFCEIDHDECASSPCQNGAVCQDGIDGYSCFCVPGYQGRHCDLEVDECASDPCKNEATCLNEIGRYTCICPHNYSGVNCELEIDECWSQPCLNGATCQDALGAYFCDCAPGFLGDHCELNTDECASQPCLHGGLCVDGENRYSCNCTGSGFTGTHCETLMPLCWSKPCHNNATCEDSVDNYTCHCWPGYTGAQCEIDLNECNSNPCQSNGECVELSSEKQYGRITGLPSSFSYHEASGYVCICQPGFTGIHCEEDVNECSSNPCQNGGTCENLPGNYTCHCPFDNLSRTFYGGRDCSDILLGCTHQQCLNNGTCIPHFQDGQHGFSCLCPSGYTGSLCEIATTLSFEGDGFLWVKSGSVTTKGSVCNIALRFQTVQPMALLLFRSNRDVFVKLELLSGYIHLSIQVNNQSKVLLFISHNTSDGEWHFVEVIFAEAVTLTLIDDSCKEKCIAKAPTPLESDQSICAFQNSFLGGLPVGMTSNGVALLNFYNMPSTPSFVGCLQDIKIDWNHITLENISSGSSLNVKAGCVRKDWCESQPCQSRGRCINLWLSYQCDCHRPYEGPNCLREYVAGRFGQDDSTGYVIFTLDESYGDTISLSMFVRTLQPSGLLLALENSTYQYIRVWLERGRLAMLTPNSPKLVVKFVLNDGNVHLISLKIKPYKIELYQSSQNLGFISASTWKIEKGDVIYIGGLPDKQETELNGGFFKGCIQDVRLNNQNLEFFPNPTNNASLNPVLVNVTQGCAGDNSCKSNPCHNGGVCHSRWDDFSCSCPALTSGKACEEVQWCGFSPCPHGAQCQPVLQGFECIANAVFNGQSGQILFRSNGNITRELTNITFGFRTRDANVIILHAEKEPEFLNISIQDSRLFFQLQSGNSFYMLSLTSLQSVNDGTWHEVTLSMTDPLSQTSRWQMEVDNETPFVTSTIATGSLNFLKDNTDIYVGDRAIDNIKGLQGCLSTIEIGGIYLSYFENVHGFINKPQEEQFLKISTNSVVTGCLQLNVCNSNPCLHGGNCEDIYSSYHCSCPLGWSGKHCELNIDECFSNPCIHGNCSDRVAAYHCTCEPGYTGVNCEVDIDNCQSHQCANGATCISHTNGYSCLCFGNFTGKFCRQSRLPSTVCGNEKTNLTCYNGGNCTEFQTELKCMCRPGFTGEWCEKDIDECASDPCVNGGLCQDLLNKFQCLCDVAFAGERCEVDLADDLISDIFTTIGSVTVALLLILLLAIVASVVTSNKRATQGTYSPSRQEKEGSRVEMWNLMPPPAMERLI

SEQ ID NO: 12844 - protein, 1376 aa, Homo sapiens
MALKNINYLLIFYLSFSLLIYIKNSFCNKNNTRCLSNSCQNNSTCKDFSKDNDCSCSDTANNLDKDCDNMKDPCFSNPCQGSATCVNTPGERSFLCKCPPGYSGTICETTIGSCGKNSCQHGGICHQDPIYPVCICPAGYAGRFCEIDHDECASSPCQNGAVCQDGIDGYSCFCVPGYQGRHCDLEVDECASDPCKNEATCLNEIGRYTCICPHNYSGVNCELEIDECWSQPCLNGATCQDALGAYFCDCAPGFLGDHCELNTDECASQPCLHGGLCVDGENRYSCNCTGSGFTGTHCETLMPLCWSKPCHNNATCEDSVDNYTCHCWPGYTGAQCEIDLNECNSNPCQSNGECVELSSEKQYGRITGLPSSFSYHEASGYVCICQPGFTGIHCEEDVNECSSNPCQNGGTCENLPGNYTCHCPFDNLSRTFYGGRDCSDILLGCTHQQCLNNGTCIPHFQDGQHGFSCLCPSGYTGSLCEIATTLSFEGDGFLWVKSGSVTTKGSVCNIALRFQTVQPMALLLFRSNRDVFVKLELLSGYIHLSIQVNNQSKVLLFISHNTSDGEWHFVEVIFAEAVTLTLIDDSCKEKCIAKAPTPLESDQSICAFQNSFLGGLPVGMTSNGVALLNFYNMPSTPSFVGCLQDIKIDWNHITLENISSGSSLNVKAGCVRKDWCESQPCQSRGRCINLWLSYQCDCHRPYEGPNCLREYVAGRFGQDDSTGYVIFTLDESYGDTISLSMFVRTLQPSGLLLALENSTYQYIRVWLERGRLAMLTPNSPKLVVKFVLNDGNVHLISLKIKPYKIELYQSSQNLGFISASTWKIEKGDVIYIGGLPDKQETELNGGFFKGCIQDVRLNNQNLEFFPNPTNNASLNPVLVNVTQGCAGDNSCKSNPCHNGGVCHSRWDDFSCSCPALTSGKACEEVQWCGFSPCPHGAQCQPVLQGFECIANAVFNGQSGQILFRSNGNITRELTNITFGFRTRDANVIILHAEKEPEFLNISIQDSRLFFQLQSGNSFYMLSLTSLQSVNDGTWHEVTLSMTDPLSQTSRWQMEVDNETPFVTSTIATGSLNFLKDNTDIYVGDRAIDNIKGLQGCLSTIEIGGIYLSYFENVHGFINKPQEEQFLKISTNSVVTGCLQLNVCNSNPCLHGGNCEDIYSSYHCSCPLGWSGKHCELNIDECFSNPCIHGNCSDRVAAYHCTCEPGYTGVNCEVDIDNCQSHQCANGATCISHTNGYSCLCFGNFTGKFCRQSRLPSTVCGNEKTNLTCYNGGNCTEFQTELKCMCRPGFTGEWCEKDIDECASDPCVNGGLCQDLLNKFQCLCDVAFAGERCEVDVSSLSFYVSLLFWQNLFQLLSYLILRMNDEPVVEWGEQEDY

SEQ ID NO: 12845 - protein, 1294 aa, Homo sapiens
MALKNINYLLIFYLSFSLLIYIKNSFCNKNNTRCLSNSCQNNSTCKDFSKDNDCSCSDTANNLDKDCDNMKDPCFSNPCQGSATCVNTPGERSFLCKCPPGYSGTICETTIGSCGKNSCQHGGICHQDPIYPVCICPAGYAGRFCEIDHDECASSPCQNGAVCQDGIDGYSCFCVPGYQGRHCDLEVDECASDPCKNEATCLNEIGRYTCICPHNYSGYTGAQCEIDLNECNSNPCQSNGECVELSSEKQYGRITGLPSSFSYHEASGYVCICQPGFTGIHCEEDVNECSSNPCQNGGTCENLPGNYTCHCPFDNLSRTFYGGRDCSDILLGCTHQQCLNNGTCIPHFQDGQHGFSCLCPSGYTGSLCEIATTLSFEGDGFLWVKSGSVTTKGSVCNIALRFQTVQPMALLLFRSNRDVFVKLELLSGYIHLSIQVNNQSKVLLFISHNTSDGEWHFVEVIFAEAVTLTLIDDSCKEKCIAKAPTPLESDQSICAFQNSFLGGLPVGMTSNGVALLNFYNMPSTPSFVGCLQDIKIDWNHITLENISSGSSLNVKAGCVRKDWCESQPCQSRGRCINLWLSYQCDCHRPYEGPNCLREYVAGRFGQDDSTGYVIFTLDESYGDTISLSMFVRTLQPSGLLLALENSTYQYIRVWLERGRLAMLTPNSPKLVVKFVLNDGNVHLISLKIKPYKIELYQSSQNLGFISASTWKIEKGDVIYIGGLPDKQETELNGGFFKGCIQDVRLNNQNLEFFPNPTNNASLNPVLVNVTQGCAGDNSCKSNPCHNGGVCHSRWDDFSCSCPALTSGKACEEVQWCGFSPCPHGAQCQPVLQGFECIANAVFNGQSGQILFRSNGNITRELTNITFGFRTRDANVIILHAEKEPEFLNISIQDSRLFFQLQSGNSFYMLSLTSLQSVNDGTWHEVTLSMTDPLSQTSRWQMEVDNETPFVTSTIATGSLNFLKDNTDIYVGDRAIDNIKGLQGCLSTIEIGGIYLSYFENVHGFINKPQEEQFLKISTNSVVTGCLQLNVCNSNPCLHGGNCEDIYSSYHCSCPLGWSGKHCELNIDECFSNPCIHGNCSDRVAAYHCTCEPGYTGVNCEVDIDNCQSHQCANGATCISHTNGYSCLCFGNFTGKFCRQSRLPSTVCGNEKTNLTCYNGGNCTEFQTELKCMCRPGFTGEWCEKDIDECASDPCVNGGLCQDLLNKFQCLCDVAFAGERCEVDLADDLISDIFTTIGSVTVALLLILLLAIVASVVTSNKRATQGTYSPSRQEKEGSRVEMWNLMPPPAMERLI

SEQ ID NO: 12846 - protein, 942 aa, Homo sapiens
MIRNSLCQPSRCLDEYLFFNRKMFGARTHGFHILMAMLIGIHCEEDVNECSSNPCQNGGTCENLPGNYTCHCPFDNLSRTFYGGRDCSDILLGCTHQQCLNNGTCIPHFQDGQHGFSCLCPSGYTGSLCEIATTLSFEGDGFLWVKSGSVTTKGSVCNIALRFQTVQPMALLLFRSNRDVFVKLELLSGYIHLSIQVNNQSKVLLFISHNTSDGEWHFVEVIFAEAVTLTLIDDSCKEKCIAKAPTPLESDQSICAFQNSFLGGLPVGMTSNGVALLNFYNMPSTPSFVGCLQDIKIDWNHITLENISSGSSLNVKAGCVRKDWCESQPCQSRGRCINLWLSYQCDCHRPYEGPNCLREYVAGRFGQDDSTGYVIFTLDESYGDTISLSMFVRTLQPSGLLLALENSTYQYIRVWLERGRLAMLTPNSPKLVVKFVLNDGNVHLISLKIKPYKIELYQSSQNLGFISASTWKIEKGDVIYIGGLPDKQETELNGGFFKGCIQDVRLNNQNLEFFPNPTNNASLNPVLVNVTQGCAGDNSCKSNPCHNGGVCHSRWDDFSCSCPALTSGKACEEVQWCGFSPCPHGAQCQPVLQGFECIANAVFNGQSGQILFRSNGNITRELTNITFGFRTRDANVIILHAEKEPEFLNISIQDSRLFFQLQSGNSFYMLSLTSLQSVNDGTWHEVTLSMTDPLSQTSRWQMEVDNETPFVTSTIATGSLNFLKDNTDIYVGDRAIDNIKGLQGCLSTIEIGGIYLSYFENVHGFINKPQEEQFLKISTNSVVTGCLQLNVCNSNPCLHGGNCEDIYSSYHCSCPLGWSGKHCELNIDECFSNPCIHGNCSDRVAAYHCTCEPGYTGVNCEVDIDNCQSHQCANGATCISHTNGYSCLCFGNFTGKFCRQSRLPSTVCGNEKTNLTCYNGGNCTEFQTELKCMCRPGFTGEW

SEQ ID NO: 12847 - protein, 870 aa, Homo sapiens
MALKNINYLLIFYLSFSLLIYIKNSFCNKNNTRCLSNSCQNNSTCKDFSKDNDCSCSDTANNLDKDCDNMKDPCFSNPCQGSATCVNTPGERSFLCKCPPGYSGTICETTIGSCGKNSCQHGGICHQDPIYPVCICPAGYAGRFCEIDHDECASSPCQNGAVCQDGIDGYSCFCVPGYQGRHCDLEVDECASDPCKNEATCLNEIGRYTCICPHNYSGVNCELEIDECWSQPCLNGATCQDALGAYFCDCAPGFLGDHCELNTDECASQPCLHGGLCVDGENRYSCNCTGSGFTGTHCETLMPLCWSKPCHNNATCEDSVDNYTCHCWPGYTGAQCEIDLNECNSNPCQSNGECVELSSEKQYGRITGLPSSFSYHEASGYVCICQPGFTGIHCEEDVNECSSNPCQNGGTCENLPGNYTCHCPFDNLSRTFYGGRDCSDILLGCTHQQCLNNGTCIPHFQDGQHGFSCLCPSGYTGSLCEIATTLSFEGDGFLWVKSGSVTTKGSVCNIALRFQTVQPMALLLFRSNRDVFVKLELLSGYIHLSIQVNNQSKVLLFISHNTSDGEWHFVEVIFAEAVTLTLIDDSCKEKCIAKAPTPLESDQSICAFQNSFLGGLPVGMTSNGVALLNFYNMPSTPSFVGCLQDIKIDWNHITLENISSGSSLNVKAGCVRKDWCESQPCQSRGRCINLWLSYQCDCHRPYEGPNCLRGKFCRQSRLPSTVCGNEKTNLTCYNGGNCTEFQTELKCMCRPGFTGEWCEKDIDECASDPCVNGGLCQDLLNKFQCLCDVAFAGERCEVDLADDLISDIFTTIGSVTVALLLILLLAIVASVVTSNKRATQGTYSPSRQEKEGSRVEMWNLMPPPAMERLI

SEQ ID NO: 12848 - protein, 215 aa, Homo sapiens
MSSSEEVSWISWFCGLRGNEFFCEVDEDYIQDKFNLTGLNEQVPHYRQALDMILDLEPDEELEDNPNQSDLIEQAAEMLYGLIHARYILTNRGIAQMLEKYQQGDFGYCPRVYCENQPMLPIGLSDIPGEAMVKLYCPKCMDVYTPKSSRHHHTDGAYFGTGFPHMLFMVHPEYRPKRPANQFVPRLYGFKIHPMAYQLQLQAASNFKSPVKTIR

SEQ ID NO: 12849 - protein, 224 aa, Homo sapiens
MPLTPEPPSGRVEGPPAWEAAPWPSLPCGPCIPIMLVLATLAALFILTTAVLAERLFRRALRPDPSHRAPTLVWRPGGELWIEPMGTARERSEDWYGSAVPLLTDRAPEPPTQVGTLEARATAPPAPSAPNSAPSNLGPQTVLEVPARSTFWGPQPWEGRPPATGLVSWAEPEQRPEASVQFGSPQARRQRPGSPDPEWGLQPRVTLEQISAFWKREGRTSVGF

SEQ ID NO: 12850 - protein, 265 aa, Homo sapiens
MSEQQMDLKDLMPTKRKYMWKTAEDRRMSDLTCVLEWLERRQGKKKQAPEKQKPKVVTVLKRNKKKEEKKGKGLMTARGGNRRDTETSQQALGKRFRKDAASYRSLYGVEQKGKHLSMVPGSYIKDGPKKSDTDIKDAVDPESTQRPNPFRRQSIVLDPMLQEGTFNSQRATFIRDWSNKMPDMAYERKLKSLMEKSTEPKMETMRMLKPEEVLSCRYLRLSKENIRTLLKLCKDAGMNVDIHPHMVEEDIDAKKVFTGIPSMAL

SEQ ID NO: 12851 - protein, 647 aa, Homo sapiens
MAAILGDTIMVAKGLVKLTQAAVETHLQHLGIGGELIMAARALQSTAVEQIGMFLGKVQGQDKHEEYFAENFGGPEGEFHFSVPHAAGASTDFSSASAPDQSAPPSLGHAHSEGPAPAYVASGPFREAGFPGQASSPLGRANGRLFANPRDSFSAMGFQRRFFHQDQSPVGGLTAEDIEKARQAKARPENKQHKQTLSEHARERKVPVTRIGRLANFGGLAVGLGFGALAEVAKKSLRSEDPSGKKAVLGSSPFLSEANAERIVRTLCKVRGAALKLGQMLSIQDDAFINPHLAKIFERVRQSADFMPLKQMMKTLNNDLGPNWRDKLEYFEERPFAAASIGQVHLARMKGGREVAMKIQYPGVAQSINSDVNNLMAVLNMSNMLPEGLFPEHLIDVLRRELALECDYQREAACARKFRDLLKGHPFFYVPEIVDELCSPHVLTTELVSGFPLDQAEGLSQEIRNEICYNILVLCLRELFEFHFMQTDPNWSNFFYDPQQHKVALLDFGATREYDRSFTDLYIQIIRAAADRDRETVRAKSIEMKFLTGYEVKVMEDAHLDAILILGEAFASDEPFDFGTQSTTEKIHNLIPVMLRHRLVPPPEETYSLHRKMGGSFLICSKLKARFPCKAMFEEAYSNYCKRQAQQ

SEQ ID NO: 12852 - protein, 163 aa, Homo sapiens
MQTDPNWSNFFYDPQQHKVALLDFGATREYDRSFTDLYIQIIRAAADRDRETVRAKSIEMKFLTGYEVKVMEDAHLDAILILGEAFASDEPFDFGTQSTTEKIHNLIPVMLRHRLVPPPEETYSLHRKMGGSFLICSKLKARFPCKAMFEEAYSNYCKRQAQQ

SEQ ID NO: 12853 - protein, 595 aa, Homo sapiens
MFLGKVQGQDKHEEYFAENFGGPEGEFHFSVPHAAGASTDFSSASAPDQSAPPSLGHAHSEGPAPAYVASGPFREAGFPGQASSPLGRANGRLFANPRDSFSAMGFQRRFFHQDQSPVGGLTAEDIEKARQAKARPENKQHKQTLSEHARERKVPVTRIGRLANFGGLAVGLGFGALAEVAKKSLRSEDPSGKKAVLGSSPFLSEANAERIVRTLCKVRGAALKLGQMLSIQDDAFINPHLAKIFERVRQSADFMPLKQMMKTLNNDLGPNWRDKLEYFEERPFAAASIGQVHLARMKGGREVAMKIQYPGVAQSINSDVNNLMAVLNMSNMLPEGLFPEHLIDVLRRELALECDYQREAACARKFRDLLKGHPFFYVPEIVDELCSPHVLTTELVSGFPLDQAEGLSQEIRNEICYNILVLCLRELFEFHFMQTDPNWSNFFYDPQQHKVALLDFGATREYDRSFTDLYIQIIRAAADRDRETVRAKSIEMKFLTGYEVKVMEDAHLDAILILGEAFASDEPFDFGTQSTTEKIHNLIPVMLRHRLVPPPEETYSLHRKMGGSFLICSKLKARFPCKAMFEEAYSNYCKRQAQQ

SEQ ID NO: 12854 - protein, 368 aa, Homo sapiens
MLSIQDDAFINPHLAKIFERVRQSADFMPLKQMMKTLNNDLGPNWRDKLEYFEERPFAAASIGQVHLARMKGGREVAMKIQYPGVAQSINSDVNNLMAVLNMSNMLPEGLFPEHLIDVLRRELALECDYQREAACARKFRDLLKGHPFFYVPEIVDELCSPHVLTTELVSGFPLDQAEGLSQEIRNEICYNILVLCLRELFEFHFMQTDPNWSNFFYDPQQHKVALLDFGATREYDRSFTDLYIQIIRAAADRDRETVRAKSIEMKFLTGYEVKVMEDAHLDAILILGEAFASDEPFDFGTQSTTEKIHNLIPVMLRHRLVPPPEETYSLHRKMGGSFLICSKLKARFPCKAMFEEAYSNYCKRQAQQ

SEQ ID NO: 12855 - protein, 317 aa, Homo sapiens
MASAGAERRPGVQEATVVGQGQLTEEPGSAQTSECPVAGDQFLVPAHEARGTQSEDQRPAGAASESELQEEGPKLGEERPKPHAGALEERGPRPVVSIVRPRHGPKRKPVKSLSLPGLRAHLKAEAELPPKLPLQEEEPEDSQSEPSPSAKQHKKAKKRKSLGAPVLHAVASMVSAPLETLRLERKAQRLRPLYQYVNYCNPELNQAGKGDGEAEVEAEAELAPVPEEGGVEQLQALLPLAGELGPGLALPCPSPLVTPTHALAPLGEEAGEEPGGLPSLGVSDHKAEVDKSTQVDIDKMLSVCTAPLVPPLSPQYK

SEQ ID NO: 12856 - protein, 195 aa, Homo sapiens
MDELRWYHITVCLDHIFGHNCSLSCKDCMNGGKCQEGKSECSCPAGCRVILCNENCLEGAYGAGCTSECQCVEENTLECSAKNGSCTCKSGYQGNRCQKDGLWGPEGWFSSAPCENGGQCNKKTGNCDCTPDYTRKSCTILRCISLTNLALSRRSSPMKYQQNVSSHREVRQRQQCSSDRPFKKLLCKFSFKIGM

SEQ ID NO: 12857 - protein, 144 aa, Homo sapiens
MSSEDLAEIPQLQKLSIPHGFQNKEAASSPTPSITLSQVPDLQPGSQLFTEIHLAKIEKMFEEDINSTGALGMDAFIKAMKKVLSSVSDEMLKELFLKVDSDCEGFVTWQKYVDYMMREFQGKEDMRKSQYRLHFYLPMTVVPL

SEQ ID NO: 12858 - protein, 1401 aa, Homo sapiens
MASCASIDIEDATQHLRDILKLDRPAGGPSAESPRPSSAYNGDLNGLLVPDPLCSGDSTSANKTGLRTMPPINLQEKQVICLSGDDSSTCIGILAKEVEIVASSDSSISSKARGSNKVKIQPVAKYDWEQKYYYGNLIAVSNSFLAYAIRAANNGSAMVRVISVSTSERTLLKGFTGSVADLAFAHLNSPQLACLDEAGNLFVWRLALVNGKIQEEILVHIRQPEGTPLNHFRRIIWCPFIPEESEDCCEESSPTVALLHEDRAEVWDLDMLRSSHSTWPVDVSQIKQGFIVVKGHSTCLSEGALSPDGTVLATASHDGYVKFWQIYIEGQDEPRCLHEWKPHDGRPLSCLLFCDNHKKQDPDVPFWRFLITGADQNRELKMWCTVSWTCLQTIRFSPDIFSSVSVPPSLKVCLDLSAEYLILSDVQRKVLYVMELLQNQEEGHACFSSISEFLLTHPVLSFGIQVVSRCRLRHTEVLPAEEENDSLGADGTHGAGAMESAAGVLIKLFCVHTKALQDVQIRFQPQLNPDVVAPLPTHTAHEDFTFGESRPELGSEGLGSAAHGSQPDLRRIVELPAPADFLSLSSETKPKLMTPDAFMTPSASLQQITASPSSSSSGSSSSSSSSSSSLTAVSAMSSTSAVDPSLTRPPEELTLSPKLQLDGSLTMSSSGSLQASPRGLLPGLLPAPADKLTPKGPGQVPTATSALSLELQEVEPLGLPQASPSRTRSPDVISSASTALSQDIPEIASEALSRGFGSSAPEGLEPDSMASAASALHLLSPRPRPGPELGPQLGLDGGPGDGDRHNTPSLLEAALTQEASTPDSQVWPTAPDITRETCSTLAESPRNGLQEKHKSLAFHRPPYHLLQQRDSQDASAEQSDHDDEVASLASASGGFGTKVPAPRLPAKDWKTKGSPRTSPKLKRKSKKDDGDAAMGSRLTEHQVAEPPEDWPALIWQQQRELAELRHSQEELLQRLCTQLEGLQSTVTGHVERALETRHEQEQRRLERALAEGQQRGGQLQEQLTQQLSQALSSAVAGRLERSIRDEIKKTVPPCVSRSLEPMAGQLSNSVATKLTAVEGSMKENISKLLKSKNLTDAIARAAADTLQGPMQAAYREAFQSVVLPAFEKSCQAMFQQINDSFRLGTQEYLQQLESHMKSRKAREQEAREPVLAQLRGLVSTLQSATEQMAATVAGSVRAEVQHQLHVAVGSLQESILAQVQRIVKGEVSVALKEQQAAVTSSIMQAMRSAAGTPVPSAHLDCQAQQAHILQLLQQGHLNQAFQQALTAADLNLVLYVCETVDPAQVFGQPPCPLSQPVLLSLIQQLASDLGTRTDLKLSYLEEAVMHLDHSDPITRDHMGSVMAQVRQKLFQFLQAEPHNSLGKAARRLSLMLHGLVTPSLP

SEQ ID NO: 12859 - protein, 1020 aa, Homo sapiens
MWCTVSWTCLQTIRFSPDIFSSVSVPPSLKVCLDLSAEYLILSDVQRKVLYVMELLQNQEEGHACFSSISEFLLTHPVLSFGIQVVSRCRLRHTEVLPAEEENDSLGADGTHGAGAMESAAGVLIKLFCVHTKALQDVQIRFQPQLNPDVVAPLPTHTAHEDFTFGESRPELGSEGLGSAAHGSQPDLRRIVELPAPADFLSLSSETKPKLMTPDAFMTPSASLQQITASPSSSSSGSSSSSSSSSSSLTAVSAMSSTSAVDPSLTRPPEELTLSPKLQLDGSLTMSSSGSLQASPRGLLPGLLPAPADKLTPKGPGQVPTATSALSLELQEVEPLGLPQASPSRTRSPDVISSASTALSQDIPEIASEALSRGFGSSAPEGLEPDSMASAASALHLLSPRPRPGPELGPQLGLDGGPGDGDRHNTPSLLEAALTQEASTPDSQVWPTAPDITRETCSTLAESPRNGLQEKHKSLAFHRPPYHLLQQRDSQDASAEQSDHDDEVASLASASGGFGTKVPAPRLPAKDWKTKGSPRTSPKLKRKSKKDDGDAAMGSRLTEHQVAEPPEDWPALIWQQQRELAELRHSQEELLQRLCTQLEGLQSTVTGHVERALETRHEQEQRRLERALAEGQQRGGQLQEQLTQQLSQALSSAVAGRLERSIRDEIKKTVPPCVSRSLEPMAGQLSNSVATKLTAVEGSMKENISKLLKSKNLTDAIARAAADTLQGPMQAAYREAFQSVVLPAFEKSCQAMFQQINDSFRLGTQEYLQQLESHMKSRKAREQEAREPVLAQLRGLVSTLQSATEQMAATVAGSVRAEVQHQLHVAVGSLQESILAQVQRIVKGEVSVALKEQQAAVTSSIMQAMRSAAGTPVPSAHLDCQAQQAHILQLLQQGHLNQAFQQALTAADLNLVLYVCETVDPAQVFGQPPCPLSQPVLLSLIQQLASDLGTRTDLKLSYLEEAVMHLDHSDPITRDHMGSVMAQVRQKLFQFLQAEPHNSLGKAARRLSLMLHGLVTPSLP

SEQ ID NO: 12860 - protein, 197 aa, Homo sapiens
MRLKQGSFLWYLYLDKIYCLLSVRNVKALAEYFHILDVHGKNTLNDVLFYHFLHHVTDLKKAQINIVFDMLDWNAVGEIDFEKFYMLVCMLLAHQNHLEGQFMYRHSRPVFDLLDLKGDLRIGAKNFEMYRFLFNIQKQELKDLFRDFDITGDNRLNYQEFKLYTIIYTDKLQKRQKTEEKEKGERKRSLYSKCHIK

SEQ ID NO: 12861 - protein, 598 aa, Homo sapiens
MEPVSTGAEAGMEGAGGDPYRRPARRTQWLLSALAHHYGLDRGVENEIVVLATGLDQYLQEVFHHLDCRGAGRLPRADFRALCAVLGLRAEGATTAGQAAGDGNSRDVTPGDAAAELATDGDSDTDEEARLALRAEPPELTFRQFHARLCGYFGTRAGPRLPRGALSEHIETQIRLRRPRRRRRPPCAPGPDSGPDCERVARLEEENSSLRELVEDLRAALQSSDARCLALQVGLWKSQASTHEMGHGGPEAAVRELRQAQGALAAAEARAGRLRRGQAEVRRRAEEARQVVLRSLHRVRELEALAQQVPGLQRWVRRLEAELQRYRSEDSQLPTPQLANPEPGDKSNEPEDAGTRDPDPTPEGAWQSDSSSGSRALDEVDEQLFRSVEGQAASDEEEVEEERWQEEKKTPAAEAKTLLARLSSCRGRCDDQTAEKLMTYFGHFGGANHAHTLGELEACIAMLVEQLRTQGCGGRTLGTSEEEAELQQKVEENEHLRLELQMVETERVRLSLLEEKLVDVLQLLQRLRDLNISKRALGKILLSTLDAFRDPTHEGRPSPAAILDALHQALAACQLLRRQPSAPASAAAALTNPLLVSC

SEQ ID NO: 12862 - protein, 161 aa, Homo sapiens
MTYFGHFGGANHAHTLGELEACIAMLVEQLRTQGCGGRTLGTSEEEAELQQKVEENEHLRLELQMVETERVRLSLLEEKLVDVLQLLQRLRDLNISKRALGKILLSTLDAFRDPTHEGRPSPAAILDALHQALAACQLLRRQPSAPASAAAALTNPLLVSC

SEQ ID NO: 12863 - protein, 301 aa, Homo sapiens
MHPEPAPPPSRSSPELPPSGGSTTSGSRRSRRRSGDGEPPGAPPPPPSAVTYPDWIGQSYSEVMSLNEHSMQALSWRKLYLSRAKLKASSRTSALLSGFAMVAMVEVQLDADHDYPPGLLIAFSACTTVLVAVHLFALMISTCILPNIEAVSNVHNLNSVKESPHERMHRHIELAWAFSTVIGTLLFLAEVVLLCWVKFLPLKKQPGQPRPTSKPPASGAAANVSTSGITPGQAAAIASTTIMVPFGLIFIVFAVHFYRSLVSHKTDRQFQELNELAEFARLQDQLDHRGDHPLTPGSHYA

SEQ ID NO: 12864 - protein, 231 aa, Homo sapiens
MQALSWRKLYLSRAKLKASSRTSALLSGFAMVAMVEVQLDADHDYPPGLLIAFSACTTVLVAVHLFALMISTCILPNIEAVSNVHNLNSVKESPHERMHRHIELAWAFSTVIGTLLFLAEVVLLCWVKFLPLKKQPGQPRPTSKPPASGAAANVSTSGITPGQAAAIASTTIMVPFGLIFIVFAVHFYRSLVSHKTDRQFQELNELAEFARLQDQLDHRGDHPLTPGSHYA

SEQ ID NO: 12865 - protein, 63 aa, Homo sapiens
MLGQSIRRFTTSVVRRSHYEEGPGKNLPFSVENKWSLLAKMCLYFGSAFATPFLVVRHQLLKT

SEQ ID NO: 12866 - protein, 829 aa, Homo sapiens
MNSGVAMKYGNDSSAELSELHSAALASLKGDIVELNKRLQQTERERDLLEKKLAKAQCEQSHLMREHEDVQERTTLRYEERITELHSVIAELNKKIDRLQGTTIREEDEYSELRSELSQSQHEVNEDSRSMDQDQTSVSIPENQSTMVTADMDNCSDLNSELQRVLTGLENVVCGRKKSSCSLSVAEVDKHIEQLTTASEHCDLAIKTVEEIEGVLGRDLYPNLAEERSRWEKELAGLREENESLTAMLCSKEEELNRTKATMNAIREERDRLRRRVRELQTRLQSVQATGPSSPGRLTSTNRPINPSTGELSTSSSSNDIPIAKIAERVKLSKTRSESSSSDRPVLGSEISSIGVSSSVAEHLAHSLQDCSNIQEIFQTLYSHGSAISESKIREFEVETERLNSRIEHLKSQNDLLTITLEECKSNAERMSMLVGKYESNATALRLALQYSEQCIEAYELLLALAESEQSLILGQFRAAGVGSSPGDQSGDENITQMLKRAHDCRKTAENAAKALLMKLDGSCGGAFAVAGCSVQPWESLSSNSHTSTTSSTASSCDTEFTKEDEQRLKDYIQQLKNDRAAVKLTMLELESIHIDPLSYDVKPRGDSQRLDLENAVLMQELMAMKEEMAELKAQLYLLEKEKKALELKLSTREAQEQAYLVHIEHLKSEVEEQKEQRMRSLSSTSSGSKDKPGKECADAASPALSLAELRTTCSENELAAEFTNAIRREKKLKARVQELVSALERLTKSSEIRHQQSAEFVNDLKRANSNLVAAYEKAKKKHQNKLKKLESQMMAMVERHETQVRMLKQRIALLEEENSRPHTNETSL

SEQ ID NO: 12867 - protein, 1019 aa, Homo sapiens
MMAAAAAAAAGSSSSGGGGGGSGSSSSSSDTSSTGEEERMRRLFQTCDGDGDGYISRNDLLMVCRQLNMEESVAEIMNQLGADENGKISFQDFTRCRMQLVREIRKEEVDLSAKSDNSCTKKLRDRIASWPTSSDNSLGALSAARESWEYDSGARDLQSPDVQSQSALQKLLEYGGSSLHQQAALHKLLTQSPHIGNSVGGSYLELANTLHSAALASLKGDIVELNKRLQQTERERDLLEKKLAKAQCEQSHLMREHEDVQERTTLRYEERITELHSVIAELNKKIDRLQGTTIREEDEYSELRSELSQSQHEVNEDSRSMDQDQTSVSIPENQSTMVTADMDNCSDLNSELQRVLTGLENVVCGRKKSSCSLSVAEVDKHIEQLTTASEHCDLAIKTVEEIEGVLGRDLYPNLAEERSRWEKELAGLREENESLTAMLCSKEEELNRTKATMNAIREERDRLRRRVRELQTRLQSVQATGPSSPGRLTSTNRPINPSTGELSTSSSSNDIPIAKIAERVKLSKTRSESSSSDRPVLGSEISSIGVSSSVAEHLAHSLQDCSNIQEIFQTLYSHGSAISESKIREFEVETERLNSRIEHLKSQNDLLTITLEECKSNAERMSMLVGKYESNATALRLALQYSEQCIEAYELLLALAESEQSLILGQFRAAGVGSSPGDQSGDENITQMLKRAHDCRKTAENAAKALLMKLDGSCGGAFAVAGCSVQPWESLSSNSHTSTTSSTASSCDTEFTKEDEQRLKDYIQQLKNDRAAVKLTMLELESIHIDPLSYDVKPRGDSQRLDLENAVLMQELMAMKEEMAELKAQLYLLEKEKKALELKLSTREAQEQAYLVHIEHLKSEVEEQKEQRMRSLSSTSSGSKDKPGKECADAASPALSLAELRTTCSENELAAEFTNAIRREKKLKARVQELVSALERLTKSSEIRHQQSAEFVNDLKRANSNLVAAYEKAKKKHQNKLKKLESQMMAMVERHETQVRMLKQRIALLEEENSRPHTNETSL

SEQ ID NO: 12868 - protein, 371 aa, Homo sapiens
MELELDAGDQDLLAFLLEESGDLGTAPDEAVRAPLDWALPLSEVPSDWEVDDLLCSLLSPPASLNILSSSNPCLVHHDHTYSLPRETVSMDLESESCRKEGTQMTPQHMEELAEQEIARLVLTDEEKSLLEKEGLILPETLPLTKTEEQILKRVRRKIRNKRSAQESRRKKKVYVGGLESRVLKYTAQNMELQNKVQLLEEQNLSLLDQLRKLQAMVIEISNKTSSSSTCILVLLVSFCLLLVPAMYSSDTRGSLPAEHGVLSRQLRALPSEDPYQLELPALQSEVPKDSTHQWLDGSDCVLQAPGNTSCLLHYMPQAPSAEPPLEWPFPDLFSEPLCRGPILPLQANLTRKGGWLPTGSPSVILQDRYSG

SEQ ID NO: 12869 - protein, 354 aa, Homo sapiens
MELELDAGDQDLLAFLLEESGDLGTAPDEAVRAPLDWALPLSEVPSDWEVDDLLCSLLSPPASLNILSSSNPCLVHHDHTYSLPRETVSMDLESESCRKEGTQMTPQHMEELAEQEIARLVLTDEEKSLLEKEGLILPETLPLTKTEEQILKRVRRKIRNKRSAQESRRKKKVYVGGLESRVLKYTAQNMELQNKVQLLEEQNLSLLDQLRKLQAMVIEISNKTSSSSMYSSDTRGSLPAEHGVLSRQLRALPSEDPYQLELPALQSEVPKDSTHQWLDGSDCVLQAPGNTSCLLHYMPQAPSAEPPLEWPFPDLFSEPLCRGPILPLQANLTRKGGWLPTGSPSVILQDRYSG

SEQ ID NO: 12870 - protein, 345 aa, Homo sapiens
MTMETVESQHDGSITASLTESKSAHVQTQTGQNSIPALAQVSVAGSGTRRGSPAVTLVQLPSGQTIHVQGVIQTPQPWVIQSSEIHTVQVAAIAETDESAESEGVIDSHKRREILSRRPSYRKILNELSSDVPGVPKIEEERSEEEGTPPSIATMAVPTSIYQTSTGQYIAIAQGGTIQISNPGSDGVQGLQALTMTNSGAPPPGATIVQYAAQSADGTQQFFVPGSQVVVQDEETELAPSHMAAATGDMPTYQIRAPTAALPQGVVMAASPGSLHSPQQLAEEATRKRELRLMKNREAAKECRRRKKEYVKCLESRVAVLEVQNKKLIEELETLKDICSPKTDY

SEQ ID NO: 12871 - protein, 349 aa, Homo sapiens
MSKCARKKYIKTNPRQMTMETVESQHDGSITASLTESKSAHVQTQTGQNSIPALAQVSVAGSGTRRGSPAVTLVQLPSGQTIHVQGVIQTPQPWVIQSSEIHTVQVAAIAETDESAESEGVIDSHKRREILSRRPSYRKILNELSSDVPGVPKIEEERSEEEGTPPSIATMAVPTSIYQTSTGQYIAIAQGGTIQISNPGSDGVQGLQALTMTNSGAPPPGATIVQYAAQSADGTQQFFVPGSQVVVQAATGDMPTYQIRAPTAALPQGVVMAASPGSLHSPQQLAEEATRKRELRLMKNREAAKECRRRKKEYVKCLESRVAVLEVQNKKLIEELETLKDICSPKTDY

SEQ ID NO: 12872 - protein, 348 aa, Homo sapiens
MSKCARKKYIKTNPRQMTMETVESQHDGSITASLTESKSAHVQTQTGQNSIPALAQVSVAGSGTRRGSPAVTLVQLPSGQTIHVQGVIQTPQPWVIQSSEIHTVQVAAIAETDESAESEGVIDSHKRREILSRRPSYRKILNELSSDVPGVPKIEEERSEEEGTPPSIATMAVPTSIYQTSTGQYIAIAQGGTIQISNPGSDGVQGLQALTMTNSGAPPPGATIVQYAAQSADGTQQFFVPGSQVVVQAATGDMPTYQIRAPTAALPQGVVMAASPGSLHSPQQLAEEATRKRELRLMKNREAARECRRKKKEYVKCLENRVAVLENQNKTLIEELKALKDLYCHKVE

SEQ ID NO: 12873 - protein, 237 aa, Homo sapiens
MSKCARKKYIKTNPRQMTMETVESQHDGSITASLTESKSAHVQTQTGQNSIPALAQVAAIAETDESAESEGVIDSHKRREILSRRPSYRKILNELSSDVPGVPKIEEERSEEEGTPPSIATMAVPTSIYQTSTGQYTATGDMPTYQIRAPTAALPQGVVMAASPGSLHSPQQLAEEATRKRELRLMKNREAAKECRRRKKEYVKCLESRVAVLEVQNKKLIEELETLKDICSPKTDY

SEQ ID NO: 12874 - protein, 245 aa, Homo sapiens
MVAAIAETDESAESEGVIDSHKRREILSRRPSYRKILNELSSDVPGVPKIEEERSEEEGTPPSIATMAVPTSIYQTSTGQYIAIAQGGTIQISNPGSDGVQGLQALTMTNSGAPPPGATIVQYAAQSADGTQQFFVPGSQVVVQAATGDMPTYQIRAPTAALPQGVVMAASPGSLHSPQQLAEEATRKRELRLMKNREAAKECRRRKKEYVKCLESRVAVLEVQNKKLIEELETLKDICSPKTDY

SEQ ID NO: 12875 - protein, 120 aa, Homo sapiens
MAVTGDDTDEETELAPSHMAAATGDMPTYQIRAPTAALPQGVVMAASPGSLHSPQQLAEEATRKRELRLMKNREAARECRRKKKEYVKCLENRVAVLENQNKTLIEELKALKDLYCHKVE

SEQ ID NO: 12876 - protein, 108 aa, Homo sapiens
MAVTGDDTAATGDMPTYQIRAPTAALPQGVVMAASPGSLHSPQQLAEEATRKRELRLMKNREAARECRRKKKEYVKCLENRVAVLENQNKTLIEELKALKDLYCHKVE

SEQ ID NO: 12877 - protein, 121 aa, Homo sapiens
MAVTGDDTDEETELAPSHMAAATGDMPTYQIRAPTAALPQGVVMAASPGSLHSPQQLAEEATRKRELRLMKNREAAKECRRRKKEYVKCLESRVAVLEVQNKKLIEELETLKDICSPKTDY

SEQ ID NO: 12878 - protein, 109 aa, Homo sapiens
MAVTGDDTAATGDMPTYQIRAPTAALPQGVVMAASPGSLHSPQQLAEEATRKRELRLMKNREAAKECRRRKKEYVKCLESRVAVLEVQNKKLIEELETLKDICSPKTDY

SEQ ID NO: 12879 - protein, 270 aa, Homo sapiens
MWWHQHNLCFRRPIEEDYSSGDVEEKVAAIAETDESAESEGVIDSHKRREILSRRPSYRKILNELSSDVPGVPKIEEERSEEEGTPPSIATMAVPTSIYQTSTGQYIAIAQGGTIQISNPGSDGVQGLQALTMTNSGAPPPGATIVQYAAQSADGTQQFFVPGSQVVVQAATGDMPTYQIRAPTAALPQGVVMAASPGSLHSPQQLAEEATRKRELRLMKNREAAKECRRRKKEYVKCLESRVAVLEVQNKKLIEELETLKDICSPKTDY

SEQ ID NO: 12880 - protein, 219 aa, Homo sapiens
MWWHQHNLCFRRPIEEDYSSGDVEEKVAAIAETDESAESEGVIDSHKRREILSRRPSYRKILNELSSDVPGVPKIEEERSEEEGTPPSIATMAVPTSIYQTSTGQYDEETELAPSHMATATGDMPTYQIRAPTAALPQGVVMAASPGSLHSPQQLAEEATRKRELRLMKNREAAKECRRRKKEYVKCLESRVAVLEVQNKKLIEELETLKDICSPKTDY

SEQ ID NO: 12881 - protein, 194 aa, Homo sapiens
MVAAIAETDESAESEGVIDSHKRREILSRRPSYRKILNELSSDVPGVPKIEEERSEEEGTPPSIATMAVPTSIYQTSTGQYDEETELAPSHMATATGDMPTYQIRAPTAALPQGVVMAASPGSLHSPQQLAEEATRKRELRLMKNREAAKECRRRKKEYVKCLESRVAVLEVQNKKLIEELETLKDICSPKTDY

SEQ ID NO: 12882 - protein, 312 aa, Homo sapiens
MSKCARKKYIKTNPRQMTMETVESQHDGSITASLTESKSAHVQTQTGQNSIPALAQVAAIAETDESAESEGVIDSHKRREILSRRPSYRKILNELSSDVPGVPKIEEERSEEEGTPPSIATMAVPTSIYQTSTGQYIAIAQGGTIQISNPGSDGVQGLQALTMTNSGAPPPGATIVQYAAQSADGTQQFFVPGSQVVVQDEETELAPSHMAAATGDMPTYQIRAPTAALPQGVVMAASPGSLHSPQQLAEEATRKRELRLMKNREAAKECRRRKKEYVKCLESRVAVLEVQNKKLIEELETLKDICSPKTDY

SEQ ID NO: 12883 - protein, 300 aa, Homo sapiens
MSKCARKKYIKTNPRQMTMETVESQHDGSITASLTESKSAHVQTQTGQNSIPALAQVAAIAETDESAESEGVIDSHKRREILSRRPSYRKILNELSSDVPGVPKIEEERSEEEGTPPSIATMAVPTSIYQTSTGQYIAIAQGGTIQISNPGSDGVQGLQALTMTNSGAPPPGATIVQYAAQSADGTQQFFVPGSQVVVQAATGDMPTYQIRAPTAALPQGVVMAASPGSLHSPQQLAEEATRKRELRLMKNREAAKECRRRKKEYVKCLESRVAVLEVQNKKLIEELETLKDICSPKTDY

SEQ ID NO: 12884 - protein, 221 aa, Homo sapiens
MSKCARKKYIKTNPRQMTMETVESQHDGSITASLTESKSAHVQTQTGQNSIPALAQVIAIAQGGTIQISNPGSDGVQGLQALTMTNSGAPPPGATIVQYAAQSADGTQQFFVPGSQVVVQAATGDMPTYQIRAPTAALPQGVVMAASPGSLHSPQQLAEEATRKRELRLMKNREAAKECRRRKKEYVKCLESRVAVLEVQNKKLIEELETLKDICSPKTDY

SEQ ID NO: 12885 - protein, 170 aa, Homo sapiens
MSKCARKKYIKTNPRQMTMETVESQHDGSITASLTESKSAHVQTQTGQNSIPALAQVDEETELAPSHMAAATGDMPTYQIRAPTAALPQGVVMAASPGSLHSPQQLAEEATRKRELRLMKNREAAKECRRRKKEYVKCLESRVAVLEVQNKKLIEELETLKDICSPKTDY

SEQ ID NO: 12886 - protein, 286 aa, Homo sapiens
MSKCARKKYIKTNPRQMTMETVESQHDGSITASLTESKSAHVQTQTGQNSIPALAQVSVAGSGTRRGSPAVTLVQLPSGQTIHVQGVIQTPQPWVIQSSEIHTVQVAAIAETDESAESEGVIDSHKRREILSRRPSYRKILNELSSDVPGVPKIEEERSEEEGTPPSIATMAVPTSIYQTSTGQYAATGDMPTYQIRAPTAALPQGVVMAASPGSLHSPQQLAEEATRKRELRLMKNREAAKECRRRKKEYVKCLESRVAVLEVQNKKLIEELETLKDICSPKTDY

SEQ ID NO: 12887 - protein, 285 aa, Homo sapiens
MSKCARKKYIKTNPRQMTMETVESQHDGSITASLTESKSAHVQTQTGQNSIPALAQVSVAGSGTRRGSPAVTLVQLPSGQTIHVQGVIQTPQPWVIQSSEIHTVQVAAIAETDESAESEGVIDSHKRREILSRRPSYRKILNELSSDVPGVPKIEEERSEEEGTPPSIATMAVPTSIYQTSTGQYAATGDMPTYQIRAPTAALPQGVVMAASPGSLHSPQQLAEEATRKRELRLMKNREAARECRRKKKEYVKCLENRVAVLENQNKTLIEELKALKDLYCHKVE

SEQ ID NO: 12888 - protein, 282 aa, Homo sapiens
MWWHQHNLCFRRPIEEDYSSGDVEEKVAAIAETDESAESEGVIDSHKRREILSRRPSYRKILNELSSDVPGVPKIEEERSEEEGTPPSIATMAVPTSIYQTSTGQYIAIAQGGTIQISNPGSDGVQGLQALTMTNSGAPPPGATIVQYAAQSADGTQQFFVPGSQVVVQDEETELAPSHMAAATGDMPTYQIRAPTAALPQGVVMAASPGSLHSPQQLAEEATRKRELRLMKNREAAKECRRRKKEYVKCLESRVAVLEVQNKKLIEELETLKDICSPKTDY

SEQ ID NO: 12889 - protein, 102 aa, Homo sapiens
MAAATGDMPTYQIRAPTAALPQGVVMAASPGSLHSPQQLAEEATRKRELRLMKNREAARECRRKKKEYVKCLENRVAVLENQNKTLIEELKALKDLYCHKVE

SEQ ID NO: 12890 - protein, 112 aa, Homo sapiens
MNRTQELSGQLSAATGDMPTYQIRAPTAALPQGVVMAASPGSLHSPQQLAEEATRKRELRLMKNREAARECRRKKKEYVKCLENRVAVLENQNKTLIEELKALKDLYCHKVE

SEQ ID NO: 12891 - protein, 137 aa, Homo sapiens
MTMETVESQHDGSITASLTESKSAHVQTQTGQNSIPALAQVAAIAETDESAESEGVIDSHKRREILSRRPSYRKILNELSSDVPGVPKIEEERSEEEGTPPSIATMAVPTSIYQTSTGQYSMYAAIRYDTVLALSLL

SEQ ID NO: 12892 - protein, 248 aa, Homo sapiens
MSKCARKKYIKTNPRQMTMETVESQHDGSITASLTESKSAHVQTQTGQNSIPALAQVAAIAETDESAESEGVIDSHKRREILSRRPSYRKILNELSSDVPGVPKIEEERSEEEGTPPSIATMAVPTSIYQTSTGQYNEETELAPSHMAAATGDMPTYQIRAPTAALPQGVVMAASPGSLHSPQQLAEEATRKRELRLMKNREAARECRRKKKEYVKCLENRVAVLENQNKTLIEELKALKDLYCHKVE

SEQ ID NO: 12893 - protein, 113 aa, Homo sapiens
MNRTQELSGQLSAATGDMPTYQIRAPTAALPQGVVMAASPGSLHSPQQLAEEATRKRELRLMKNREAAKECRRRKKEYVKCLESRVAVLEVQNKKLIEELETLKDICSPKTDY

SEQ ID NO: 12894 - protein, 138 aa, Homo sapiens
MTNSGAPPPGATIVQYAAQSADGTQQFFVPGSQVVVQAATGDMPTYQIRAPTAALPQGVVMAASPGSLHSPQQLAEEATRKRELRLMKNREAAKECRRRKKEYVKCLESRVAVLEVQNKKLIEELETLKDICSPKTDY

SEQ ID NO: 12895 - protein, 125 aa, Homo sapiens
MNRTQELSGQLSDEETELAPSHMAAATGDMPTYQIRAPTAALPQGVVMAASPGSLHSPQQLAEEATRKRELRLMKNREAAKECRRRKKEYVKCLESRVAVLEVQNKKLIEELETLKDICSPKTDY

SEQ ID NO: 12896 - protein, 221 aa, Homo sapiens
MTMETVESQHDGSITASLTESKSAHVQTQTGQNSIPALAQVAAIAETDESAESEGVIDSHKRREILSRRPSYRKILNELSSDVPGVPKIEEERSEEEGTPPSIATMAVPTSIYQTSTGQYTATGDMPTYQIRAPTAALPQGVVMAASPGSLHSPQQLAEEATRKRELRLMKNREAAKECRRRKKEYVKCLESRVAVLEVQNKKLIEELETLKDICSPKTDY

SEQ ID NO: 12897 - protein, 299 aa, Homo sapiens
MSKCARKKYIKTNPRQMTMETVESQHDGSITASLTESKSAHVQTQTGQNSIPALAQVAAIAETDESAESEGVIDSHKRREILSRRPSYRKILNELSSDVPGVPKIEEERSEEEGTPPSIATMAVPTSIYQTSTGQYIAIAQGGTIQISNPGSDGVQGLQALTMTNSGAPPPGATIVQYAAQSADGTQQFFVPGSQVVVQAATGDMPTYQIRAPTAALPQGVVMAASPGSLHSPQQLAEEATRKRELRLMKNREAARECRRKKKEYVKCLENRVAVLENQNKTLIEELKALKDLYCHKVE

SEQ ID NO: 12898 - protein, 236 aa, Homo sapiens
MSKCARKKYIKTNPRQMTMETVESQHDGSITASLTESKSAHVQTQTGQNSIPALAQVAAIAETDESAESEGVIDSHKRREILSRRPSYRKILNELSSDVPGVPKIEEERSEEEGTPPSIATMAVPTSIYQTSTGQYTATGDMPTYQIRAPTAALPQGVVMAASPGSLHSPQQLAEEATRKRELRLMKNREAARECRRKKKEYVKCLENRVAVLENQNKTLIEELKALKDLYCHKVE

SEQ ID NO: 12899 - protein, 440 aa, Homo sapiens
MGSSHLLNKGLPLGVRPPIMNGPLHPRPLVALLDGRDCTVEMPILKDVATVAFCDAQSTQEIHEKVLNEAVGALMYHTITLTREDLEKFKALRIIVRIGSGFDNIDIKSAGDLGIAVCNVPAASVEETADSTLCHILNLYRRATWLHQALREGTRVQSVEQIREVASGAARIRGETLGIIGLGRVGQAVALRAKAFGFNVLFYDPYLSDGVERALGLQRVSTLQDLLFHSDCVTLHCGLNEHNHHLINDFTVKQMRQGAFLVNTARGGLVDEKALAQALKEGRIRGAALDVHESEPFSFSQGPLKDAPNLICTPHAAWYSEQASIEMREEAAREIRRAITGRIPDSLKNCVNKDHLTAATHWASMDPAVVHPELNGAAYRYPPGVVGVAPTGIPAAVEGIVPSAMSLSHGLPPVAHPPHAPSPGQTVKPEADRDHASDQL

SEQ ID NO: 12900 - protein, 429 aa, Homo sapiens
MSGVRPPIMNGPLHPRPLVALLDGRDCTVEMPILKDVATVAFCDAQSTQEIHEKVLNEAVGALMYHTITLTREDLEKFKALRIIVRIGSGFDNIDIKSAGDLGIAVCNVPAASVEETADSTLCHILNLYRRATWLHQALREGTRVQSVEQIREVASGAARIRGETLGIIGLGRVGQAVALRAKAFGFNVLFYDPYLSDGVERALGLQRVSTLQDLLFHSDCVTLHCGLNEHNHHLINDFTVKQMRQGAFLVNTARGGLVDEKALAQALKEGRIRGAALDVHESEPFSFSQGPLKDAPNLICTPHAAWYSEQASIEMREEAAREIRRAITGRIPDSLKNCVNKDHLTAATHWASMDPAVVHPELNGAAYRYPPGVVGVAPTGIPAAVEGIVPSAMSLSHGLPPVAHPPHAPSPGQTVKPEADRDHASDQL

SEQ ID NO: 12901 - protein, 148 aa, Homo sapiens
MFIKVMFGAGCSVLVNTSCRLVNLTAHLRQKAGLPPDATIALLAEDGNLVSLEEDLKEGASRAQTMGNSLLKERAIYVLVRIIKGEDMASTRYESLLENLDDHYPELAEELRRLSGLSSVGHNWRKRMGTRRGRHEQSPTSRPRKGPD

SEQ ID NO: 12902 - protein, 142 aa, Homo sapiens
MFIKVMFGAGCSVLVNTSCRLVNLTAHLRQKAGLPPDATIALLAEDGNLVSLEEDLKEGASRAQTMGNSLLKERAIYVLVRIISKVAQEGEDMASTRYESLLENLDDHYPELAGANRQQPSRTPLAESGIAEKLHQQEGQGP

SEQ ID NO: 12903 - protein, 170 aa, Homo sapiens
MALLLSDWCPDGDADTHTGTDPGRTTHRLCARERGVRGTQPCPRIYLRLPAQNCEETRFCCASPGSVVLGHGAPRTASPPSALSHPSPLEGLSFSPFPPSVLSHPSPPEGLSFSLFHCLCSGKLSESPGCFWNSLGWSFSVLTEPGVWKVGEAIWVAENLAQPLTSPCAC

SEQ ID NO: 12904 - protein, 183 aa, Homo sapiens
MAATLQFLVCLVVAICLLSGVTTTQPHAGQPMDSTSVGGGLQEPEAPEVMFELLWAGLELDVMGQLHIQDEELASTHPGRRLRLLLQHHVPSDLEGTEQWLQQLQDLRKGPPLSTWDFEHLLLTGLSCVYRLHAASEAEERGRWAQVFALLAQETLWDLCKGFCPQDRPPSLGSWASILDPFP

SEQ ID NO: 12905 - protein, 158 aa, Homo sapiens
MGSGSSRSSRTLRRRRSPESLPAGPGAAALEGGTRRRVPVAAAEVPGAAAEEAPGRDPSPVAPPDGRDETLRLLDELLAESAAWGPPEPAPRRPARLRPTAVAGSAVCAEQSTEGHPGSGNVSEAPGSGRKKPERPAAISYDHSEEGLMASIEREYCR

SEQ ID NO: 12906 - protein, 921 aa, Homo sapiens
MTANRDAALSSHRHPGCAQRPRTPTFASSSQRRSAFGFDDGNFPGLGERSHAPGSRLGARRRAKTARGLRGHRQRGAGAGLSRPGSARAPSPPRPGGPENPGGVLSVELPGLLAQLARSFALLLPVYALGYLGLSFSWVLLALALLAWCRRSRGLKALRLCRALALLEDEERVVRLGVRACDLPAWVHFPDTERAEWLNKTVKHMWPFICQFIEKLFRETIEPAVRGANTHLSTFSFTKVDVGQQPLRINGVKVYTENVDKRQIILDLQISFVGNCEIDLEIKRYFCRAGVKSIQIHGTMRVILEPLIGDMPLVGALSIFFLRKPLLEINWTGLTNLLDVPGLNGLSDTIILDIISNYLVLPNRITVPLVSEVQIAQLRFPVPKGVLRIHFIEAQDLQGKDTYLKGLVKGKSDPYGIIRVGNQIFQSRVIKENLSPKWNEVYEALVYEHPGQELEIELFDEDPDKDDFLGSLMIDLIEVEKERLLDEWFTLDEVPKGKLHLRLEWLTLMPNASNLDKVLTDIKADKDQANDGLSSALLILYLDSARNLPSGKKISSNPNPVVQMSVGHKAQESKIRYKTNEPVWEENFTFFIHNPKRQDLEVEVRDEQHQCSLGNLKVPLSQLLTSEDMTVSQRFQLSNSGPNSTIKMKIALRVLHLEKRERPPDHQHSAQVKRPSVSKEGRKTSIKSHMSGSPGPGGSNTAPSTPVIGGSDKPGMEEKAQPPEAGPQGLHDLGRSSSSLLASPGHISVKEPTPSIASDISLPIATQELRQRLRQLENGTTLGQSPLGQIQLTIRHSSQRNKLIVVVHACRNLIAFSEDGSDPYVRMYLLPDKRRSGRRKTHVSKKTLNPVFDQSFDFSVSLPEVQRRTLDVAVKNSGGFLSKDKGLLGKVLVALASEELAKGWTQWYDLTEDGTRPQAMT

SEQ ID NO: 12907 - protein, 893 aa, Homo sapiens
MTPPSRAEAGVRRSRVPSEGRWRGAEPPGISASTQPASAGRAARHCGAMSGARGEGPEAGAGGAGGRAAPENPGGVLSVELPGLLAQLARSFALLLPVYALGYLGLSFSWVLLALALLAWCRRSRGLKALRLCRALALLEDEERVVRLGVRACDLPAWVHFPDTERAEWLNKTVKHMWPFICQFIEKLFRETIEPAVRGANTHLSTFSFTKVDVGQQPLRINGVKVYTENVDKRQIILDLQISFVGNCEIDLEIKRYFCRAGVKSIQIHGTMRVILEPLIGDMPLVGALSIFFLRKPLLEINWTGLTNLLDVPGLNGLSDTIILDIISNYLVLPNRITVPLVSEVQIAQLRFPVPKGVLRIHFIEAQDLQGKDTYLKGLVKGKSDPYGIIRVGNQIFQSRVIKENLSPKWNEVYEALVYEHPGQELEIELFDEDPDKDDFLGSLMIDLIEVEKERLLDEWFTLDEVPKGKLHLRLEWLTLMPNASNLDKVLTDIKADKDQANDGLSSALLILYLDSARNLPSGKKISSNPNPVVQMSVGHKAQESKIRYKTNEPVWEENFTFFIHNPKRQDLEVEVRDEQHQCSLGNLKVPLSQLLTSEDMTVSQRFQLSNSGPNSTIKMKIALRVLHLEKRERPPDHQHSAQVKRPSVSKEGRKTSIKSHMSGSPGPGGSNTAPSTPVIGGSDKPGMEEKAQPPEAGPQGLHDLGRSSSSLLASPGHISVKEPTPSIASDISLPIATQELRQRLRQLENGTTLGQSPLGQIQLTIRHSSQRNKLIVVVHACRNLIAFSEDGSDPYVRMYLLPDKRRSGRRKTHVSKKTLNPVFDQSFDFSVSLPEVQRRTLDVAVKNSGGFLSKDKGLLGKVLVALASEELAKGWTQWYDLTEDGTRPQAMT

SEQ ID NO: 12908 - protein, 527 aa, Homo sapiens
MWPFICQFIEKLFRETIEPAVRGANTHLSTFSFTKVDVGQQPLRINGVKVYTENVDKRQIILDLQISFVGNCEIDLEIKRYFCRAGVKSIQIHGTMRVILEPLIGDMPLVGALSIFFLRKPLLEINWTGLTNLLDVPGLNGLSDTIILDIISNYLVLPNRITVPLVSEVQIAQLRFPVPKGVLRIHFIEAQDLQGKDTYLKGLVKGKSDPYGIIRVGNQIFQSRVIKENLSPKWNEVYEALVYEHPGQELEIELFDEDPDKDDFLGSLMIDLIEVEKERLLDEWFTLDEVPKGKLHLRLEWLTLMPNASNLDKVLTDIKADKDQANDGLSSALLILYLDSARNLPSGKKISSNPNPVVQMSVGHKAQESKIRYKTNEPVWEENFTFFIHNPKRQDLEVEVRDEQHQCSLGNLKVPLSQLLTSEDMTVSQRFQLSNSGPNSTIKMKIALRVLHLEKRERPPDHQHSAQVKRPSVSKEGRKTSIKSHMSGSPGPGGSNTAPSTSQSRSRPPASPRTSRCPSPPRSCGKG

SEQ ID NO: 12909 - protein, 328 aa, Homo sapiens
MPVLPPCVLQVRDEQHQCSLGNLKVPLSQLLTSEDMTVSQRFQLSNSGPNSTIKMKIALRVLHLEKRERPPDHQHSAQVKRPSVSKEGRKTSIKSHMSGSPGPGGSNTAPSTPVIGGSDKPGMEEKAQPPEAGPQGLHDLGRSSSSLLASPGHISVKEPTPSIASDISLPIATQELRQRLRQLENGTTLGQSPLGQIQLTIRHSSQRNKLIVVVHACRNLIAFSEDGSDPYVRMYLLPDKRRSGRRKTHVSKKTLNPVFDQSFDFSVSLPEVQRRTLDVAVKNSGGFLSKDKGLLGKVLVALASEELAKGWTQWYDLTEDGTRPQAMT

SEQ ID NO: 12910 - protein, 942 aa, Homo sapiens
MTANRDAALSSHRHPGCAQRPRTPTFASSSQRRSAFGFDDGNFPGLGERSHAPGSRLGARRRAKTARGLRGHRQRGAGAGLSRPGSARAPSPPRPGGPENPGGVLSVELPGLLAQLARSFALLLPVYALGYLGLSFSWVLLALALLAWCRRSRGLKALRLCRALALLEDEERVVRLGVRACDLPAWVHFPDTERAEWLNKTVKHMWPFICQFIEKLFRETIEPAVRGANTHLSTFSFTKVDVGQQPLRINGVKVYTENVDKRQIILDLQISFVGNCEIDLEIKRYFCRAGVKSIQIHGTMRVILEPLIGDMPLVGALSIFFLRKPLLEINWTGLTNLLDVPGLNGLSDTIILDIISNYLVLPNRITVPLVSEVQIAQLRFPVPKGVLRIHFIEAQDLQGKDTYLKGLVKGKSDPYGIIRVGNQIFQSRVIKENLSPKWNEVYEALVYEHPGQELEIELFDEDPDKDDFLGSLMIDLIEVEKERLLDEWFTLDEVPKGKLHLRLEWLTLMPNASNLDKVLTDIKADKDQANDGLSSALLILYLDSARNLPSNPLEFNPDVLKKTAVQRALKSGKKISSNPNPVVQMSVGHKAQESKIRYKTNEPVWEENFTFFIHNPKRQDLEVEVRDEQHQCSLGNLKVPLSQLLTSEDMTVSQRFQLSNSGPNSTIKMKIALRVLHLEKRERPPDHQHSAQVKRPSVSKEGRKTSIKSHMSGSPGPGGSNTAPSTPVIGGSDKPGMEEKAQPPEAGPQGLHDLGRSSSSLLASPGHISVKEPTPSIASDISLPIATQELRQRLRQLENGTTLGQSPLGQIQLTIRHSSQRNKLIVVVHACRNLIAFSEDGSDPYVRMYLLPDKRRSGRRKTHVSKKTLNPVFDQSFDFSVSLPEVQRRTLDVAVKNSGGFLSKDKGLLGKVLVALASEELAKGWTQWYDLTEDGTRPQAMT

SEQ ID NO: 12911 - protein, 653 aa, Homo sapiens
MHCLGAEYLVSAEGAPRQREWRPQIYRKCTDTAWLFLFFLFWTGLVFIMGYSVVAGAAGRLLFGYDSFGNMCGKKNSPVEGAPLSGQDMTLKKHVFFMNSCNLEVKGTQLNRMALCVSNCPEEQLDSLEEVQFFANTSGSFLCVYSLNSFNYTHSPKADSLCPRLPVPPSKSFPLFNRCVPQTPECYSLFASVLINDVDTLHRILSGIMSGRDTILGLCILALALSLAMMFTFRFITTLLVHIFISLVILGLLFVCGVLWWLYYDYTNDLSIELDTERENMKCVLGFAIVSTGITAVLLVLIFVLRKRIKLTVELFQITNKAISSAPFLLFQPLWTFAILIFFWVLWVAVLLSLGTAGAAQVMEGGQVEYKPLSGIRYMWSYHLIGLIWTSEFILACQQMTIAGAVVTCYFNRSKNDPPDHPILSSLSILFFYHQGTVVKGSFLISVVRIPRIIVMYMQNALKEQQHGALSRYLFRCCYCCFWCLDKYLLHLNQNAYTTTAINGTDFCTSAKDAFKILSKNSSHFTSINCFGDFIIFLGKVLVVCFTVFGGLMAFNYNRAFQVWAVPLLLVAFFAYLVAHSFLSVFETVLDALFLCFAVDLETNDGSSEKPYFMDQEFLSFVKRSNKLNNARAQQDKHSLRNEEGTELQAIVR

SEQ ID NO: 12912 - protein, 605 aa, Homo sapiens
MGYSVVAGAAGRLLFGYDSFGNMCGKKNSPVEGAPLSGQDMTLKKHVFFMNSCNLEVKGTQLNRMALCVSNCPEEQLDSLEEVQFFANTSGSFLCVYSLNSFNYTHSPKADSLCPRLPVPPSKSFPLFNRCVPQTPECYSLFASVLINDVDTLHRILSGIMSGRDTILGLCILALALSLAMMFTFRFITTLLVHIFISLVILGLLFVCGVLWWLYYDYTNDLSIELDTERENMKCVLGFAIVSTGITAVLLVLIFVLRKRIKLTVELFQITNKAISSAPFLLFQPLWTFAILIFFWVLWVAVLLSLGTAGAAQVMEGGQVEYKPLSGIRYMWSYHLIGLIWTSEFILACQQMTIAGAVVTCYFNRSKNDPPDHPILSSLSILFFYHQGTVVKGSFLISVVRIPRIIVMYMQNALKEQQHGALSRYLFRCCYCCFWCLDKYLLHLNQNAYTTTAINGTDFCTSAKDAFKILSKNSSHFTSINCFGDFIIFLGKVLVVCFTVFGGLMAFNYNRAFQVWAVPLLLVAFFAYLVAHSFLSVFETVLDALFLCFAVDLETNDGSSEKPYFMDQEFLSFVKRSNKLNNARAQQDKHSLRNEEGTELQAIVR

SEQ ID NO: 12913 - protein, 617 aa, Homo sapiens
MHCLGAEYLVFIMGYSVVAGAAGRLLFGYDSFGNMCGKKNSPVEGAPLSGQDMTLKKHVFFMNSCNLEVKGTQLNRMALCVSNCPEEQLDSLEEVQFFANTSGSFLCVYSLNSFNYTHSPKADSLCPRLPVPPSKSFPLFNRCVPQTPECYSLFASVLINDVDTLHRILSGIMSGRDTILGLCILALALSLAMMFTFRFITTLLVHIFISLVILGLLFVCGVLWWLYYDYTNDLSIELDTERENMKCVLGFAIVSTGITAVLLVLIFVLRKRIKLTVELFQITNKAISSAPFLLFQPLWTFAILIFFWVLWVAVLLSLGTAGAAQVMEGGQVEYKPLSGIRYMWSYHLIGLIWTSEFILACQQMTIAGAVVTCYFNRSKNDPPDHPILSSLSILFFYHQGTVVKGSFLISVVRIPRIIVMYMQNALKEQQHGALSRYLFRCCYCCFWCLDKYLLHLNQNAYTTTAINGTDFCTSAKDAFKILSKNSSHFTSINCFGDFIIFLGKVLVVCFTVFGGLMAFNYNRAFQVWAVPLLLVAFFAYLVAHSFLSVFETVLDALFLCFAVDLETNDGSSEKPYFMDQEFLSFVKRSNKLNNARAQQDKHSLRNEEGTELQAIVR

SEQ ID NO: 12914 - protein, 585 aa, Homo sapiens
MHCLGAEYLVFIMGYSVVAGAAGRLLFGYDSFGNMCGKKNSPVEGAPLSGQDMTLKKHVFFMNSCNLEVKGSFLCVYSLNSFNYTHSPKADSLCPRLPVPPSKSFPLFNRCVPQTPECYSLFASVLINDVDTLHRILSGIMSGRDTILGLCILALALSLAMMFTFRFITTLLVHIFISLVILGLLFVCGVLWWLYYDYTNDLSIELDTERENMKCVLGFAIVSTGITAVLLVLIFVLRKRIKLTVELFQITNKAISSAPFLLFQPLWTFAILIFFWVLWVAVLLSLGTAGAAQVMEGGQVEYKPLSGIRYMWSYHLIGLIWTSEFILACQQMTIAGAVVTCYFNRSKNDPPDHPILSSLSILFFYHQGTVVKGSFLISVVRIPRIIVMYMQNALKEQQHGALSRYLFRCCYCCFWCLDKYLLHLNQNAYTTTAINGTDFCTSAKDAFKILSKNSSHFTSINCFGDFIIFLGKVLVVCFTVFGGLMAFNYNRAFQVWAVPLLLVAFFAYLVAHSFLSVFETVLDALFLCFAVDLETNDGSSEKPYFMDQEFLSFVKRSNKLNNARAQQDKHSLRNEEGTELQAIVR

SEQ ID NO: 12915 - protein, 572 aa, Homo sapiens
MGYSVVAGAAGRLLFGYDSFGNMCGKKNSPVEGAPLSGQDMTLKKHVFFMNSCNLEVKGSFLCVYSLNSFNYTHSPKADSLCPRLPVPPSKSFPLFNRCVPQTPECYSLFASVLINDVDTLHRILSGIMSGRDTILGLCILALALSLAMMFTFRFITTLLVHIFISLVILGLLFVCGVLWWLYYDYTNDLSIELDTERENMKCVLGFAIVSTGITAVLLVLIFVLRKRIKLTVELFQITNKAISSAPFLLFQPLWTFAILIFFWVLWVAVLLSLGTAGAAQVMEGGQVEYKPLSGIRYMWSYHLIGLIWTSEFILACQQMTIAGAVVTCYFNRSKNDPPDHPILSSLSILFFYHQGTVVKGSFLISVVRIPRIIVMYMQNALKEQHGALSRYLFRCCYCCFWCLDKYLLHLNQNAYTTTAINGTDFCTSAKDAFKILSKNSSHFTSINCFGDFIIFLGKVLVVCFTVFGGLMAFNYNRAFQVWAVPLLLVAFFAYLVAHSFLSVFETVLDALFLCFAVDLETNDGSSEKPYFMDQEFLSFVKRSNKLNNARAQQDKHSLRNEEGTELQAIVR

SEQ ID NO: 12916 - protein, 620 aa, Homo sapiens
MHCLGAEYLVSAEGAPRQREWRPQIYRKCTDTAWLFLFFLFWTGLVFIMGYSVVAGAAGRLLFGYDSFGNMCGKKNSPVEGAPLSGQDMTLKKHVFFMNSCNLEVKGSFLCVYSLNSFNYTHSPKADSLCPRLPVPPSKSFPLFNRCVPQTPECYSLFASVLINDVDTLHRILSGIMSGRDTILGLCILALALSLAMMFTFRFITTLLVHIFISLVILGLLFVCGVLWWLYYDYTNDLSIELDTERENMKCVLGFAIVSTGITAVLLVLIFVLRKRIKLTVELFQITNKAISSAPFLLFQPLWTFAILIFFWVLWVAVLLSLGTAGAAQVMEGGQVEYKPLSGIRYMWSYHLIGLIWTSEFILACQQMTIAGAVVTCYFNRSKNDPPDHPILSSLSILFFYHQGTVVKGSFLISVVRIPRIIVMYMQNALKEQHGALSRYLFRCCYCCFWCLDKYLLHLNQNAYTTTAINGTDFCTSAKDAFKILSKNSSHFTSINCFGDFIIFLGKVLVVCFTVFGGLMAFNYNRAFQVWAVPLLLVAFFAYLVAHSFLSVFETVLDALFLCFAVDLETNDGSSEKPYFMDQEFLSFVKRSNKLNNARAQQDKHSLRNEEGTELQAIVR

SEQ ID NO: 12917 - protein, 386 aa, Homo sapiens
MTSLFRRSSSGSGGGGTAGARGGGGGTAAPQELNNSRPARQVRRLEFNQAMDDFKTMFPNMDYDIIECVLRANSGAVDATIDQLLQMNLEGGGSSGGVYEDSSDSEDSIPPEILERTLEPDSSDEEPPPVYSPPAYHMHVFDRPYPLAPPTPPPRIDALGSGAPTSQRRYRNWNPPLLGNLPDDFLRILPQQLDSIQGNAGGPKPGSGEGCPPAMAGPGPGDQESRWKQYLEDERIALFLQNEEFMKELQRNRDFLLALERDRLKYESQKSKSSSVAVGNDFGFSSPVPGTGDANPAVSEDALFRDKLKHMGKSTRRKLFELARAFSEKTKMRKSKRKHLLKHQSLGAAASTANLLDDVEGHACDEDFRGRRQEAPKVEEGLREGQ

SEQ ID NO: 12918 - protein, 358 aa, Homo sapiens
MTSLFRRSSSGSGGGGTAGARGGGGGTAAPQELNNSRPARQVRRLEFNQAMDDFKTMFPNMDYDIIECVLRANSGAVDATIDQLLQMNLEGGGSSGGVYEDSSDSEDSIPPEILERTLEPDSSDEEPPPVYSPPAYHMHVFDRPYPLAPPTPPPRIDALGSGAPTSQRRYRNWNPPLLGNLPDDFLRILPQQLDSIQGNAGGPKPGSGEGCPPAMAGPGPGDQESRWKQYLERDRLKYESQKSKSSSVAVGNDFGFSSPVPGTGDANPAVSEDALFRDKLKHMGKSTRRKLFELARAFSEKTKMRKSKRKHLLKHQSLGAAASTANLLDDVEGHACDEDFRGRRQEAPKVEEGLREGQ

SEQ ID NO: 12919 - protein, 333 aa, Homo sapiens
MGDWGFLEKLLDQVQEHSTVVGKIWLTVLFIFRILILGLAGESVWGDEQSDFECNTAQPGCTNVCYDQAFPISHIRYWVLQFLFVSTPTLVYLGHVIYLSRREERLRQKEGELRALPAKDPQVERALAAVERQMAKISVAEDGRLRIRGALMGTYVASVLCKSVLEAGFLYGQWRLYGWTMEPVFVCQRAPCPYLVDCFVSRPTEKTIFIIFMLVVGLISLVLNLLELVHLLCRCLSRGMRARQGQDAPPTQGTSSDPYTDQVFFYLPVGQGPSSPPCPTYNGLSSSEQNWANLTTEERLASSRPPLFLDPPPQNGQKPPSRPSSSASKKQYV

SEQ ID NO: 12920 - protein, 776 aa, Homo sapiens
MSSTRSQNPHGLKQIGLDQIWDDLRAGIQQVYTRQSMAKSRYMELYTHVYNYCTSVHQSNQARGAGVPPSKSKKGQTPGGAQFVGLELYKRLKEFLKNYLTNLLKDGEDLMDESVLKFYTQQWEDYRFSSKVLNGICAYLNRHWVRRECDEGRKGIYEIYSLALVTWRDCLFRPLNKQVTNAVLKLIEKERNGETINTRLISGVVQSYVELGLNEDDAFAKGPTLTVYKESFESQFLADTERFYTRESTEFLQQNPVTEYMKKAEARLLEEQRRVQVYLHESTQDELARKCEQVLIEKHLEIFHTEFQNLLDADKNEDLGRMYNLVSRIQDGLGELKKLLETHIHNQGLAAIEKCGEAALNDPKMYVQTVLDVHKKYNALVMSAFNNDAGFVAALDKACGRFINNNAVTKMAQSSSKSPELLARYCDSLLKKSSKNPEEAELEDTLNQVMVVFKYIEDKDVFQKFYAKMLAKRLVHQNSASDDAEASMISKLKQACGFEYTSKLQRMFQDIGVSKDLNEQFKKHLTNSEPLDLDFSIQVLSSGSWPFQQSCTFALPSELERSYQRFTAFYASRHSGRKLTWLYQLSKGELVTNCFKNRYTLQASTFQMAILLQYNTEDAYTVQQLTDSTQIKMDILAQVLQILLKSKLLVLEDENANVDEVELKPDTLIKLYLGYKNKKLRVNINVPMKTEQKQEQETTHKNIEEDRKLLIQAAIVRIMKMRKVLKHQQLLGEVLTQLSSRFKPRVPVIKKCIDILIEKEYLERVDGEKDTYSYLA

SEQ ID NO: 12921 - protein, 81 aa, Homo sapiens
MSSTYCGNSSAKMSVNEVSAFSLTLEQKTGFAFVGILCIFLGLLIIRCFKILLDPYSSMPSSTWEDEVEEFDKGTFEYALA

SEQ ID NO: 12922 - protein, 515 aa, Homo sapiens
MCQVGEDYGEPAPEEPPPAPRPSREQKCVKCKEAQPVVVIRAGDAFCRDCFKAFYVHKFRAMLGKNRLIFPGEKVLLAWSGGPSSSSMVWQVLEGLSQDSAKRLRFVAGVIFVDEGAACGQSLEERSKTLAEVKPILQATGFPWHVVALEEVFSLPPSVLWCSAQELVGSEGAYKAAVDSFLQQQHVLGAGGGPGPTQGEEQPPQPPLDPQNLARPPAPAQTEALSQLFCSVRTLTAKEELLQTLRTHLILHMARAHGYSKVMTGDSCTRLAIKLMTNLALGRGAFLAWDTGFSDERHGDVVVVRPMRDHTLKEVAFYNRLFSVPSVFTPAVDTKAPEKASIHRLMEAFILRLQTQFPSTVSTVYRTSEKLVKGPRDGPAAGDSGPRCLLCMCALDVDAADSATAFGAQTSSRLSQMQSPIPLTETRTPPGPCCSPGVGWAQRCGQGACRREDPQACIEEQLCYSCRVNMKDLPSLDPLPPYILAEAQLRTQRAWGLQEIRDCLIEDSDDEAGQS

SEQ ID NO: 12923 - protein, 428 aa, Homo sapiens
MVWQVLEGLSQDSAKRLRFVAGVIFVDEGAACGQSLEERSKTLAEVKPILQATGFPWHVVALEEVFSLPPSVLWCSAQELVGSEGAYKAAVDSFLQQQHVLGAGGGPGPTQGEEQPPQPPLDPQNLARPPAPAQTEALSQLFCSVRTLTAKEELLQTLRTHLILHMARAHGYSKVMTGDSCTRLAIKLMTNLALGRGAFLAWDTGFSDERHGDVVVVRPMRDHTLKEVAFYNRLFSVPSVFTPAVDTKAPEKASIHRLMEAFILRLQTQFPSTVSTVYRTSEKLVKGPRDGPAAGDSGPRCLLCMCALDVDAADSATAFGAQTSSRLSQMQSPIPLTETRTPPGPCCSPGVGWAQRCGQGACRREDPQACIEEQLCYSCRVNMKDLPSLDPLPPYILAEAQLRTQRAWGLQEIRDCLIEDSDDEAGQS

SEQ ID NO: 12924 - protein, 485 aa, Homo sapiens
MCQVGEDYGEPAPEEPPPAPRPSREQKCVKCKEAQPVVVIRAGDAFCRDCFKAFYVHKFRAMLGKNRLIFPGEKVLLAWSGGPSSSSMVWQVLEGLSQDSAKRLRFVAGVIFVDEGAACGQSLEERSKTLAEVKPILQATGFPWHVVALEEVFSLPPSVLWCSAQELVGSEGAYKAAVDSFLQQQHVLGAGGGPGPTQGEEQPPQPPLDPQNLARPPAPAQTEALSQLFCSVRTLTAKEELLQTLRTHLILHMARAHGYSKVMTGDSCTRLAIKLMTNLALGRGAFLAWDTGFSDERHGDVVVVRPMRDHTLKEVAFYNRLFSVPSVFTPAVDTKAPEKASIHRLMEAFILRLQTQFPSTVSTVYRTSEKLVKGPRDGPAAGDSGPRCLLCMCALDVDAADSATAFGAQTSSRLSQMQSPIPLTETRTPPGPCCSPGVGWAQRCGQGACRREDPQACIEEQLCYSCRVNMKDLGLGLAGDPGLSD

SEQ ID NO: 12925 - protein, 349 aa, Homo sapiens
MAGGSPAAKRVVVYRNGDPFFPGSQLVVTQRRFPTMEAFLCEVTSAVQAPLAVRALYTPCHGHPVTNLADLKNRGQYVAAGFERFHKLHYLPHRGKDPGGKSCRLQGPPVTRHLCDGAIGRQLPAGAPSYIHVFRNGDLVSPPFSLKLSQAASQDWETVLKLLTEKVKLQSGAVCKLCTLEGLPLSAGKELVTGHYYVAVGEDEFKDLPYLELLVPSPSLPRGCWQPPGSKSRPHRQGAQGHRAQVTQPSPKEPDRIKPSAFYARPQQTIQPRSKLPTLSFPSGVIGVYGAPHRRKETAGALEVADDEDTQTEEPLDQRAAQIVEEALSLENQPGAGAAISASAPALPS

SEQ ID NO: 12926 - protein, 775 aa, Homo sapiens
MASRAVVRARRCPQCPQVRAAAAAPAWAALPLSRSLPPCSNSSSFSMPLFLLLLLVLLLLLEDAGAQQGDGCGHTVLGPESGTLTSINYPQTYPNSTVCEWEIRVKMGERVRIKFGDFDIEDSDSCHFNYLRIYNGIGVSRTEIGKYCGLGLQMNHSIESKGNEITLLFMSGIHVSGRGFLASYSVIDKQDLITCLDTASNFLEPEFSKYCPAGCLLPFAEISGTIPHGYRDSSPLCMAGVHAGVVSNTLGGQISVVISKGIPYYESSLANNVTSVVGHLSTSLFTFKTSGCYGTLGMESGVIADPQITASSVLEWTDHTGQENSWKPKKARLKKPGPPWAAFATDEYQWLQIDLNKEKKITGIITTGSTMVEHNYYVSAYRILYSDDGQKWTVYREPGVEQDKIFQGNKDYHQDVRNNFLPPIIARFIRVNPTQWQQKIAMKMELLGCQFIPKGRPPKLTQPPPPRNSNDLKNTTAPPKIAKGRAPKFTQPLQPRSSNEFPAQTEQTTASPDIRNTTVTPNVTKDVALAAVLVPVLVMVLTTLILILVCAWHWRNRKKKTEGTYDLPYWDRAGWWKGMKQFLPAKAVDHEETPVRYSSSEVNHLSPREVTTVLQADSAEYAQPLVGGIVGTLHQRSTFKPEEGKEAGYADLDPYNSPGQEVYHAYAEPLPITGPEYATPIIMDMSGHPTTSVGQPSTSTFKATGNQPPPLVGTYNTLLSRTDSCSSAQAQYDTPKAGKPGLPAPDELVYQVPQSTQEVSGAGRDGECDVFKEIL

SEQ ID NO: 12927 - protein, 789 aa, Homo sapiens
MASRAVVRARRCPQCPQVRAAAAAPAWAALPLSRSLPPCSNSSSFSMPLFLLLLLVLLLLLEDAGAQQGDGCGHTVLGPESGTLTSINYPQTYPNSTVCEWEIRVKMGERVRIKFGDFDIEDSDSCHFNYLRIYNGIGVSRTEIGKYCGLGLQMNHSIESKGNEITLLFMSGIHVSGRGFLASYSVIDKQDLITCLDTASNFLEPEFSKYCPAGCLLPFAEISGTIPHGYRDSSPLCMAGVHAGVVSNTLGGQISVVISKGIPYYESSLANNVTSVVGHLSTSLFTFKTSGCYGTLGMESGVIADPQITASSVLEWTDHTGQENSWKPKKARLKKPGPPWAAFATDEYQWLQIDLNKEKKITGIITTGSTMVEHNYYVSAYRILYSDDGQKWTVYREPGVEQDKIFQGNKDYHQDVRNNFLPPIIARFIRVNPTQWQQKIAMKMELLGCQFIPKGRPPKLTQPPPPRNSNDLKNTTAPPKIAKGRAPKFTQPLQPRSSNEFPAQTEQTTASPDIRNTTVTPNVTKDVALAAVLVPVLVMVLTTLILILVCAWHWRNRKKKTEGTYDLPYWDRAGFYLMVSLACRHNEGWWKGMKQFLPAKAVDHEETPVRYSSSEVNHLSPREVTTVLQADSAEYAQPLVGGIVGTLHQRSTFKPEEGKEAGYADLDPYNSPGQEVYHAYAEPLPITGPEYATPIIMDMSGHPTTSVGQPSTSTFKATGNQPPPLVGTYNTLLSRTDSCSSAQAQYDTPKAGKPGLPAPDELVYQVPQSTQEVSGAGRDGECDVFKEIL

SEQ ID NO: 12928 - protein, 925 aa, Homo sapiens
MTTEQRRSLQAFQDYIRKTLDPTYILSYMAPWFREEEVQYIQAEKNNKGPMEAATLFLKFLLELQEEGWFRGFLDALDHAGYSGLYEAIESWDFKKIEKLEEYRLLLKRLQPEFKTRIIPTDIISDLSECLINQECEEILQICSTKGMMAGAEKLVECLLRSDKENWPKTLKLALEKERNKFSELWIVEKGIKDVETEDLEDKMETSDIQIFYQEDPECQNLSENSCPPSEVSDTNLYSPFKPRNYQLELALPAMKGKNTIICAPTGCGKTFVSLLICEHHLKKFPQGQKGKVVFFANQIPVYEQQKSVFSKYFERHGYRVTGISGATAENVPVEQIVENNDIIILTPQILVNNLKKGTIPSLSIFTLMIFDECHNTSKQHPYNMIMFNYLDQKLGGSSGPLPQVIGLTASVGVGDAKNTDEALDYICKLCASLDASVIATVKHNLEELEQVVYKPQKFFRKVESRISDKFKYIIAQLMRDTESLAKRICKDLENLSQIQNREFGTQKYEQWIVTVQKACMVFQMPDKDEESRICKALFLYTSHLRKYNDALIISEHARMKDALDYLKDFFSNVRAAGFDEIEQDLTQRFEEKLQELESVSRDPSNENPKLEDLCFILQEEYHLNPETITILFVKTRALVDALKNWIEGNPKLSFLKPGILTGRGKTNQNTGMTLPAQKCILDAFKASGDHNILIATSVADEGIDIAQCNLVILYEYVGNVIKMIQTRGRGRARGSKCFLLTSNAGVIEKEQINMYKEKMMNDSILRLQTWDEAVFREKILHIQTHEKFIRDSQEKPKPVPDKENKKLLCRKCKALACYTADVRVIEECHYTVLGDAFKECFVSRPHPKPKQFSSFEKRAKIFCARQNCSHDWGIHVKYKTFEIPVIKIESFVVEDIATGVQTLYSKWKDFHFEKIPFDPAEMSK

SEQ ID NO: 12929 - protein, 880 aa, Homo sapiens
MTTEQRRSLQAFQDYIRKTLDPTYILSYMAPWFREGYSGLYEAIESWDFKKIEKLEEYRLLLKRLQPEFKTRIIPTDIISDLSECLINQECEEILQICSTKGMMAGAEKLVECLLRSDKENWPKTLKLALEKERNKFSELWIVEKGIKDVETEDLEDKMETSDIQIFYQEDPECQNLSENSCPPSEVSDTNLYSPFKPRNYQLELALPAMKGKNTIICAPTGCGKTFVSLLICEHHLKKFPQGQKGKVVFFANQIPVYEQQKSVFSKYFERHGYRVTGISGATAENVPVEQIVENNDIIILTPQILVNNLKKGTIPSLSIFTLMIFDECHNTSKQHPYNMIMFNYLDQKLGGSSGPLPQVIGLTASVGVGDAKNTDEALDYICKLCASLDASVIATVKHNLEELEQVVYKPQKFFRKVESRISDKFKYIIAQLMRDTESLAKRICKDLENLSQIQNREFGTQKYEQWIVTVQKACMVFQMPDKDEESRICKALFLYTSHLRKYNDALIISEHARMKDALDYLKDFFSNVRAAGFDEIEQDLTQRFEEKLQELESVSRDPSNENPKLEDLCFILQEEYHLNPETITILFVKTRALVDALKNWIEGNPKLSFLKPGILTGRGKTNQNTGMTLPAQKCILDAFKASGDHNILIATSVADEGIDIAQCNLVILYEYVGNVIKMIQTRGRGRARGSKCFLLTSNAGVIEKEQINMYKEKMMNDSILRLQTWDEAVFREKILHIQTHEKFIRDSQEKPKPVPDKENKKLLCRKCKALACYTADVRVIEECHYTVLGDAFKECFVSRPHPKPKQFSSFEKRAKIFCARQNCSHDWGIHVKYKTFEIPVIKIESFVVEDIATGVQTLYSKWKDFHFEKIPFDPAEMSK

SEQ ID NO: 12930 - protein, 67 aa, Homo sapiens
MRIHYLLFALLFLFLVPVPGHGGIINTLQKYYCRVRGGRCAVLSCLPKEEQIGKCSTRGRKCCRRKK

SEQ ID NO: 12931 - protein, 541 aa, Homo sapiens
MTTPAGSGSGFGSVSWWGLSPALDLQAESPPVDPDSQADTVHSNPELDVLLLGSVDGRHLLRTLSRAKFWPRRRFNFFVLENNLEAVARHMLIFSLALEEPEKMGLQERSETFLEVWGNALLRPPVAAFVRAQADLLAHLVPEPDRLEEQLPWLSLRALKFRERDALEAVFRFWAGGEKGPQAFPMSRLWDSRLRHYLGSRYDARRGVSDWDLRMKLHDRGAQVIHPQEFRRWRDTGVAFELRDSSAYHVPNRTLASGRLLSYRGERVAARGYWGDIATGPFVAFGIEADDESLLRTSNGQPVKTAGEITQHNVTELLRDVAAWGRARATGGDLEEQQHAEGSPEPGTPAAPTPESFTVHFLPLNSAQTLHHKSCYNGRFQLLYVACGMVHLLIPELGACVAPGGNLIVELARYLVDVRQEQLQGFNTRVRELAQAAGFAPQTGARPSETFARFCKSQESALGNTVPAVEPGTPPLDILAQPLEASNPALEGLTQPLQGGTPHCEPCQLPSESPGSLSEVLAQPQGALAPPNCESDSKTGV

SEQ ID NO: 12932 - protein, 95 aa, Homo sapiens
MTTPAGSGSGFGSVSWWGLSPALDLQAESPPVDPDSQADTVHSNPELDVLLLGSVDGRHLLRTLSRAKFWPRRRFNVSWDEDESPDSRVLEGGRD

SEQ ID NO: 12933 - protein, 608 aa, Homo sapiens
MLPLLDSSKRAGTLGSGCGVPRVHSAALSREEGASRDIWRIKVWARVMTTPAGSGSGFGSVSWWGLSPALDLQAERDATVDALPTTMVPQPAVILPGPPVDPDSQADTVHSNPELDVLLLGSVDGRHLLRTLSRAKFWPRRRFNFFVLENNLEAVARHMLIFSLALEEPEKMGLQERSETFLEVWGNALLRPPVAAFVRAQADLLAHLVPEPDRLEEQLPWLSLRALKFRERDALEAVFRFWAGGEKGPQAFPMSRLWDSRLRHYLGSRYDARRGVSDWDLRMKLHDRGAQVIHPQEFRRWRDTGVAFELRDSSAYHVPNRTLASGRLLSYRGERVAARGYWGDIATGPFVAFGIEADDESLLRTSNGQPVKTAGEITQHNVTELLRDVAAWGRARATGGDLEEQQHAEGSPEPGTPAPTPESFTVHFLPLNSAQTLHHKSCYNGRFQLLYVACGMVHLLIPELGACVAPGGNLIVELARYLVDVRQEQLQGFNTRVRELAQAAGFAPQTGARPSETFARFCKSQESALGNTVPAVEPGTPPLDILAQPLEASNPALEGLTQPLQGGTPHCEPCQLPSESPGSLSEVLAQPQGALAPPNCESDSKTGV

SEQ ID NO: 12934 - protein, 588 aa, Homo sapiens
MLPLLDSSKRAGTLGSGCGVPRVHSAALSREEGASRDIWRIKVWARVMTTPAGSGSGFGSVSWWGLSPALDLQAESPPVDPDSQADTVHSNPELDVLLLGSVDGRHLLRTLSRAKFWPRRRFNFFVLENNLEAVARHMLIFSLALEEPEKMGLQERSETFLEVWGNALLRPPVAAFVRAQADLLAHLVPEPDRLEEQLPWLSLRALKFRERDALEAVFRFWAGGEKGPQAFPMSRLWDSRLRHYLGSRYDARRGVSDWDLRMKLHDRGAQVIHPQEFRRWRDTGVAFELRDSSAYHVPNRTLASGRLLSYRGERVAARGYWGDIATGPFVAFGIEADDESLLRTSNGQPVKTAGEITQHNVTELLRDVAAWGRARATGGDLEEQQHAEGSPEPGTPAAPTPESFTVHFLPLNSAQTLHHKSCYNGRFQLLYVACGMVHLLIPELGACVAPGGNLIVELARYLVDVRQEQLQGFNTRVRELAQAAGFAPQTGARPSETFARFCKSQESALGNTVPAVEPGTPPLDILAQPLEASNPALEGLTQPLQGGTPHCEPCQLPSESPGSLSEVLAQPQGALAPPNCESDSKTGV

SEQ ID NO: 12935 - protein, 487 aa, Homo sapiens
MKMRAQIPESLREEGIEILKPQFFVLENNLEAVARHMLIFSLALEEPEKMGLQERSETFLEVWGNALLRPPVAAFVRAQADLLAHLVPEPDRLEEQLPWLSLRALKFRERDALEAVFRFWAGGEKGPQAFPMSRLWDSRLRHYLGSRYDARRGVSDWDLRMKLHDRGAQVIHPQEFRRWRDTGVAFELRDSSAYHVPNRTLASGRLLSYRGERVAARGYWGDIATGPFVAFGIEADDESLLRTSNGQPVKTAGEITQHNVTELLRDVAAWGRARATGGDLEEQQHAEGSPEPGTPAAPTPESFTVHFLPLNSAQTLHHKSCYNGRFQLLYVACGMVHLLIPELGACVAPGGNLIVELARYLVDVRQEQLQGFNTRVRELAQAAGFAPQTGARPSETFARFCKSQESALGNTVPAVEPGTPPLDILAQPLEASNPALEGLTQPLQGGTPHCEPCQLPSESPGSLSEVLAQPQGALAPPNCESDSKTGV

SEQ ID NO: 12936 - protein, 85 aa, Homo sapiens
MTMFKGSNEMKSRWNWGSITCIICFTCVGSQLSMSSSKASNFSGPLQLYQRELEIFIVLTDVPNYRLIKENSHLHTTIVDQGRTV

SEQ ID NO: 12937 - protein, 522 aa, Homo sapiens
MRLRVRLLKRTWPLEVPETEPTLGHLRSHLRQSLLCTWGYSSNTRFTITLNYKDPLTGDEETLASYGIVSGDLICLILQDDIPAPNIPSSTDSEHSSLQNNEQPSLATSSNQTSMQDEQPSDSFQGQAAQSGVWNDDSMLGPSQNFEAESIQDNAHMAEGTGFYPSEPMLCSESVEGQVPHSLETLYQSADCSDANDALIVLIHLLMLESGYIPQGTEAKALSMPEKWKLSGVYKLQYMHPLCEGSSATLTCVPLGNLIVVNATLKINNEIRSVKRLQLLPESFICKEKLGENVANIYKDLQKLSRLFKDQLVYPLLAFTRQALNLPDVFGLVVLPLELKLRIFRLLDVRSVLSLSAVCRDLFTASNDPLLWRFLYLRDFRDNTVRVQDTDWKELYRKRHIQRKESPKGRFVMLLPSSTHTIPFYPNPLHPRPFPSSRLPPGIIGGEYDQRPTLPYVGDPISSLIPGPGETPSQFPPLRPRFDPVGPLPGPNPILPGRGGPNDRFPFRPSRGRPTDGRLSFM

SEQ ID NO: 12938 - protein, 443 aa, Homo sapiens
MARPPGGSGPLLDSEHSSLQNNEQPSLATSSNQTSMQDEQPSDSFQGQAAQSGVWNDDSMLGPSQNFEAESIQDNAHMAEGTGFYPSEPMLCSESVEGQVPHSLETLYQSADCSDANDALIVLIHLLMLESGYIPQGTEAKALSMPEKWKLSGVYKLQYMHPLCEGSSATLTCVPLGNLIVVNATLKINNEIRSVKRLQLLPESFICKEKLGENVANIYKDLQKLSRLFKDQLVYPLLAFTRQALNLPDVFGLVVLPLELKLRIFRLLDVRSVLSLSAVCRDLFTASNDPLLWRFLYLRDFRDNTVRVQDTDWKELYRKRHIQRKESPKGRFVMLLPSSTHTIPFYPNPLHPRPFPSSRLPPGIIGGEYDQRPTLPYVGDPISSLIPGPGETPSQFPPLRPRFDPVGPLPGPNPILPGRGGPNDRFPFRPSRGRPTDGRLSFM

SEQ ID NO: 12939 - protein, 408 aa, Homo sapiens
MQDEQPSDSFQGQAAQSGVWNDDSMLGPSQNFEAESIQDNAHMAEGTGFYPSEPMLCSESVEGQVPHSLETLYQSADCSDANDALIVLIHLLMLESGYIPQGTEAKALSMPEKWKLSGVYKLQYMHPLCEGSSATLTCVPLGNLIVVNATLKINNEIRSVKRLQLLPESFICKEKLGENVANIYKDLQKLSRLFKDQLVYPLLAFTRQALNLPDVFGLVVLPLELKLRIFRLLDVRSVLSLSAVCRDLFTASNDPLLWRFLYLRDFRDNTVRVQDTDWKELYRKRHIQRKESPKGRFVMLLPSSTHTIPFYPNPLHPRPFPSSRLPPGIIGGEYDQRPTLPYVGDPISSLIPGPGETPSQFPPLRPRFDPVGPLPGPNPILPGRGGPNDRFPFRPSRGRPTDGRLSFM

SEQ ID NO: 12940 - protein, 318 aa, Homo sapiens
MSTHVAGLGLDKMKLGNPQSFLDQEEADDQQLLEPEAWKTYTERRNALREFLTSDLSPHLLKRHHARMQLLRKCSYYIEVLPKHLALGDQNPLVLPSALFQLIDPWKFQRMKKVGTAQTKIQLLLLGDLLEQLDHGRAELDALLRSPDPRPFLADWALVERRLADVSAVMDSFLTMMVPGRLHVKHRLVSDVSATKIPHIWLMLSTKMPVVFDRKASAAHQDWARLRWFVTIQPATSEQYELRFRLLDPRTQQECAQCGVIPVAACTFDVRNLLPNRSYKFTIKRAETSTLVYEPWRDSLTLHTKPEPLEGPALSHSV

SEQ ID NO: 12941 - protein, 285 aa, Homo sapiens
MAGLGHPAAFGRATHAVVRALPESLGQHALRSAKGEEVDVARAERQHQLYVGVLGSKLGLQVVELPADESLPDCVFVEDVAVVCEETALITRPGAPSRRKEVDMMKEALEKLQLNIVEMKDENATLDGGDVLFTGREFFVGLSKRTNQRGAEILADTFKDYAVSTVPVADGLHLKSFCSMAGPNLIAIGSSESAQKALKIMQQMSDHRYDKLTVPDDIAANCIYLNIPNKGHVLLHRTPEEYPESAKVYEKLKDHMLIPVSMSELEKVDGLLTCCSVLINKKVDS

SEQ ID NO: 12942 - protein, 182 aa, Homo sapiens
MMKEALEKLQLNIVEMKDENATLDGGDVLFTGREFFVGLSKRTNQRGAEILADTFKDYAVSTVPVADGLHLKSFCSMAGPNLIAIGSSESAQKALKIMQQMSDHRYDKLTVPDDIAANCIYLNIPNKGHVLLHRTPEEYPESAKVYEKLKDHMLIPVSMSELEKVDGLLTCCSVLINKKVDS

SEQ ID NO: 12943 - protein, 520 aa, Homo sapiens
MASNDKGMAPSLGSPWASQMGPWDAILKAVKDQLPSLDSDSPLSDYGEEELFIFQRNQTSLIPDLSEELAEDPADGDKSRAWVAAAEESLPEPVLVPAELATEPGCRQNTRTKDASSQEGRDPGRPFESSGEVSALLGMAEEPPRWLEGDLGSLSFNTKGSQGPPWDPQAEATLSCHEGDPKAEPLSTASQESVNRRALRQERRKMIETDILQKVTRDACGPTSSDKGGVKEAPCHAAESAPRSKMPLVEPPEGPPVLSLQQLEAWDLDDILQSLAGQEDNQGNRAPGTVWWAADHRQVQDRMVPSAHNRLMEQLALLCTTQSKASACARKVPADTPQDTKEADSGSRCASRKQGSQAGPGPQLAQGMRLNAESPTIFIDLRQMELPDHLSPESSSHSSSDSEEEEEEEMAALGDAEGASPSSLGLRTCTGKSQLLQQLRAFQKGTAQPELPASKGPAGGRAQAPEDTAGSRTGRKQHMKLCAKGQSAQARLPRGRPRALGDVPEPGAAREALMPPLEQL

SEQ ID NO: 12944 - protein, 588 aa, Homo sapiens
MSTETELQVAVKTSAKKDSRKKGQDRSEATLIKRFKGEGVRYKAKLIGIDEVSAARGDKLCQDSMMKLKGVVAGARSKGEHKQKIFLTISFGGIKIFDEKTGALQHHHAVHEISYIAKDITDHRAFGYVCGKEGNHRFVAIKTAQAAEPVILDLRDLFQLIYELKQREELEKKAQKDKQCEQAVYQTILEEDVEDPVYQYIVFEAGHEPIRDPETEENIYQVPTSQKKEGVYDVPKSQPVSNGYSFEDFEERFAAATPNRNLPTDFDEIFEATKAVTQLELFGDMSTPPDITSPPTPATPGDAFIPSSSQTLPASADVFSSVPFGTAAVPSGYVAMGAVLPSFWGQQPLVQQQMVMGAQPPVAQVMPGAQPIAWGQPGLFPATQQPWPTVAGQFPPAAFMPTQTVMPLPAAMFQGPLTPLATVPGTSDSTRSSPQTDKPRQKMGKETFKDFQMAQPPPVPSRKPDQPSLTCTSEAFSSYFNKVGVAQDTDDCDDFDISQLNLTPVTSTTPSTNSPPTPAPRQSSPSKSSASHASDPTTDDIFEEGFESPSKSEEQEAPDGSQASSNSDPFGEPSGEPSGDNISPQAGS

SEQ ID NO: 12945 - protein, 213 aa, Homo sapiens
MSTETELQVAVKTSAKKDSRKKGQDRSEATLIKRFKGEGVRYKAKLIGIDEVSAARGDKLCQDSMMKLKGVVAGARSKGEHKQKIFLTISFGGIKIFDEKTGALQHHHAVHEISYIAKDITDHRAFGYVCGKEGNHRFVAIKTAQAAEPVILDLRDLFQLIYELKQREELEKKAQKDKQCEQAVYQTILEEDVEDPVYQVISETSRGFRFKSD

SEQ ID NO: 12946 - protein, 469 aa, Homo sapiens
MSTETELQVAVKTSAKKDSRKKGQDRSEATLIKRFKGEGVRYKAKLIGIDEVSAARGDKLCQDSMMKLKGVVAGARSKGEHKQKIFLTISFGGIKIFDEKTGVPTSQKKEGVYDVPKSQPVSNGYSFEDFEERFAAATPNRNLPTDFDEIFEATKAVTQLELFGDMSTPPDITSPPTPATPGDAFIPSSSQTLPASADVFSSVPFGTAAVPSGYVAMGAVLPSFWGQQPLVQQQMVMGAQPPVAQVMPGAQPIAWGQPGLFPATQQPWPTVAGQFPPAAFMPTQTVMPLPAAMFQGPLTPLATVPGTSDSTRSSPQTDKPRQKMGKETFKDFQMAQPPPVPSRKPDQPSLTCTSEAFSSYFNKVGVAQDTDDCDDFDISQLNLTPVTSTTPSTNSPPTPAPRQSSPSKSSASHASDPTTDDIFEEGFESPSKSEEQEAPDGSQASSNSDPFGEPSGEPSGDNISPQAGS

SEQ ID NO: 12947 - protein, 537 aa, Homo sapiens
MSTETELQVAVKTSAKKDSRKKGQDRSEATLIKRFKGEGVRYKAKLIGIDEVSAARGDKLCQDSMMKLKGVVAGARSKGEHKQKIFLTISFGGIKIFDEKTGALQHHHAVHEISYIAKDITDHRAFGYVCGKEGNHRFVAIKTAQAAEPVILDLRDLFQLIYELKQREELEKKAQKDKQCEQAVYQVPTSQKKEGVYDVPKSQPVSNGYSFEDFEERFAAATPAVTQLELFGDMSTPPDITSPPTPATPGDAFIPSSSQTLPASADVFSSVPFGTAAVPSGYVAMGAVLPSFWGQQPLVQQQMVMGAQPPVAQVMPGAQPIAWGQPGLFPATQQPWPTVAGQFPPAAFMPTQTVMPLPAAMFQGPLTPLATVPGTSDSTRSSPQTDKPRQKMGKETFKDFQMAQPPPVPSRKPDQPSLTCTSEAFSSYFNKVGVAQDTDDCDDFDISQLNLTPVTSTTPSTNSPPTPAPRQSSPSKSSASHASDPTTDDIFEEGFESPSKSEEQEAPDGSQASSNSDPFGEPSGEPSGDNISPQAGS

SEQ ID NO: 12948 - protein, 553 aa, Homo sapiens
MSTETELQVAVKTSAKKDSRKKGQDRSEATLIKRFKGEGVRYKAKLIGIDEVSAARGDKLCQDSMMKLKGVVAGARSKGEHKQKIFLTISFGGIKIFDEKTGALQHHHAVHEISYIAKDITDHRAFGYVCGKEGNHRFVAIKTAQAAEPVILDLRDLFQLIYELKQREELEKKAQKDKQCEQAVYQVPTSQKKEGVYDVPKSQPVSNGYSFEDFEERFAAATPNRNLPTDFDEIFEATKAVTQLELFGDMSTPPDITSPPTPATPGDAFIPSSSQTLPASADVFSSVPFGTAAVPSGYVAMGAVLPSFWGQQPLVQQQMVMGAQPPVAQVMPGAQPIAWGQPGLFPATQQPWPTVAGQFPPAAFMPTQTVMPLPAAMFQGPLTPLATVPGTSDSTRSSPQTDKPRQKMGKETFKDFQMAQPPPVPSRKPDQPSLTCTSEAFSSYFNKVGVAQDTDDCDDFDISQLNLTPVTSTTPSTNSPPTPAPRQSSPSKSSASHASDPTTDDIFEEGFESPSKSEEQEAPDGSQASSNSDPFGEPSGEPSGDNISPQAGS

SEQ ID NO: 12949 - protein, 555 aa, Homo sapiens
MSTETELQVAVKTSAKKDSRKKGQDRSEATLIKRFKGEGVRYKAKLIGIDEVSAARGDKLCQDSMMKLKGVVAGARSKGEHKQKIFLTISFGGIKIFDEKTGALQHHHAVHEISYIAKDITDHRAFGYVCGKEGNHRFVAIKTAQAAEPVILDLRDLFQLIYELKQREELEKKAQKDKQCEQAVYQTILEEDVEDPVYQYIVFEAGHEPIRDPETEENIYQVPTSQKKEGVYDVPKSQPVSAVTQLELFGDMSTPPDITSPPTPATPGDAFIPSSSQTLPASADVFSSVPFGTAAVPSGYVAMGAVLPSFWGQQPLVQQQMVMGAQPPVAQVMPGAQPIAWGQPGLFPATQQPWPTVAGQFPPAAFMPTQTVMPLPAAMFQGPLTPLATVPGTSDSTRSSPQTDKPRQKMGKETFKDFQMAQPPPVPSRKPDQPSLTCTSEAFSSYFNKVGVAQDTDDCDDFDISQLNLTPVTSTTPSTNSPPTPAPRQSSPSKSSASHASDPTTDDIFEEGFESPSKSEEQEAPDGSQASSNSDPFGEPSGEPSGDNISPQAGS

SEQ ID NO: 12950 - protein, 136 aa, Homo sapiens
MRTPGPLPVLLLLLAGAPAARPTPPTCYSRMRALSQEITRDFNLLQVSEPSEPCVRYLPRLYLDIHNYCVLDKLRDFVASPPCWKVAQVDSLKDKARKLYTIMNSFCRRDLVFLLDDCNALEYPIPVTTVLPDRQR

SEQ ID NO: 12951 - protein, 463 aa, Homo sapiens
MAQQQTGSRKRKAPAVEAGAGSSSSQGLAAADGEGPLLPKKQKRPATRRRLVHYLKGREVGARGPAGLQGFEGELRGYAVQRLPELLTERQLDLGTLNKVFASQWLNARQVVCGTKCNTLFVVDVQSGHITRIPLMRDKEAGLAQAHQGCGIHAIELNPSKTLLATGGENPNSLAIYQLPTLDPLCLGDRHGHKDWIFAVAWLSDTVAVSGSRDGTVALWRMDPDMFNGSIAWHSEVGLPVYAHIRPRDVEAIPRASTNPSNRKVRALAFSGKNQELGAVSLDGYFHLWKARSTLSRLLSIRLPYCRENVCLTYCDELSLYAVGSQSHVSFLDPRQRQQNIRPLCSREGGTGVRSLSFYQHIITVGTGHGSLLFYDIRAQKFLEERASSSLDSMPGPAGRKLKLACGRGWLNQDDVWVNYFGGMGEFPNALYTHCYNWPEMKLFVAGGPLPSGLHGNYAGLWS

SEQ ID NO: 12952 - protein, 147 aa, Homo sapiens
MSFRFGQHLIKPSVVFLKTELSFALVNRKPVVPGHVLVCPLRPVERFHDLRPDEVADLFQTTQRVGTVVEKHFHGTSLTFSMQDGPEAGQTVKHVHVHVLPRKAGDFHRNDSIYEELQKHDKEDFPASWRSEEEMAAEAAALRVYFQ

SEQ ID NO: 12953 - protein, 97 aa, Homo sapiens
MNQENPPPYPGPGPTAPYPPYPPQPMGPGPMGGPYPPPQGYPYQGYPQYGWQGGPQEPPKTTVYVVEDQRRDELGPSTCLTACWTALCCCCLWDMLT

SEQ ID NO: 12954 - protein, 116 aa, Homo sapiens
MGSRLSQPFESYITAPPGTAAAPAKPAPPATPGAPTSPAEHRLLKTCWSCRVLSGLGLMGAGGYVYWVARKPMKMGYPPSPWTITQMVIGLSENQGIATWGIVVMADPKGKAYRVV

SEQ ID NO: 12955 - protein, 112 aa, Homo sapiens
MGSRLSQPFESYITAPPGTAAAPAKPAPPATPGAPTSPAEHRLLKTCWSCRVLSGLGLMGAGGYVYWVARKPMKMGYPPSPWTITQMVIGLSIATWGIVVMADPKGKAYRVV

SEQ ID NO: 12956 - protein, 433 aa, Homo sapiens
MEPQLGPEAAALRPGWLALLLWVSALSCSFSLPASSLSSLVPQVRTSYNFGRTFLGLDKCNACIGTSICKKFFKEEIRSDNWLASHLGLPPDSLLSYPANYSDDSKIWRPVEIFRLVSKYQNEISDRRICASASAPKTCSIERVLRKTERFQKWLQAKRLTPDLVQGLASPLLRCPSQRLLDRVVRRYAEVADAGSIFMDHFTDRDKLRLLYTLAVNSHPILLQIFPGAEGWPLPKYLGSCGRFLVSTSTRPLQEFYDAPPDQAADLAYQLLGVLESLRSNDLNYFFYFTHIDAGMFGVFNNGHLFIRDASAVGVIDKQEGSQEANRAGENKDIFSCLVSGCQAQLPSCESISEKQSLVLVCQKLLPRLLQGRFPSPVQDDIDSILVQCGDSIRPDPEVLGAASQLKDILRPLRTCDSRFAYRYPDCKYNDKF

SEQ ID NO: 12957 - protein, 182 aa, Homo sapiens
MEPQLGPEAAALRPGWLALLLWVSALSCSFSLPASSLSSLVPQVRTSYNFGRTFLGLDKCNACIGTSICKKFFKEEIRSDNWLASHLGLPPDSLLSYPANYSDDSKIWRPVEIFRLVSKYQNEISDRRICASASAPKTCSIERVLRKTERFQKWLQAKRLTPDLVQDCHQGQRELKFLCMLR

SEQ ID NO: 12958 - protein, 263 aa, Homo sapiens
MITFLPLLLGLSLGCTGAGGFVAHVESTCLLDDAGTPKDFTYCISFNKDLLTCWDPEENKMAPCEFGVLNSLANVLSQHLNQKDTLMQRLRNGLQNCATHTQPFWGSLTNRTRPPSVQVAKTTPFNTREPVMLACYVWGFYPAEVTITWRKNGKLVMPHSSAHKTAQPNGDWTYQTLSHLALTPSYGDTYTCVVEHIGAPEPILRDWTPGLSPMQTLKVSVSAVTLGLGLIIFSLGVISWRRAGHSSYTPLPGSNYSEGWHIS

SEQ ID NO: 12959 - protein, 310 aa, Homo sapiens
MGDVLEQFFILTGLLVCLACLAKCVRFSRCVLLNYWKVLPKSFLRSMGQWAVITGAGDGIGKAYSFELAKRGLNVVLISRTLEKLEAIATEIERTTGRSVKIIQADFTKDDIYEHIKEKLAGLEIGILVNNVGMLPNLLPSHFLNAPDEIQSLIHCNITSVVKMTQLILKHMESRQKGLILNISSGIALFPWPLYSMYSASKAFVCAFSKALQEEYKAKEVIIQVLTPYAVSTAMTKYLNTNVITKTADEFVKESLNYVTIGGETCGCLAHEILAGFLSLIPAWAFYSGAFQRLLLTHYVAYLKLNTKVR

SEQ ID NO: 12960 - protein, 260 aa, Homo sapiens
MGDVLEQFFILTGLLVCLACLAKCVRFSRCVLLNYWKVLPKSFLRSMGQWAVITGAGDGIGKAYSFELAKRGLNVVLISRTLEKLEAIATEIERTTGRSVKIIQADFTKDDIYEHIKEKLAGLEIGILVNNVGMLPNLLPSHFLNAPDEIQSLIHCNITSVVKMTQLILKHMESRQKGLILNISSGIALFPWPLYSMYSASKAFVCAFSKALQEEYKAKEVIIQAGFLSLIPAWAFYSGAFQRLLLTHYVAYLKLNTKVR

SEQ ID NO: 12961 - protein, 198 aa, Homo sapiens
MADQRQRSLSTSGESLYHVLGLDKNATSDDIKKSYRKLALKYHPDKNPDNPEAADKFKEINNAHAILTDATKRNIYDKYGSLGLYVAEQFGEENVNTYFVLSSWWAKALFVFCGLLTCCYCCCCLCCCFNCCCGKCKPKAPEGEETEFYVSPEDLEAQLQSDEREATDTPIVIQPASATETTQLTADSHPSYHTDGFN

SEQ ID NO: 12962 - protein, 167 aa, Homo sapiens
MADQRQRSLSTSGESLYHVLGLDKNATSDDIKKSYRKLALKYHPDKNPDNPEAADKFKEINNAHAILTDATKRNIYDKYGSLGLYVAEQFGEENVNTYFVLSSWWAKALFVFCGLLTCCYCCCCLCCCFNCCCGKCKPKAPEGEETEFYVSPEDLEAQLQSDERGGH

SEQ ID NO: 12963 - protein, 261 aa, Homo sapiens
MASQLQNRLRSALALVTGAGSGIGRAVSVRLAGEGATVAACDLDRAAAQETVRLLGGPGSKEGPPRGNHAAFQADVSEARAARCLLEQVQACFSRPPSVVVSCAGITQDEFLLHMSEDDWDKVIAVNLKGTFLVTQAAAQALVSNGCRGSIINISSIVGKVGNVGQTNYAASKAGVIGLTQTAARELGRHGIRCNSVLPGFIATPMTQKVPQKVVDKITEMIPMGHLGDPEDVADVVAFLASEDSGYITGTSVEVTGGLFM

SEQ ID NO: 12964 - protein, 333 aa, Homo sapiens
MSWIKEGELSLWERFCANIIKAGPMPKHIAFIMDGNRRYAKKCQVERQEGHSQGFNKLAETLRWCLNLGILEVTVYAFSIENFKRSKSEVDGLMDLARQKFSRLMEEKEKLQKHGVCIRVLGDLHLLPLDLQELIAQAVQATKNYNKCFLNVCFAYTSRHEISNAVREMAWGVEQGLLDPSDISESLLDKCLYTNRSPHPDILIRTSGEVRLSDFLLWQTSHSCLVFQPVLWPEYTFWNLFEAILQFQMNHSVLQKARDMYAEERKRQQLERDQATVTEQLLREGLQASGDAQLRRTRLHKLSARREERVQGFLQALELKRADWLARLGTASA

SEQ ID NO: 12965 - protein, 334 aa, Homo sapiens
MSWIKEGELSLWERFCANIIKAGPMPKHIAFIMDGNRRYAKKCQVERQEGHSQGFNKLAETLRWCLNLGILEVTVYAFSIENFKRSKSEVDGLMDLARQKFSRLMEEKEKLQKHGVCIRVLGDLHLLPLDLQELIAQAVQATKNYNKCFLNVCFAYTSRHEISNAVREMAWGVEQGLLDPSDISESLLDKCLYTNRSPHPDILIRTSGEVRLSDFLLWQTSHSCLVFQPVLWPEYTFWNLFEAILQFQMNHSVLQQKARDMYAEERKRQQLERDQATVTEQLLREGLQASGDAQLRRTRLHKLSARREERVQGFLQALELKRADWLARLGTASA

SEQ ID NO: 12966 - protein, 294 aa, Homo sapiens
MSWIKEGELSLWERFCANIIKAGPMPKHIAFIMDGNRRYAKKCQVERQEGHSQGFNKLAETLRWCLNLGILEVTVYAFSIENFKRSKSEVDGLMDLARQKFSRLMEEKCFLNVCFAYTSRHEISNAVREMAWGVEQGLLDPSDISESLLDKCLYTNRSPHPDILIRTSGEVRLSDFLLWQTSHSCLVFQPVLWPEYTFWNLFEAILQFQMNHSVLQKARDMYAEERKRQQLERDQATVTEQLLREGLQASGDAQLRRTRLHKLSARREERVQGFLQALELKRADWLARLGTASA

SEQ ID NO: 12967 - protein, 299 aa, Homo sapiens
MSWIKEGELSLWERFCANIIKAGPMPKHIAFIMDGNRRYAKKCQVERQEGHSQGFNKLAETLRWCLNLGILEVTVYAFSIENFKRSKSEVDGLMDLARQKFSRLMEEKEKLQKHGVCIRVLGDLHLLPLDLQELIAQAVQATKNYNNDISESLLDKCLYTNRSPHPDILIRTSGEVRLSDFLLWQTSHSCLVFQPVLWPEYTFWNLFEAILQFQMNHSVLQKARDMYAEERKRQQLERDQATVTEQLLREGLQASGDAQLRRTRLHKLSARREERVQGFLQALELKRADWLARLGTASA

SEQ ID NO: 12968 - protein, 102 aa, Homo sapiens
MPSCSPQQASKAEENGSNSFMHSMVPQLEWQMETTQSLVDSYVAIVNKTVWDLMVGLTPKTIMHLMINNNKEFIFSELLANLYLHGDKNMLMEESAEQAQRS

SEQ ID NO: 12969 - protein, 263 aa, Homo sapiens
MRPGAPGPLWPLPWGALAWAVGFVSSMGSGNPAPGGVCWLQQGQEATCSLVLQTDVTRAECCASGNIDTAWSNLTHPGNKINLLGFLGLVHCLPCKDSCDGVECGPGKACRMLGGRPRCECAPDCSGLPARLQVCGSDGATYRDECELRAARCRGHPDLSVMYRGRCRKSCEHVVCPRPQSCVVDQTGSAHCVVCRAAPCPVPSSPGQELCGNNNVTYISSCHMRQATCFLGRSIGVRHAGSCAGTPEEPPGGESAEEEENFV

SEQ ID NO: 12970 - protein, 237 aa, Homo sapiens [sequence omitted]

SEQ ID NO: 12971 - protein, 116 aa, Homo sapiens [sequence omitted]

SEQ ID NO: 12972 - protein, 333 aa, Homo sapiens
MKGEAGHMLHNEKSKQEGHIWGSMRRTAFILGSGLLSFVAFWNSVTWHLQRFWGASGYFWQAQWERLLTTFEGKEWILFFIGAIQVPCLFFWSFNGLLLVVDTTGKPNFISRYRIQVGKNEPVDPVKLRQSIRTVLFNQCMISFPMVVFLYPFLKWWRDPCRRELPTFHWFLLELAIFTLIEEVLFYYSHRLLHHPTFYKKIHKKHHEWTAPIGVISLYAHPIEHAVSNMLPVIVGPLVMGSHLSSITMWFSLALIITTISHCGYHLPFLPSPEFHDYHHLKFNQCYGVLGVLDHLHGTDTMFKQTKAYERHVLLLGFTPLSESIPDSPKRME

SEQ ID NO: 12973 - protein, 310 aa, Homo sapiens
MRRTAFILGSGLLSFVAFWNSVTWHLQRFWGASGYFWQAQWERLLTTFEGKEWILFFIGAIQVPCLFFWSFNGLLLVVDTTGKPNFISRYRIQVGKNEPVDPVKLRQSIRTVLFNQCMISFPMVVFLYPFLKWWRDPCRRELPTFHWFLLELAIFTLIEEVLFYYSHRLLHHPTFYKKIHKKHHEWTAPIGVISLYAHPIEHAVSNMLPVIVGPLVMGSHLSSITMWFSLALIITTISHCGYHLPFLPSPEFHDYHHLKFNQCYGVLGVLDHLHGTDTMFKQTKAYERHVLLLGFTPLSESIPDSPKRME

SEQ ID NO: 12974 - protein, 117 aa, Homo sapiens
MSWRGRSTYYWPRPRRYVEPPEMIGPMRPEQFSDEVEPATPEEGEPATQRQDPAAAQEGEDEGASAGQGPKPEADSQEQGHPQTGCECEDGPDGQEMDPPNPEEVKTPEEGEKQSQC

SEQ ID NO: 12975 - protein, 116 aa, Homo sapiens
MSWRGRSTYRPRPRRYVEPPEMIGPMRPEQFSDEVEPATPEEGEPATQRQDPAAAQEGQDEGASAGQGPKPEAHSQEQGHPQTGCECEDGPDGQEMDPPNPEEVKTPEEGEKQSQC

SEQ ID NO: 12976 - protein, 561 aa, Homo sapiens
MADPQAGSAAGDWEIDVESLELEEDVCGAPRSTPPGPSPPPADGDCEDDEDDDGVDEDAEEEGDGEEAGASPGMPGQPEQRGGPQPRPPLAPQASPAGTGPRERCTPAGGGAEPRKLSRTPKCARCRNHGVVSCLKGHKRFCRWRDCQCANCLLVVERQRVMAAQVALRRQQATEDKKGLSGKQNNFERKAVYQRQVRAPSLLAKSILEGYRPIPAETYVGGTFPLPPPVSDRMRKRRAFADKELENIMLEREYKEREMLETSQAAALFLPNRMVPGPDYNSYKSAYSPSPVEPPSKDFCNFLPTCLDLTMQYSGSGNMELISSNVSVATTYRQYPLSSRFLVWPKCGPISDTLLYQQCLLNATTSVQALKPGASWDLKGARVQDGLSAEQDMMPSKLEGSLVLPHTPEIQTTRSDLQGHQAVPERSAFSPPRRNFSPIVDTDSLAAQGHVLTKISKENTRHPLPLRHNPFHSLFQQTLTDKSGPELKTPFVKEAFEETPKKHRECLVKDNQKYTFTIDRCAKDLFVAKQVGTKLSVNEPLSFSVESILKRPSSAITRVSQ

SEQ ID NO: 12977 - protein, 226 aa, Homo sapiens
MADPQAGSAAGDWEIDVESLELEEDVCGAPRSTPPGPSPPPADGDCEDDEDDDGVDEDAEEEGDGEEAGASPGMPGQPEQRGGPQPRPPLAPQASPAGTGPRERCTPAGGGAEPRKLSRTPKCARCRNHGVVSCLKGHKRFCRWRDCQCANCLLVVERQRVMAAQVALRRQQATEDKKGLSGKQNNFERKAVYQRQVRAPSLLAKSILEVLLGLFYSYYVYIMNHL

SEQ ID NO: 12978 - protein, 328 aa, Homo sapiens
MRKRRAFADKELENIMLEREYKEREMLETSQAAALFLPNRMVPGPDYNSYKSAYSPSPVEPPSKDFCNFLPTCLDLTMQYSGSGNMELISSNVSVATTYRQYPLSSRFLVWPKCGPISDTLLYQQCLLNATTSVQALKPGASWDLKGARVQDGLSAEQDMMPSKLEGSLVLPHTPEIQTTRSDLQGHQAVPERSAFSPPRRNFSPIVDTDSLAAQGHVLTKISKENTRHPLPLRHNPFHSLFQQTLTDKSGPELKTPFVKEAFEETPKKHRECLVKDNQKYTFTIDRCAKDLFVAKQVGTKLSVNEPLSFSVESILKRPSSAITRVSQ

SEQ ID NO: 12979 - protein, 842 aa, Homo sapiens
MKPGGFWLHLTLLGASLPAALGWMDPGTSRGPDVGVGESQAEEPRSFEVTRREGLSSHNELLASCGKKFCSRGSRCVLSRKTGEPECQCLEACRPSYVPVCGSDGRFYENHCKLHRAACLLGKRITVIHSKDCFLKGDTCTMAGYARLKNVLLALQTRLQPLQEGDSRQDPASQKRLLVESLFRDLDADGNGHLSSSELAQHVLKKQDLDEDLLGCSPGDLLRFDDYNSDSSLTLREFYMAFQVVQLSLAPEDRVSVTTVTVGLSTVLTCAVHGDLRPPIIWKRNGLTLNFLDLEDINDFGEDDSLYITKVTTIHMGNYTCHASGHEQLFQTHVLQVNVPPVIRVYPESQAQEPGVAASLRCHAEGIPMPRITWLKNGVDVSTQMSKQLSLLANGSELHISSVRYEDTGAYTCIAKNEVGVDEDISSLFIEDSARKTLANILWREEGLSVGNMFYVFSDDGIIVIHPVDCEIQRHLKPTEKIFMSYEEICPQREKNATQPCQWVSAVNVRNRYIYVAQPALSRVLVVDIQAQKVLQSIGVDPLPAKLSYDKSHDQVWVLSWGDVHKSRPSLQVITEASTGQSQHLIRTPFAGVDDFFIPPTNLIINHIRFGFIFNKSDPAVHKVDLETMMPLKTIGLHHHGCVPQAMAHTHLGGYFFIQCRQDSPASAARQLLVDSVTDSVLGPNGDVTGTPHTSPDGRFIVSAAADSPWLHVQEITVRGEIQTLYDLQINSGISDLAFQRSFTESNQYNIYAALHTEPDLLFLELSTGKVGMLKNLKEPPAGPAQPWGGTHRIMRDSGLFGQYLLTPARESLFLINGRQNTLRCEVSGIKGGTTVVWVGEV

SEQ ID NO: 12980 - protein, 673 aa, Homo sapiens
MKPGGFWLHLTLLGASLPAALGWMDPGTSRGPDVGVGESQAEEPRSFEVTRREGLSSHNELLASCGKKFCSRGSRCVLSLAPEDRVSVTTVTVGLSTVLTCAVHGDLRPPIIWKRNGLTLNFLDLEDINDFGEDDSLYITKVTTIHMGNYTCHASGHEQLFQTHVLQVNVPPVIRVYPESQAQEPGVAASLRCHAEGIPMPRITWLKNGVDVSTQMSKQLSLLANGSELHISSVRYEDTGAYTCIAKNEVGVDEDISSLFIEDSARKTLANILWREEGLSVGNMFYVFSDDGIIVIHPVDCEIQRHLKPTEKIFMSYEEICPQREKNATQPCQWVSAVNVRNRYIYVAQPALSRVLVVDIQAQKVLQSIGVDPLPAKLSYDKSHDQVWVLSWGDVHKSRPSLQVITEASTGQSQHLIRTPFAGVDDFFIPPTNLIINHIRFGFIFNKSDPAVHKVDLETMMPLKTIGLHHHGCVPQAMAHTHLGGYFFIQCRQDSPASAARQLLVDSVTDSVLGPNGDVTGTPHTSPDGRFIVSAAADSPWLHVQEITVRGEIQTLYDLQINSGISDLAFQRSFTESNQYNIYAALHTEPDLLFLELSTGKVGMLKNLKEPPAGPAQPWGGTHRIMRDSGLFGQYLLTPARESLFLINGRQNTLRCEVSGIKGGTTVVWVGEV

SEQ ID NO: 12981 - protein, 605 aa, Homo sapiens
MKPGGFWLHLTLLGASLPAALGWMDPGTSRGPDVGVGESQAEEPRSFEVTRREGLSSHNELLASCGKKFCSRGSRCVLSRKTGEPECQCLEACRPSYVPVCGSDGRFYENHCKLHRAACLLGKRITVIHSKDCFLKGDTCTMAGYARLKNVLLALQTRLQPLQEGDSRQDPASQKRLLVESLFRDLDADGNGHLSSSELAQHVLKKQDLDEDLLGCSPGDLLRFDDYNSDSSLTLREFYMAFQVVQLSLAPEDRVSVTTVTVGLSTVLTCAVHGDLRPPIIWKRNGLTLNFLDLEDINDFGEDDSLYITKVTTIHMGNYTCHASGHEQLFQTHVLQVNVPPVIRVYPESQAQEPGVAASLRCHAEGIPMPRITWLKNGVDVSTQMSKQLSLLANGSELHISSVRYEDTGAYTCIAKNEVGVDEDISSLFIEDSARKTLANILWREEGLSVGNMFYVFSDDGIIVIHPVDCEIQRHLKPTEKIFMSYEEICPQREKNATQPCQWVSAVNVRNRYIYVAQPALSRVLVVDIQAQKVLQSIGVDPLPAKLSYDKSHDQVWVLSWGDVHKSRPSLQVITEASTGQSQHLIRTPFAGVDDFFIPPINLEQ

SEQ ID NO: 12982 - protein, 854 aa, Homo sapiens
MPGGGPQGAPAAAGGGGVSHRAGSRDCLPPAACFRRRRLARRPGYMRSSTGPGIGFLSPAVGTLFRFPGGVSGEESHHSESRARQCGLDSRGLLVRSPVSKSAAAPTVTSVRGTSAHFGIQLRGGTRLPDRLSWPCGPGSAGWQQEFAAMDSSETLDASWEAACSDGARRVRAAGSLPSAELSSNSCSPGCGPEVPPTPPGSHSAFTSSFSFIRLSLGSAGERGEAEGCPPSREAESHCQSPQEMGAKAASLDGPHEDPRCLSRPFSLLATRVSADLAQAARNSSRPERDMHSLPDMDPGSSSSLDPSLAGCGGDGSSGSGDAHSWDTLLRKWEPVLRDCLLRNRRQMEVISLRLKLQKLQEDAVENDDYDKAETLQQRLEDLEQEKISLHFQLPSRQPALSSFLGHLAAQVQAALRRGATQQASGDDTHTPLRMEPRLLEPTAQDSLHVSITRRDWLLQEKQQLQKEIEALQARMFVLEAKDQQLRREIEEQEQQLQWQGCDLTPLVGQLSLGQLQEVSKALQDTLASAGQIPFHAEPPETIRSLQERIKSLNLSLKEITTKVCMSEKFCSTLRKKVNDIETQLPALLEAKMHAISGNHFWTAKDLTEEIRSLTSEREGLEGLLSKLLVLSSRNVKKLGSVKEDYNRLRREVEHQETAYETSVKENTMKYMETLKNKLCSCKCPLLGKVWEADLEACRLLIQSLQLQEARGSLSVEDERQMDDLEGAAPPIPPRLHSEDKRKTPLKVLEEWKTHLIPSLHCAGGEQKEESYILSAELGEKCEDIGKKLLYLEDQLHTAIHSHDEDLIQSLRRELQMVKETLQAMILQLQPAKEAGEREAAASCMTAGVHEAQA

SEQ ID NO: 12983 - protein, 832 aa, Homo sapiens
MPGGGPQGAPAAAGGGGVSHRAGSRDCLPPAACFRRRRLARRPGYMRSSTGPGIGFLSPAVGTLFRFPGGVSGEESHHSESRARQCGLDSRGLLVRSPVSKSAAAPTVTSVRGTSAHFGIQLRGGTRLPDRLSWPCGPGSAGWQQEFAAMDSSETLDASWEAACSDGARRVRAAGSLPSAELSSNSCSPGCGPEVPPTPPGSHSAFTSSFSFIRLSLGSAGERGEAEGCPPSREAESHCQSPQEMGAKAASLDGPHEDPRCLSRPFSLLATRVSADLAQAARNSSRPERDMHSLPDMDPGSSSSLDPSLAGCGGDGSSGSGDAHSWDTLLRKWEPVLRDCLLRNRRQMEVISLRLKLQKLQEDAVENDDYDKAETLQQRLEDLEQEKISLHFQLPSRQPALSSFLGHLAAQVQAALRRGATQQASGDDTHTPLRMEPRLLEPTAQDSLHVSITRRDWLLQEKQQLQKEIEALQARMFVLEAKDQQLRREIEEQEQQLQWQGCDLTPLVGQLSLGQLQEVSKALQDTLASAGQIPFHAEPPETIRSLQERIKSLNLSLKEITTKVCMSEKFCSTLRKKVNDIETQLPALLEAKMHAISGNHFWTAKDLTEEIRSLTSEREGLEGLLSKLLVLSSRNVKKLGSVKEDYNRLRREVEHQETAYETSVKENTMKYMETLKNKLCSCKCPLLGKVWEADLEACRLLIQSLQLQEARGSLSVEDERQMDDLEGAAPPIPPRLHSEDKRKTPLKESYILSAELGEKCEDIGKKLLYLEDQLHTAIHSHDEDLIQSLRRELQMVKETLQAMILQLQPAKEAGEREAAASCMTAGVHEAQA

SEQ ID NO: 12984 - protein, 678 aa, Homo sapiens
MPGGGPQGAPAAAGGGGVSHRAGSRDCLPPAACFRRRRLARRPGYMRSSTGPGIGFLSPAVGTLFRFPGGVSGEESHHSESRARQCGLDSRGLLVRSPVSKSAAAPTVTSVRGTSAHFGIQLRGGTRLPDRLSWPCGPGSAGWQQEFAAMDSSETLDASWEAACSDGARRVRAAGSLPSAELSSNSCSPGCGPEVPPTPPGSHSAFTSSFSFIRLSLGSAGERGEAEGCPPSREAESHCQSPQEMGAKAASLDGPHEDPRCLSRPFSLLATRVSADLAQAARNSSRPERDMHSLPDMDPGSSSSLDPSLAGCGGDGSSGSGDAHSWDTLLRKWEPVLRDCLLRNRRQMEVISLRLKLQKLQEDAVENDDYDKAETLQQRLEDLEQEKISLHFQLPSRQPALSSFLGHLAAQVQAALRRGATQQASGDDTHTPLRMEPRLLEPTAQDSLHVSITRRDWLLQEKQQLQKEIEALQARMFVLEAKDQQLRREIEEQEQQLQWQGCDLTPLVGQLSLGQLQEVSKALQDTLASAGQIPFHAEPPETIRSLQERIKSLNLSLKEITTKVCMSEKFCSTLRKKVNDIETQLPALLEAKMHAISGNHFWTAKDLTEEIRSLTSEREGLEGLLSKLLVLSSRNVKKLGSVKEDYNRLRREVEHQETAYGYKYCDAESWTQRSQQLA

SEQ ID NO: 12985 - protein, 369 aa, Homo sapiens
MPGGGPQGAPAAAGGGGVSHRAGSRDCLPPAACFRRRRLARRPGYMRSSTGPGIGFLSPAVGTLFRFPGGVSGEESHHSESRARQCGLDSRGLLVRSPVSKSAAAPTVTSVRGTSAHFGIQLRGGTRLPDRLSWPCGPGSAGWQQEFAAMDSSETLDASWEAACSDGARRVRAAGSLPSAELSSNSCSPGCGPEVPPTPPGSHSAFTSSFSFIRLSLGSAGERGEAEGCPPSREAESHCQSPQEMGAKAASLDGPHEDPRCLSRPFSLLATRVSADLAQAARNSSRPERDMHSLPDMDPGSSSSLDPSLAGCGGDGSSGSGDAHSWDTLLRKWEPVLRDCLLRNRRQMELEPIALDPPWKPRHPEPNSY

SEQ ID NO: 12986 - protein, 755 aa, Homo sapiens
MPGGGPQGAPAAAGGGGVSHRAGSRDCLPPAACFRRRRLARRPGYMRSSTGPGIGFLSPAVGTLFRFPGGVSGEESHHSESRARQCGLDSRGLLVRSPVSKSAAAPTVTSVRGTSAHFGIQLRGGTRLPDRLSWPCGPGSAGWQQEFAAMDSSETLDASWEAACSDGARRVRAAGSLPSAELSSNSCSPGCGPEVPPTPPGSHSAFTSSFSFIRLSLGSAGERGEAEGCPPSREAESHCQSPQEMGAKAASLDGPHEDPRCLSRPFSLLATRVSADLAQAARNSSRPERDMHSLPDMDPGSSSSLDPSLAGCGGDGSSGSGDAHSWDTLLRKWEPVLRDCLLRNRRQMEVISLRLKLQKLQEDAVENDDYDKAETLQQRLEDLEQEKISLHFQLPSRQPALSSFLGHLAAQVQAALRRGATQQASGDDTHTPLRMEPRLLEPTAQDSLHVSITRRDWLLQEKQQLQKEIEALQARMFVLEAKDQQLRREIEEQEQQLQWQGCDLTPLVGQLSLGQLQEVSKALQDTLASAGQIPFHAEPPETIRSLQERIKSLNLSLKEITTKVCMSEKFCSTLRKKVNDIETQLPALLEAKMHAISGNHFWTAKDLTEEIRSLTSEREGLEGLLSKLLVLSSRNVKKLGSVKEDYNRLRREVEHQETAYDGVSLCRPVWSAVVRSCSLQPLPPEFKQFSCLSLRSSWDYRCPPPCLANFVFLVEMGFYHVDQTGLKLLTSSDPPSSASQSAGITDMSHCAWPLQ

SEQ ID NO: 12987 - protein, 579 aa, Homo sapiens
MPGGGPQGAPAAAGGGGVSHRAGSRDCLPPAACFRRRRLARRPGYMRSSTGPGIGFLSPAVGTLFRFPGGVSGEESHHSESRARQCGLDSRGLLVRSPVSKSAAAPTVTSVRGTSAHFGIQLRGGTRLPDRLSWPCGPGSAGWQQEFAAMDSSETLDASWEAACSDGARRVRAAGSLPSAELSSNSCSPGCGPEVPPTPPGSHSAFTSSFSFIRLSLGSAGERGEAEGCPPSREAESHCQSPQEMGAKAASLDGPHEDPRCLSRPFSLLATRVSADLAQAARNSSRPERDMHSLPDMDPGSSSSLDPSLAGCGGDGSSGSGDAHSWDTLLRKWEPVLRDCLLRNRRQMEVISLRLKLQKLQEDAVENDDYDKAETLQQRLEDLEQEKISLHFQLPSRQPALSSFLGHLAAQVQAALRRGATQQASGDDTHTPLRMEPRLLEPTAQDSLHVSITRRDWLLQEKQQLQKEIEALQARMFVLEAKDQQLRREIEEQEQQLQWQGCDLTPLVGQLSLGQLQEVSKALQDTLASAGQIPFHAEPPETIRSLQERIKSLNLSLKEITTKETISGRLKTSPRRLDH

SEQ ID NO: 12988 - protein, 559 aa, Homo sapiens
MPGGGPQGAPAAAGGGGVSHRAGSRDCLPPAACFRRRRLARRPGYMRSSTGPGIGFLSPAVGTLFRFPGGVSGEESHHSESRARQCGLDSRGLLVRSPVSKSAAAPTVTSVRGTSAHFGIQLRGGTRLPDRLSWPCGPGSAGWQQEFAAMDSSETLDASWEAACSDGARRVRAAGSLPSAELSSNSCSPGCGPEVPPTPPGSHSAFTSSFSFIRLSLGSAGERGEAEGCPPSREAESHCQSPQEMGAKAASLDGPHEDPRCLSRPFSLLATRVSADLAQAARNSSRPERDMHSLPDMDPGSSSSLDPSLAGCGGDGSSGSGDAHSWDTLLRKWEPVLRDCLLRNRRQMEVISLRLKLQKLQEDAVENDDYDKAETLQQRLEDLEQEKISLHFQLPSRQPALSSFLGHLAAQVQAALRRGATQQASGDDTHTPLRMEPRLLEPTAQDSLHVSITRRDWLLQEKQQLQKEIEALQARMFVLEAKDQQLRREIEEQEQQLQWQGCDLTPLVGQLSLGQLQEVSKALQDTLASAGQIPFHAEPPETIRRNKCEGKYYEVHGNT

SEQ ID NO: 12989 - protein, 695 aa, Homo sapiens
MPGGGPQGAPAAAGGGGVSHRAGSRDCLPPAACFRRRRLARRPGYMRSSTGPGIGFLSPAVGTLFRFPGGVSGEESHHSESRARQCGLDSRGLLVRSPVSKSAAAPTVTSVRGTSAHFGIQLRGGTRLPDRLSWPCGPGSAGWQQEFAAMDSSETLDASWEAACSDGARRVRAAGSLPSAELSSNSCSPGCGPEVPPTPPGSHSAFTSSFSFIRLSLGSAGERGEAEGCPPSREAESHCQSPQEMGAKAASLDGPHEDPRCLSRPFSLLATRVSADLAQAARNSSRPERDMHSLPDMDPGSSSSLDPSLAGCGGDGSSGSGDAHSWDTLLRKWEPVLRDCLLRNRRQMEVISLRLKLQKLQEDAVENDDYDKAETLQQRLEDLEQEKISLHFQLPSRQPALSSFLGHLAAQVQAALRRGATQQASGDDTHTPLRMEPRLLEPTAQDSLHVSITRRDWLLQEKQQLQKEIEALQARMFVLEAKDQQLRREIEEQEQQLQWQGCDLTPLVGQLSLGQLQEVSKALQDTLASAGQIPFHAEPPETIRSLQERIKSLNLSLKEITTKVCMSEKFCSTLRKKVNDIETQLPALLEAKMHAISGNHFWTAKDLTEEIRSLTSEREGLEGLLSKLLVLSSRNVKKLGSVKEDYNRLRREVEHQETAYAASVHCLGKCGKLTWKLVDCLSRAYSSRKPGEACL

SEQ ID NO: 12990 - protein, 662 aa, Homo sapiens
MPGGGPQGAPAAAGGGGVSHRAGSRDCLPPAACFRRRRLARRPGYMRSSTGPGIGFLSPAVGTLFRFPGGVSGEESHHSESRARQCGLDSRGLLVRSPVSKSAAAPTVTSVRGTSAHFGIQLRGGTRLPDRLSWPCGPGSAGWQQEFAAMDSSETLDASWEAACSDGARRVRAAGSLPSAELSSNSCSPGCGPEVPPTPPGSHSAFTSSFSFIRLSLGSAGERGEAEGCPPSREAESHCQSPQEMGAKAASLDGPHEDPRCLSRPFSLLATRVSADLAQAARNSSRPERDMHSLPDMDPGSSSSLDPSLAGCGGDGSSGSGDAHSWDTLLRKWEPVLRDCLLRNRRQMEVISLRLKLQKLQEDAVENDDYDKAETLQQRLEDLEQEKISLHFQLPSRQPALSSFLGHLAAQVQAALRRGATQQASGDDTHTPLRMEPRLLEPTAQDSLHVSITRRDWLLQEKQQLQKEIEALQARMFVLEAKDQQLRREIEEQEQQLQWQGCDLTPLVGQLSLGQLQEVSKALQDTLASAGQIPFHAEPPETIRSLQERIKSLNLSLKEITTKVCMSEKFCSTLRKKVNDIETQLPALLEAKMHAISGNHFWTAKDLTEEIRSLTSEREGLEGLLSKLLVLSSRNVKKLGSVKEDYNRLRREVEHQETAYGR

SEQ ID NO: 12991 - protein, 356 aa, Homo sapiens
MPGGGPQGAPAAAGGGGVSHRAGSRDCLPPAACFRRRRLARRPGYMRSSTGPGIGFLSPAVGTLFRFPGGVSGEESHHSESRARQCGLDSRGLLVRSPVSKSAAAPTVTSVRGTSAHFGIQLRGGTRLPDRLSWPCGPGSAGWQQEFAAMDSSETLDASWEAACSDGARRVRAAGSLPSAELSSNSCSPGCGPEVPPTPPGSHSAFTSSFSFIRLSLGSAGERGEAEGCPPSREAESHCQSPQEMGAKAASLDGPHEDPRCLSRPFSLLATRVSADLAQAARNSSRPERDMHSLPDMDPGSSSSLDPSLAGCGGDGSSGSGDAHSWDTLLRKWEPVLRDCLLRNRRQMELRRYNKD

SEQ ID NO: 12992 - protein, 201 aa, Homo sapiens
MPGGGPQGAPAAAGGGGVSHRAAETLQQRLEDLEQEKISLHFQLPSRQPALSSFLGHLAAQVQAALRRGATQQASGDDTHTPLRMEPRLLEPTAQDSLHVSITRRDWLLQEKQQLQKEIEALQARMFVLEAKDQQLRREIEEQEQQLQWQGCDLTPLVGQLSLGQLQEVSKALQDTLASAGQIPFHAEPPETIRRKPFLDG

SEQ ID NO: 12993 - protein, 558 aa, Homo sapiens
MYRYLGEALLLSRAGPAALGSASADSAALLGWARGQPAAAPQPGLALAARRHYSEAVADREDDPNFFKMVEGFFDRGASIVEDKLVEDLRTRESEEQKRNRVRGILRIIKPCNHVLSLSFPIRRDDGSWEVIEGYRAQHSQHRTPCKGGIRYSTDVSVDEVKALASLMTYKCAVVDVPFGGAKAGVKINPKNYTDNELEKITRRFTMELAKKGFIGPGIDVPAPDMSTGEREMSWIADTYASTIGHYDINAHACVTGKPISQGGIHGRISATGRGVFHGIENFINEASYMSILGMTPGFGDKTFVVQGFGNVGLHSMRYLHRFGAKCIAVGESDGSIWNPDGIDPKELEDFKLQHGSILGFPKAKPYEGSILEADCDILIPAASEKQLTKSNAPRVKAKIIAEGANGPTTPEADKIFLERNIMVIPDLYLNAGGVTVSYFEWLKNLNHVSYGRLTFKYERDSNYHLLMSVQESLERKFGKHGGTIPIVPTAEFQDRISGASEKDIVHSGLAYTMERSARQIMRTAMKYNLGLDLRTAAYVNAIEKVFKVYNEAGVTFT

SEQ ID NO: 12994 - protein, 391 aa, Homo sapiens
MTYKCAVVDVPFGGAKAGVKINPKNYTDNELEKITRRFTMELAKKGFIGPGIDVPAPDMSTGEREMSWIADTYASTIGHYDINAHACVTGKPISQGGIHGRISATGRGVFHGIENFINEASYMSILGMTPGFGDKTFVVQGFGNVGLHSMRYLHRFGAKCIAVGESDGSIWNPDGIDPKELEDFKLQHGSILGFPKAKPYEGSILEADCDILIPAASEKQLTKSNAPRVKAKIIAEGANGPTTPEADKIFLERNIMVIPDLYLNAGGVTVSYFEWLKNLNHVSYGRLTFKYERDSNYHLLMSVQESLERKFGKHGGTIPIVPTAEFQDRISGASEKDIVHSGLAYTMERSARQIMRTAMKYNLGLDLRTAAYVNAIEKVFKVYNEAGVTFT

SEQ ID NO: 12995 - protein, 425 aa, Homo sapiens
MTCPCDNASSVFLGFCIRYSTDVSVDEVKALASLMTYKCAVVDVPFGGAKAGVKINPKNYTDNELEKITRRFTMELAKKGFIGPGIDVPAPDMSTGEREMSWIADTYASTIGHYDINAHACVTGKPISQGGIHGRISATGRGVFHGIENFINEASYMSILGMTPGFGDKTFVVQGFGNVGLHSMRYLHRFGAKCIAVGESDGSIWNPDGIDPKELEDFKLQHGSILGFPKAKPYEGSILEADCDILIPAASEKQLTKSNAPRVKAKIIAEGANGPTTPEADKIFLERNIMVIPDLYLNAGGVTVSYFEWLKNLNHVSYGRLTFKYERDSNYHLLMSVQESLERKFGKHGGTIPIVPTAEFQDRISGASEKDIVHSGLAYTMERSARQIMRTAMKYNLGLDLRTAAYVNAIEKVFKVYNEAGVTFT

SEQ ID NO: 12996 - protein, 1392 aa, Homo sapiens
MDTEDDPLLQDVWLEEEQEEEEATGETFLGAQKPGPQPGAGGQCCWRHWPLASRPPASGFWSTLGWAFTNPCCAGLVLFLGCSIPMALSAFMFLYYPPLDIDISYNAFEIRNHEASQRFDALTLALKSQFGSWGRNRRDLADFTSETLQRLISEQLQQLHLGNRSRQASRAPRVIPAASLGGPGPYRDTSAAQKPTANRSGRLRRETPPLEDLAANQSEDPRNQRLSKNGRYQPSIPPHAAVAANQSRARRGASRWDYSRAYVSANTQTHAHWRIELIFLARGDAERNIFTSERLVTIHEIERKIMDHPGFREFCWKPHEVLKDLPLGSYSYCSPPSSLMTYFFPTERGGKIYYDGMGQDLADIRGSLELAMTHPEFYWYVDEGLSADNLKSSLLRSEILFGAPLPNYYSVDDRWEEQRAKFQSFVVTYVAMLAKQSTSKVQVLYGGTDLFDYEVRRTFNNDMLLAFISSSCIAALVYILTSCSVFLSFFGIASIGLSCLVALFLYHVVFGIQYLGILNGVAAFVIVGIGVDDVFVFINTYRQATHLEDPQLRMIHTVQTAGKATFFTSLTTAAAYAANVFSQIPAVHDFGLFMSLIVSCCWLAVLVTMPAALGLWSLYLAPLESSCQTSCHQNCSRKTSLHFPGDVFAAPEQVGGSPAQGPIPYLDDDIPLLEVEEEPVSLELGDVSLVSVSPEGLQPASNTGSRGHLIVQLQELLHHWVLWSAVKSRWVIVGLFVSILILSLVFASRLRPASRAPLLFRPDTNIQVLLDLKYNLSAEGISCITCSGLFQEKPHSLQNNIRTSLEKKRRGSGVPWASRPEATLQDFPGTVYISKVKSQGHPAVYRLSLNASLPAPWQAVSPGDGEVPSFQVYRAPFGNFTKKLTACMSTVGLLQAASPSRKWMLTTLACDAKRGWKFDFSFYVATKEQQHTRKLYFAQSHKPPFHGRVCMAPPGCLLSSSPDGPTKGFFFVPSEKVPKARLSATFGFNPCVNTGCGKPAVRPLVDTGAMVFVVFGIIGVNRTRQVDNHVIGDPGSVVYDSSFDLFKEIGHLCHLCKAIAANSELVKPGGAQCLPSGYSISSFLQMLHPECKELPEPNLLPGQLSHGAVGVREGRVQWISMAFESTTYKGKSSFQTYSDYLRWESFLQQQLQALPEGSVLRRGFQTCEHWKQIFMEIVGVQSALCGLVLSLLICVAAVAVFTTHILLLLPVLLSILGIVCLVVTIMYWSGWEMGAVEAISLSILVGSSVDYCVHLVEGYLLAGENLPPHQAEDARTQRQWRTLEAVRHVGVAIVSSALTTVIATVPLFFCIIAPFAKFGKIVALNTGVSILYTLTVSTALLGIMAPSSFTRTRTSFLKALGAVLLAGALGLGACLVLLQSGYKIPLPAGASL

SEQ ID NO: 12997 - protein, 933 aa, Homo sapiens
MDTEDDPLLQDVWLEEEQEEEEATGETFLGAQKPGPQPGAGGQCCWRHWPLASRPPASGFWSTLGWAFTNPCCAGLVLFLGCSIPMALSAFMFLYYPPLDIDISYNAFEIRNHEASQRFDALTLALKSQFGSWGRNRRDLADFTSETLQRLISEQLQQLHLGNRSRQASRAPRVIPAASLGGPGPYRDTSAAQKPTANRSGRLRRETPPLEDLAANQSEDPRNQRLSKNGRYQPSIPPHAAVAANQSRARRGASRWDYSRAYVSANTQTHAHWRIELIFLARGDAERNIFTSERLVTIHEIERKIMDHPGFREFCWKPHEVLKDLPLGSYSYCSPPSSLMTYFFPTERGGKIYYDGMGQDLADIRGSLELAMTHPEFYWYVDEGLSADNLKSSLLRSEILFGAPLPNYYSVDDRWEEQRAKFQSFVVTYVAMLAKQSTSKVQVLYGGTDLFDYEVRRTFNNDMLLAFISSSCIAALVYILTSCSVFLSFFGIASIGLSCLVALFLYHVVFGIQYLGILNGVAAFVIVGIGVDDVFVFINTYRQATHLEDPQLRMIHTVQTAGKATFFTSLTTAAAYAANVFSQIPAVHDFGLFMSLIVSCCWLAVLVTMPAALGLWSLYLAPLESSCQTSCHQNCSRKTSLHFPGDVFAAPEQVGGSPAQGPIPYLDDDIPLLEVEEEPVSLELGDVSLVSVSPEGLQPASNTGSRGHLIVQLQELLHHWVLWSAVKSRWVIVGLFVSILILSLVFASRLRPASRAPLLFRPDTNIQVLLDLKYNLSAEGISCITCSGLFQEKPHSLQNNIRTSLEKKRRGSGVPWASRPEATLQDFPGTVYISKVKSQGHPAVYRLSLNASLPAPWQAVSPGDGEVPSFQVYRAPFGNFTKKLTACMSTVGLLQAASPSRKWMLTTLACDAKRGWKFDFSFYVATKEQQHTR

SEQ ID NO: 12998 - protein, 847 aa, Homo sapiens
MFKCWSVVLVLGFIFLESEGRPTKEGGYGLKSYQPLMRLRHKQEKNQESSRVKGFMIQDGPFGSCENKYCGLGRHCVTSRETGQAECACMDLCKRHYKPVCGSDGEFYENHCEVHRAACLKKQKITIVHNEDCFFKGDKCKTTEYSKMKNMLLDLQNQKYIMQENENPNGDDISRKKLLVDQMFKYFDADSNGLVDINELTQVIKQEELGKDLFDCTLYVLLKYDDFNADKHLALEEFYRAFQVIQLSLPEDQKLSITAATVGQSAVLSCAIQGTLRPPIIWKRNNIILNNLDLEDINDFGDDGSLYITKVTTTHVGNYTCYADGYEQVYQTHIFQVNVPPVIRVYPESQAREPGVTASLRCHAEGIPKPQLGWLKNGIDITPKLSKQLTLQANGSEVHISNVRYEDTGAYTCIAKNEAGVDEDISSLFVEDSARKTLANILWREEGLGIGNMFYVFYEDGIKVIQPIECEFQRHIKPSEKLLGFQDEVCPKAEGDEVQRCVWASAVNVKDKFIYVAQPTLDRVLIVDVQSQKVVQAVSTDPVPVKLHYDKSHDQVWVLSWGTLEKTSPTLQVITLASGNVPHHTIHTQPVGKQFDRVDDFFIPTTTLIITHMRFGFILHKDEAALQKIDLETMSYIKTINLKDYKCVPQSLAYTHLGGYYFIGCKPDSTGAVSPQVMVDGVTDSVIGFNSDVTGTPYVSPDGHYLVSINDVKGLVRVQYITIRGEIQEAFDIYTNLHISDLAFQPSFTEAHQYNIYGSSSTQTDVLFVELSSGKVKMIKSLKEPLKAEEWPWNRKNRQIQDSGLFGQYLMTPSKDSLFILDGRLNKLNCEITEVEKGNTVIWVGDA

SEQ ID NO: 12999 - protein, 846 aa, Homo sapiens
MFKCWSVVLVLGFIFLESEGRPTKEGGYGLKSYQPLMRLRHKEKNQESSRVKGFMIQDGPFGSCENKYCGLGRHCVTSRETGQAECACMDLCKRHYKPVCGSDGEFYENHCEVHRAACLKKQKITIVHNEDCFFKGDKCKTTEYSKMKNMLLDLQNQKYIMQENENPNGDDISRKKLLVDQMFKYFDADSNGLVDINELTQVIKQEELGKDLFDCTLYVLLKYDDFNADKHLALEEFYRAFQVIQLSLPEDQKLSITAATVGQSAVLSCAIQGTLRPPIIWKRNNIILNNLDLEDINDFGDDGSLYITKVTTTHVGNYTCYADGYEQVYQTHIFQVNVPPVIRVYPESQAREPGVTASLRCHAEGIPKPQLGWLKNGIDITPKLSKQLTLQANGSEVHISNVRYEDTGAYTCIAKNEAGVDEDISSLFVEDSARKTLANILWREEGLGIGNMFYVFYEDGIKVIQPIECEFQRHIKPSEKLLGFQDEVCPKAEGDEVQRCVWASAVNVKDKFIYVAQPTLDRVLIVDVQSQKVVQAVSTDPVPVKLHYDKSHDQVWVLSWGTLEKTSPTLQVITLASGNVPHHTIHTQPVGKQFDRVDDFFIPTTTLIITHMRFGFILHKDEAALQKIDLETMSYIKTINLKDYKCVPQSLAYTHLGGYYFIGCKPDSTGAVSPQVMVDGVTDSVIGFNSDVTGTPYVSPDGHYLVSINDVKGLVRVQYITIRGEIQEAFDIYTNLHISDLAFQPSFTEAHQYNIYGSSSTQTDVLFVELSSGKVKMIKSLKEPLKAEEWPWNRKNRQIQDSGLFGQYLMTPSKDSLFILDGRLNKLNCEITEVEKGNTVIWVGDA

SEQ ID NO: 13000 - protein, 837 aa, Homo sapiens
MFKCWSVVLVLGFIFLESEGRPTKEGGYGLKSYQPLMRLRHKEKNQESSRVKGFMIQDGPFGSCENKYCGLGRHCVTSRETGQAECACMDLCKRHYKPVCGSDGEFYENHCEVHRAACLKKQKITIVHNEDCFFKGDKCKTTEYSKMKNMLLDLQNQKYIMQENENPNGDDISRKKLLVDQMFKYFDADSNGLVDINELTQVIKQEELGKDLFDCTLYVLLKYDDFNADKHLALEEFYRAFQVIQLSLPEDQKLSITAATVGQSAVLSCAIQGTLRPPIIWKRNNIILNNLDLEDINDFGDDGSLYITKVTTTHVGNYTCYADGYEQVYQTHIFQVNVPPVIRVYPESQAREPGVTASLRCHAEGIPKPQLGWLKNGIDITPKLSKQLTLQANGSEVHISNVRYEDTGAYTCIAKNEAGVDEDISSLFVEDSARKTRLGIGNMFYVFYEDGIKVIQPIECEFQRHIKPSEKLLGFQDEVCPKAEGDEVQRCVWASAVNVKDKFIYVAQPTLDRVLIVDVQSQKVVQAVSTDPVPVKLHYDKSHDQVWVLSWGTLEKTSPTLQVITLASGNVPHHTIHTQPVGKQFDRVDDFFIPTTTLIITHMRFGFILHKDEAALQKIDLETMSYIKTINLKDYKCVPQSLAYTHLGGYYFIGCKPDSTGAVSPQVMVDGVTDSVIGFNSDVTGTPYVSPDGHYLVSINDVKGLVRVQYITIRGEIQEAFDIYTNLHISDLAFQPSFTEAHQYNIYGSSSTQTDVLFVELSSGKVKMIKSLKEPLKAEEWPWNRKNRQIQDSGLFGQYLMTPSKDSLFILDGRLNKLNCEITEVEKGNTVIWVGDA

SEQ ID NO: 13001 - protein, 252 aa, Homo sapiens
MTPLCPRPALCYHFLTSLLRSAMQNARGARQRAEAAVLSGPGPPLGRAAQHGIPRPLSSAGRLSQGCRGASTVGAAGWKGELPKAGGSPAPGPETPAISPSKRARPAEVGGMQLRFARLSEHATAPTRGSARAAGYDLYSAYDYTIPPMEKAVVKTDIQIALPSGCYGRVAPRSGLAAKHFIDVGAGVIDEDYRGNVGVVLFNFGKEKFEVKKGDRIAQLICERIFYPEIEEVQALDDTERGSGGFGSTGKN

SEQ ID NO: 13002 - protein, 164 aa, Homo sapiens
MPCSEETPAISPSKRARPAEVGGMQLRFARLSEHATAPTRGSARAAGYDLYSAYDYTIPPMEKAVVKTDIQIALPSGCYGRVAPRSGLAAKHFIDVGAGVIDEDYRGNVGVVLFNFGKEKFEVKKGDRIAQLICERIFYPEIEEVQALDDTERGSGGFGSTGKN

SEQ ID NO: 13003 - protein, 428 aa, Homo sapiens
MAENDVDNELLDYEDDEVETAAGGDGAEAPAKKDVKGSYVSIHSSGFRDFLLKPELLRAIVDCGFEHPSEVQHECIPQAILGMDVLCQAKSGMGKTAVFVLATLQQLEPVTGQVSVLVMCHTRELAFQISKEYERFSKYMPNVKVAVFFGGLSIKKDEEVLKKNCPHIVVGTPGRILALARNKSLNLKHIKHFILDECDKMLEQLDMRRDVQEIFRMTPHEKQVMMFSATLSKEIRPVCRKFMQDPMEIFVDDETKLTLHGLQQYYVKLKDNEKNRKLFDLLDVLEFNQVVIFVKSVQRCIALAQLLVEQNFPAIAIHRGMPQEERLSRYQQFKDFQRRILVATNLFGRGMDIERVNIAFNYDMPEDSDTYLHRVARAGRFGTKGLAITFVSDENDAKILNDVQDRFEVNISELPDEIDISSYIEQTR

SEQ ID NO: 13004 - protein, 443 aa, Homo sapiens
MAENDVDNELLDYEDDEVETAAGGDGAEAPAKKDVKGSYVSIHSSGFRDFLLKPELLRAIVDCGFEHPSEVQHECIPQAILGMDVLCQAKSGMGKTAVFVLATLQQLEPVTGQVYLGRVLGRGFWLGLVSVLVMCHTRELAFQISKEYERFSKYMPNVKVAVFFGGLSIKKDEEVLKKNCPHIVVGTPGRILALARNKSLNLKHIKHFILDECDKMLEQLDMRRDVQEIFRMTPHEKQVMMFSATLSKEIRPVCRKFMQDPMEIFVDDETKLTLHGLQQYYVKLKDNEKNRKLFDLLDVLEFNQVVIFVKSVQRCIALAQLLVEQNFPAIAIHRGMPQEERLSRYQQFKDFQRRILVATNLFGRGMDIERVNIAFNYDMPEDSDTYLHRVARAGRFGTKGLAITFVSDENDAKILNDVQDRFEVNISELPDEIDISSYIEQTR

SEQ ID NO: 13005 - protein, 206 aa, Homo sapiens
MGAEWELGAEAGGSLLLCAALLAAGCALGLRLGRGQGAADRGALIWLCYDALVHFALEGPFVYLSLVGNVANSDGLIASLWKEYGKADARWVYFDPTIVSVEILTVALDGSLALFLIYAIVKEKYYRHFLQITLCVCELYGCWMTFLPEWLTRSPNLNTSNWLYCWLYLFFFNGVWVLIPGLLLWQSWLELKKMHQKETSSVKKFQ

SEQ ID NO: 13006 - protein, 152 aa, Homo sapiens
MGAEWELGAEAGGSLLLCAALLAAGCALGLRLGRGQGAADRGALIWLCYDALVHFALEGPFVYLSLVGNVANSDGLIASLCESRSVPQAGAQWHHLGSLQAPPPRFTPFSCLSLPSSWDYRRPPPRLANFFVFLVETGFHHVSQDGLDLLTS

SEQ ID NO: 13007 - protein, 102 aa, Homo sapiens
MGAEWELGAEAGGSLLLCAALLAAGCALGLRLGRGQGAADRGALIWLCYDALVHFALAFPADHPVRVRAVWLLDDLPPRVAHQKPQPQHQQLAVLLALPVFF

SEQ ID NO: 13008 - protein, 97 aa, Homo sapiens
MGAEWELGAEAGGSLLLCAALLAAGCALGLRLGRGQGAADRGALIWLCYDALVHFALEGPFVYLSLVGNVANSDGLIASLCISCRSPCACASCMAAG

SEQ ID NO: 13009 - protein, 128 aa, Homo sapiens
MGAEWELGAEAGGSLLLCAALLAAGCALGLRLGRGQGAADRGALIWLCYDALVHFALEGPFVYLSLVGNVANSDGLIASLSDARWVYFDPTIVSVEILTVALDGSLALFLIYAIVKEKYYRDRVAWGE

SEQ ID NO: 13010 - protein, 1551 aa, Homo sapiens
MGFCLALAWTLLVGAWTPLGAQNPISWEVQRFDGWYNNLMEHRWGSKGSRLQRLVPASYADGVYQPLGEPHLPNPRDLSNTISRGPAGLASLRNRTVLGVFFGYHVLSDLVSVETPGCPAEFLNIRIPPGDPMFDPDQRGDVVLPFQRSRWDPETGRSPSNPRDPANQVTGWLDGSAIYGSSHSWSDALRSFSRGQLASGPDPAFPRDSQNPLLMWAAPDPATGQNGPRGLYAFGAERGNREPFLQALGLLWFRYHNLWAQRLARQHPDWEDEELFQHARKRVIATYQNIAVYEWLPSFLQKTLPEYTGYRPFLDPSISSEFVAASEQFLSTMVPPGVYMRNASCHFQGVINRNSSVSRALRVCNSYWSREHPSLQSAEDVDALLLGMASQIAEREDHVLVEDVRDFWPGPLKFSRTDHLASCLQRGRDLGLPSYTKARAALGLSPITRWQDINPALSRSNDTVLEATAALYNQDLSWLELLPGGLLESHRDPGPLFSTIVLEQFVRLRDGDRYWFENTRNGLFSKKEIEEIRNTTLQDVLVAVINIDPSALQPNVFVWHKGDPCPQPRQLSTEGLPACAPSVVRDYFEGSGFGFGVTIGTLCCFPLVSLLSAWIVARLRMRNFKRLQGQDRQSIVSEKLVGGMEALEWQGHKEPCRPVLVYLQPGQIRVVDGRLTVLRTIQLQPPQKVNFVLSSNRGRRTLLLKIPKEYDLVLLFNLEEERQALVENLRGALKESGLSIQEWELREQELMRAAVTREQRRHLLETFFRHLFSQVLDINQADAGTLPLDSSQKVREALTCELSRAEFAESLGLKPQDMFVESMFSLADKDGNGYLSFREFLDILVVFMKGSPEEKSRLMFRMYDFDGNGLISKDEFIRMLRSFIEISNNCLSKAQLAEVVESMFRESGFQDKEELTWEDFHFMLRDHNSELRFTQLCVKGVEVPEVIKDLCRRASYISQDMICPSPRVSARCSRSDIETELTPQRLQCPMDTDPPQEIRRRFGKKVTSFQPLLFTEAHREKFQRSCLHQTVQQFKRFIENYRRHIGCVAVFYAIAGGLFLERAYYYAFAAHHTGITDTTRVGIILSRGTAASISFMFSYILLTMCRNLITFLRETFLNRYVPFDAAVDFHRLIASTAIVLTVLHSVGHVVNVYLFSISPLSVLSCLFPGLFHDDGSELPQKYYWWFFQTVPGLTGVVLLLILAIMYVFASHHFRRRSFRGFWLTHHLYILLYVLLIIHGSFALIQLPRFHIFFLVPAIIYGGDKLVSLSRKKVEISVVKAELLPSGVTHLRFQRPQGFEYKSGQWVRIACLALGTTEYHPFTLTSAPHEDTLSLHIRAAGPWTTRLREIYSAPTGDRCARYPKLYLDGPFGEGHQEWHKFEVSVLVGGGIGVTPFASILKDLVFKSSVSCQVFCKKIYFIWVTRTQRQFEWLADIIREVEENDHQDLVSVHIYITQLAEKFDLRTTMLYICERHFQKVLNRSLFTGLRSITHFGRPPFEPFFNSLQEVHPQVRKIGVFSCGPPGMTKNVEKACQLINRQDRTHFSHHYENF

SEQ ID NO: 13011 - protein, 1197 aa, Homo sapiens
MWMHCCWAWPPRSQSERTMCWLKMCGVSLRLSLQVVNSWPLGRGSAGLPEPDFWPGPLKFSRTDHLASCLQRGRDLGLPSYTKARAALGLSPITRWQDINPALSRSNDTVLEATAALYNQDLSWLELLPGGLLESHRDPGPLFSTIVLEQFVRLRDGDRYWFENTRNGLFSKKEIEEIRNTTLQDVLVAVINIDPSALQPNVFVWHKGDPCPQPRQLSTEGLPACAPSVVRDYFEGSGFGFGVTIGTLCCFPLVSLLSAWIVARLRMRNFKRLQGQDRQSIVSEKLVGGMEALEWQGHKEPCRPVLVYLQPGQIRVVDGRLTVLRTIQLQPPQKVNFVLSSNRGRRTLLLKIPKEYDLVLLFNLEEERQALVENLRGALKESGLSIQEWELREQELMRAAVTREQRRHLLETFFRHLFSQVLDINQADAGTLPLDSSQKVREALTCELSRAEFAESLGLKPQDMFVESMFSLADKDGNGYLSFREFLDILVVFMKGSPEEKSRLMFRMYDFDGNGLISKDEFIRMLRSFIEISNNCLSKAQLAEVVESMFRESGFQDKEELTWEDFHFMLRDHNSELRFTQLCVKGVEVPEVIKDLCRRASYISQDMICPSPRVSARCSRSDIETELTPQRLQCPMDTDPPQEIRRRFGKKVTSFQPLLFTEAHREKFQRSCLHQTVQQFKRFIENYRRHIGCVAVFYAIAGGLFLERAYYYAFAAHHTGITDTTRVGIILSRGTAASISFMFSYILLTMCRNLITFLRETFLNRYVPFDAAVDFHRLIASTAIVLTVLHSVGHVVNVYLFSISPLSVLSCLFPGLFHDDGSELPQKYYWWFFQTVPGLTGVVLLLILAIMYVFASHHFRRRSFRGFWLTHHLYILLYVLLIIHGSFALIQLPRFHIFFLVPAIIYGGDKLVSLSRKKVEISVVKAELLPSGVTHLRFQRPQGFEYKSGQWVRIACLALGTTEYHPFTLTSAPHEDTLSLHIRAAGPWTTRLREIYSAPTGDRCARYPKLYLDGPFGEGHQEWHKFEVSVLVGGGIGVTPFASILKDLVFKSSVSCQVFCKKIYFIWVTRTQRQFEWLADIIREVEENDHQDLVSVHIYITQLAEKFDLRTTMLYICERHFQKVLNRSLFTGLRSITHFGRPPFEPFFNSLQEVHPQVRKIGVFSCGPPGMTKNVEKACQLINRQDRTHFSHHYENF

SEQ ID NO: 13012 - protein, 260 aa, Homo sapiens
MASLEVSRSPRRSRRELEVRSPRQNKYSVLLPTYNERENLPLIVWLLVKSFSESGINYEIIIIDDGSPDGTRDVAEQLEKIYGSDRILLRPREKKLGLGTAYIHGMKHATGNYIIIMDADLSHHPKFIPEFIRKQKEGNFDIVSGTRYKGNGGVYGWDLKRKIISRGANFLTQILLRPGASDLTGSFRLYRKEVLEKLIEKCVSKGYVFQMEMIVRARQLNYTIGEVPISFVDRVYGESKLGGNEIVSFLKGLLTLFATT

SEQ ID NO: 13013 - protein, 1212 aa, Homo sapiens
MALMFTGHLLFLALLMFAFSTFEESVSNYSEWAVFTDDIDQFKTQKVQDFRPNQKLKKSMLHPSLYFDAGEIQAMRQKSRASHLHLFRAIRSAVTVMLSNPTYYLPPPKHADFAAKWNEIYGNNLPPLALYCLLCPEDKVAFEFVLEYMDRMVGYKDWLVENAPGDEVPIGHSLTGFATAFDFLYNLLDNHRRQKYLEKIWVITEEMYEYSKVRSWGKQLLHNHQATNMIALLTGALVTGVDKGSKANIWKQAVVDVMEKTMFLLNHIVDGSLDEGVAYGSYTAKSVTQYVFLAQRHFNINNLDNNWLKMHFWFYYATLLPGFQRTVGIADSNYNWFYGPESQLVFLDKFILKNGAGNWLAQQIRKHRPKDGPMVPSTAQRWSTLHTEYIWYDPQLTPQPPADYGTAKIHTFPNWGVVTYGAGLPNTQTNTFVSFKSGKLGGRAVYDIVHFQPYSWIDGWRSFNPGHEHPDQNSFTFAPNGQVFVSEALYGPKLSHLNNVLVFAPSPSSQCNKPWEGQLGECAQWLKWTGEEVGDAAGEIITASQHGEMVFVSGEAVSAYSSAMRLKSVYRALLLLNSQTLLVVDHIERQEDSPINSVSAFFHNLDIDFKYIPYKFMNRYNGAMMDVWDAHYKMFWFDHHGNSPMASIQEAEQAAEFKKRWTQFVNVTFQMEPTITRIAYVFYGPYINVSSCRFIDSSNPGLQISLNVNNTEHVVSIVTDYHNLKTRFNYLGFGGFASVADQGQITRFGLGTQAIVKPVRHDRIIFPFGFKFNIAVGLILCISLVILTFQWRFYLSFRKLMRWILILVIALWFIELLDVWSTCSQPICAKWTRTEAEGSKKSLSSEGHHMDLPDVVITSLPGSGAEILKQLFFNSSDFLYIRVPTAYIDIPETELEIDSFVDACEWKVSDIRSGHFRLLRGWLQSLVQDTKLHLQNIHLHEPNRGKLAQYFAMNKDKKRKFKRRESLPEQRSQMKGAFDRDAEYIRALRRHLVYYPSARPVLSLSSGSWTLKLHFFQEVLGASMRALYIVRDPRAWIYSMLYNSKPSLYSLKNVPEHLAKLFKIEGGKGKCNLNSGYAFEYEPLRKELSKSKSNAVSLLSHLWLANTAAALRINTDLLPTSYQLVKFEDIVHFPQKTTERIFAFLGIPLSPASLNQILFATSTNLFYLPYEGEISPTNTNVWKQNLPRDEIKLIENICWTLMDRLGYPKFMD

SEQ ID NO: 13014 - protein, 191 aa, Homo sapiens
MAMHNKAAPPQIPDTRRELAELVKRKQELAETLANLERQIYAFEGSYLEDTQMYGNIIRGWDRYLTNQKNSNSKNDRRNRKFKEAERLFSKSSVTSAAAVSALAGVQDQLIEKREPGSGTESDTSPDFHNQENEPSQEDPEDLDGSVQGVKPQKAASSTSSGSHHSSHKKRKNKNRHRIDLKLNKKPRADY

SEQ ID NO: 13015 - protein, 191 aa, Homo sapiens
MAMHNKAAPPQIPDTRRELAELVKRKQELAETLANLERQIYAFEGSYLEDTQMYGNIIRGWDRYLTNQKNSNSKNDRRNRKFKEAERLFSKSSVTSAAAVSALAGVQDQLIEKREPGSGTESDTSPDFHNQENEPSQEDPEDLDGSVQGVKPQKAASSTSSGSHHSSHKKRKNKNRHSPSGMFDYDFEYVY

SEQ ID NO: 13016 - protein, 201 aa, Homo sapiens
MAMHNKAAPPQIPDTRRELAELVKRKQELAETLANLERQIYAFEGSYLEDTQMYGNIIRGWDRYLTNQKNSNSKNDRRNRKFKEAERLFSKSSVTSAAAVSALAGVQDQLIEKREPGSGTESDTSPDFHNQENEPSQEDPEDLDGSVQGVKPQKAASSTSSGSHHSSHKKRKNKNRHSPSGMFDYDFEIDLKLNKKPRADY

SEQ ID NO: 13017 - protein, 192 aa, Homo sapiens
MAMHNKAAPPQIPDTRRELAELVKRKQELAETLANLERQIYAFEGSYLEDTQMYGNIIRGWDRYLTNQKNSNSKNDRRNRKFKEAERLFSKSSVTSAAAVSALAGVQDQLIEKREPGSGTESDTSPDFHNQENEPSQEDPEDLDGSVQGVKPQKAASSTSSGSHHSSHKKRKNKNRHRMNVSPKTGWHQLHL

SEQ ID NO: 13018 - protein, 117 aa, Homo sapiens
MAAAAAAGSGTPREEEGPAGEAAASQPQAPTSVPGARLSRLPLARVKALVKADPDVTLAGQEAIFILARAAELFVETIAKDAYCCAQQGKRKTLQRRDLDNAIEAVDEFAFLEGTLD

SEQ ID NO: 13019 - protein, 394 aa, Homo sapiens
MIVFIFLAMGLSLENEYTSQTNNCTYLREQCLRDANGCKHAWRVMEDACNDSDPGDPCKMRNSSYCNLSIQYLVESNFQFKECLCTDDFYCTVNKLLGKKCINKSDNVKEDKFKWNLTTRSHHGFKGMWSCLEVAEACVGDVVCNAQLASYLKACSANGNPCDLKQCQAAIRFFYQNIPFNIAQMLAFCDCAQSDIPCQQSKEALHSKTCAVNMVPPPTCLSVIRSCQNDELCRRHYRTFQSKCWQRVTRKCHEDENCISTLSKQDLTCSGSDDCKAAYIDILGTVLQVQCTCRTITQSEESLCKIFQHMLHRKSCFNYPTLSNVKGMALYTRKHANKITLTGFHSPFNGEVIYAAMCMTVTCGILLLVMVKLRTSRISSKARDPSSIQIPGEL

SEQ ID NO: 13020 - protein, 187 aa, Homo sapiens
MVGSLNCIVAVSQNMGIGKNGDLPWPPLRNEFRYFQRMTTTSSVEGKQNLVIMGKKTWFSIPEKNRPLKGRINLVLSRELKEPPQGAHFLSRSLDDALKLTEQPELANKVDMVWIVGGSSVYKEAMNHPGHLKLFVTRIMQDFESDTFFPEIDLEKYKLLPEYPGVLSDVQEEKGIKYKFEVYEKND

SEQ ID NO: 13021 - protein, 135 aa, Homo sapiens
MGKKTWFSIPEKNRPLKGRINLVLSRELKEPPQGAHFLSRSLDDALKLTEQPELANKVDMVWIVGGSSVYKEAMNHPGHLKLFVTRIMQDFESDTFFPEIDLEKYKLLPEYPGVLSDVQEEKGIKYKFEVYEKND

SEQ ID NO: 13022 - protein, 201 aa, Homo sapiens
MTEKAPEPHVEEDDDDELDSKLNYKPPPQKSLKELQEMDKDDESLIKYKKTLLGDGPVVTDPKAPNVVVTRLTLVCESAPGPITMDLTGDLEALKKETIVLKEGSEYRVKIHFKVNRDIVSGLKYVQHTYRTGVKVDKATFMVGSYGPRPEEYEFLTPVEEAPKGMLARGTYHNKSFFTDDDKQDHLSWEWNLSIKKEWTE

SEQ ID NO: 13023 - protein, 315 aa, Homo sapiens
MPLKLRGKKKAKSKETAGLVEGEPTGAGGGSLSASRAPARRLVFHAQLAHGSATGRVEGFSSIQELYAQIAGAFEISPSEILYCTLNTPKIDMERLLGGQLGLEDFIFAHVKGIEKEVNVYKSEDSLGLTITDNGVGYAFIKRIKDGGVIDSVKTICVGDHIESINGENIVGWRHYDVAKKLKELKKEELFTMKLIEPKKAFEIELRSKAGKSSGEKIGCGRATLRLRSKGPATVEEMPSETKAKAIEKIDDVLELYMGIRDIDLATTMFEAGKDKVNPDEFAVALDETLGDFAFPDEFVFDVWGVIGDAKRRGL

SEQ ID NO: 13024 - protein, 572 aa, Homo sapiens
MSYQGKKSIPHITSDRLLIKGGRIINDDQSLYADVYLEDGLIKQIGENLIVPGGVKTIEANGRMVIPGGIDVNTYLQKPSQGMTAADDFFQGTRAALVGGTTMIIDHVVPEPGSSLLTSFEKWHEAADTKSCCDYSLHVDITSWYDGVREELEVLVQDKGVNSFQVYMAYKDVYQMSDSQLYEAFTFLKGLGAVILVHAENGDLIAQEQKRILEMGITGPEGHALSRPEELEAEAVFRAITIAGRINCPVYITKVMSKSAADIIALARKKGPLVFGEPIAASLGTDGTHYWSKNWAKAAAFVTSPPLSPDPTTPDYLTSLLACGDLQVTGSGHCPYSTAQKAVGKDNFTLIPEGVNGIEERMTVVWDKAVATGKMDENQFVAVTSTNAAKIFNLYPRKGRIAVGSDADVVIWDPDKLKTITAKSHKSAVEYNIFEGMECHGSPLVVISQGKIVFEDGNINVNKGMGRFIPRKAFPEHLYQRVKIRNKVFGLQGVSRGMYDGPVYEVPATPKYATPAPSAKSSPSKHQPPPIRNLHQSNFSLSGAQIDDNNPRRTGHRIVAPPGGRSNITSLG

SEQ ID NO: 13025 - protein, 686 aa, Homo sapiens
MADRRRAWNTEDDLPVYLARPGSAAQTPRQKYGGMFAAVEGAYENKTIDFDAYSVGRRGSARTPRSAGRPDAVGLPGPGGSEDTASDVSEPSGSAVSSPGERDERPPTLRIRRPAPRDLPLGRDNGQSDRLLIKGGRIINDDQSLYADVYLEDGLIKQIGENLIVPGGVKTIEANGRMVIPGGIDVNTYLQKPSQGMTAADDFFQGTRAALVGGTTMIIDHVVPEPGSSLLTSFEKWHEAADTKSCCDYSLHVDITSWYDGVREELEVLVQDKGVNSFQVYMAYKDVYQMSDSQLYEAFTFLKGLGAVILVHAENGDLIAQEQKRILEMGITGPEGHALSRPEELEAEAVFRAITIAGRINCPVYITKVMSKSAADIIALARKKGPLVFGEPIAASLGTDGTHYWSKNWAKAAAFVTSPPLSPDPTTPDYLTSLLACGDLQVTGSGHCPYSTAQKAVGKDNFTLIPEGVNGIEERMTVVWDKAVATGKMDENQFVAVTSTNAAKIFNLYPRKGRIAVGSDADVVIWDPDKLKTITAKSHKSAVEYNIFEGMECHGSPLVVISQGKIVFEDGNINVNKGMGRFIPRKAFPEHLYQRVKIRNKVFGLQGVSRGMYDGPVYEVPATPKYATPAPSAKSSPSKHQPPPIRNLHQSNFSLSGAQIDDNNPRRTGHRIVAPPGGRSNITSLG

SEQ ID NO: 13026 - protein, 570 aa, Homo sapiens
MSYQGKKNIPRITSDRLLIKGGRIVNDDQSFYADIYMEDGLIKQIGDNLIVPGGVKTIEANGKMVIPGGIDVHTHFQMPYKGMTTVDDFFQGTKAALAGGTTMIIDHVVPEPESSLTEAYEKWREWADGKSCCDYALHVDITHWNDSVKQEVQNLIKDKGVNSFMVYMAYKDLYQVSNTELYEIFTCLGELGAIAQVHAENGDIIAQEQTRMLEMGITGPEGHVLSRPEELEAEAVFRAITIASQTNCPLYVTKVMSKSAADLISQARKKGNVVFGEPITASLGIDGTHYWSKNWAKAAAFVTSPPLSPDPTTPDYINSLLASGDLQLSGSAHCTFSTAQKAIGKDNFTAIPEGTNGVEERMSVIWDKAVATGKMDENQFVAVTSTNAAKIFNLYPRKGRISVGSDSDLVIWDPDAVKIVSAKNHQSAAEYNIFEGMELRGAPLVVICQGKIMLEDGNLHVTQGAGRFIPCSPFSDYVYKRIKARRKMADLHAVPRGMYDGPVFDLTTTPKGGTPAGSARGSPTRPNPPVRNLHQSGFSLSGTQVDEGVRSASKRIVAPPGGRSNITSLS

SEQ ID NO: 13027 - protein, 684 aa, Homo sapiens
MASGRRGWDSSHEDDLPVYLARPGTTDQVPRQKYGGMFCNVEGAFESKTLDFDALSVGQRGAKTPRSGQGSDRGSGSRPGIEGDTPRRGQGREESREPAPASPAPAGVEIRSATGKEVLQNLGPKDKSDRLLIKGGRIVNDDQSFYADIYMEDGLIKQIGDNLIVPGGVKTIEANGKMVIPGGIDVHTHFQMPYKGMTTVDDFFQGTKAALAGGTTMIIDHVVPEPESSLTEAYEKWREWADGKSCCDYALHVDITHWNDSVKQEVQNLIKDKGVNSFMVYMAYKDLYQVSNTELYEIFTCLGELGAIAQVHAENGDIIAQEQTRMLEMGITGPEGHVLSRPEELEAEAVFRAITIASQTNCPLYVTKVMSKSAADLISQARKKGNVVFGEPITASLGIDGTHYWSKNWAKAAAFVTSPPLSPDPTTPDYINSLLASGDLQLSGSAHCTFSTAQKAIGKDNFTAIPEGTNGVEERMSVIWDKAVATGKMDENQFVAVTSTNAAKIFNLYPRKGRISVGSDSDLVIWDPDAVKIVSAKNHQSAAEYNIFEGMELRGAPLVVICQGKIMLEDGNLHVTQGAGRFIPCSPFSDYVYKRIKARRKMADLHAVPRGMYDGPVFDLTTTPKGGTPAGSARGSPTRPNPPVRNLHQSGFSLSGTQVDEGVRSASKRIVAPPGGRSNITSLS

SEQ ID NO: 13028 - protein, 7570 aa, Homo sapiens
MAGYLSPAAYLYVEEQEYLQAYEDVLERYKDERDKVQKKTFTKWINQHLMKVRKHVNDLYEDLRDGHNLISLLEVLSGDTLPREKGRMRFHRLQNVQIALDYLKRRQVKLVNIRNDDITDGNPKLTLGLIWTIILHFQISDIHVTGESEDMSAKERLLLWTQQATEGYAGIRCENFTTCWRDGKLFNAIIHKYRPDLIDMNTVAVQSNLANLEHAFYVAEKIGVIRLLDPEDVDVSSPDEKSVITYVSSLYDAFPKVPEGGEGIGANDVEVKWIEYQNMVNYLIQWIRHHVTTMSERTFPNNPVELKALYNQYLQFKETEIPPKETEKSKIKRLYKLLEIWIEFGRIKLLQGYHPNDIEKEWGKLIIAMLEREKALRPEVERLEMLQQIANRVQRDSVICEDKLILAGNALQSDSKRLESGVQFQNEAEIAGYILECENLLRQHVIDVQILIDGKYYQADQLVQRVAKLRDEIMALRNECSSVYSKGRILTTEQTKLMISGITQSLNSGFAQTLHPSLTSGLTQSLTPSLTSSSMTSGLSSGMTSRLTPSVTPAYTPGFPSGLVPNFSSGVEPNSLQTLKLMQIRKPLLKSSLLDQNLTEEEINMKFVQDLLNWVDEMQVQLDRTEWGSDLPSVESHLENHKNVHRAIEEFESSLKEAKISEIQMTAPLKLTYAEKLHRLESQYAKLLNTSRNQERHLDTLHNFVSRATNELIWLNEKEEEEVAYDWSERNTNIARKKDYHAELMRELDQKEENIKSVQEIAEQLLLENHPARLTIEAYRAAMQTQWSWILQLCQCVEQHIKENTAYFEFFNDAKEATDYLRNLKDAIQRKYSCDRSSSIHKLEDLVQESMEEKEELLQYKSTIANLMGKAKTIIQLKPRNSDCPLKTSIPIKAICDYRQIEITIYKDDECVLANNSHRAKWKVISPTGNEAMVPSVCFTVPPPNKEAVDLANRIEQQYQNVLTLWHESHINMKSVVSWHYLINEIDRIRASNVASIKTMLPGEHQQVLSNLQSRFEDFLEDSQESQVFSGSDITQLEKEVNVCKQYYQELLKSAEREEQEESVYNLYISEVRNIRLRLENCEDRLIRQIRTPLERDDLHESVFRITEQEKLKKELERLKDDLGTITNKCEEFFSQAAASSSVPTLRSELNVVLQNMNQVYSMSSTYIDKLKTVNLVLKNTQAAEALVKLYETKLCEEEAVIADKNNIENLISTLKQWRSEVDEKRQVFHALEDELQKAKAISDEMFKTYKERDLDFDWHKEKADQLVERWQNVHVQIDNRLRDLEGIGKSLKYYRDTYHPLDDWIQQVETTQRKIQENQPENSKTLATQLNQQKMLVSEIEMKQSKMDECQKYAEQYSATVKDYELQTMTYRAMVDSQQKSPVKRRRMQSSADLIIQEFMDLRTRYTALVTLMTQYIKFAGDSLKRLEEEEKSLEEEKKEHVEKAKELQKWVSNISKTLKDAEKAGKPPFSKQKISSEEISTKKEQLSEALQTIQLFLAKHGDKMTDEERNELEKQVKTLQESYNLLFSESLKQLQESQTSGDVKVEEKLDKVIAGTIDQTTGEVLSVFQAVLRGLIDYDTGIRLLETQLMISGLISPELRKCFDLKDAKSHGLIDEQILCQLKELSKAKEIISAASPTTIPVLDALAQSMITESMAIKVLEILLSTGSLVIPATGEQLTLQKAFQQNLVSSALFSKVLERQNMCKDLIDPCTSEKVSLIDMVQRSTLQENTGMWLLPVRPQEGGRITLKCGRNISILRAAHEGLIDRETMFRLLSAQLLSGGLINSNSGQRMTVEEAVREGVIDRDTASSILTYQVQTGGIIQSNPAKRLTVDEAVQCDLITSSSALLVLEAQRGYVGLIWPHSGEIFPTSSSLQQELITNELAYKILNGRQKIAALYIPESSQVIGLDAAKQLGIIDNNTASILKNITLPDKMPDLGDLEACKNARRWLSFCKFQPSTVHDYRQEEDVFDGEEPVTTQTSEETKKLFLSYLMINSYMDANTGQRLLLYDGDLDEAVGMLLEGCHAEFDGNTAIKECLDVLSSSGVFLNNASGREKDECTATPSSFNKCHCGEPEHEETPENRKCAIDEEFNEMRNTVINSEFSQSGKLASTISIDPKVNSSPSVCVPSLISYLTQTELADISMLRSDSENILTNYENQSRVETNERANECSHSKNIQNFPSDLIENPIMKSKMSKFCGVNETENEDNTNRDSPIFDYSPRLSALLSHDKLMHSQGSFNDTHTPESNGNKCEAPALSFSDKTMLSGQRIGEKFQDQFLGIAAINISLPGEQYGQKSLNMISSNPQVQYHNDKYISNTSGEDEKTHPGFQQMPEDKEDESEIEEYSCAVTPGGDTDNAIVSLTCATPLLDETISASDYETSLLNDQQNNTGTDTDSDDDFYDTPLFEDDDHDSLLLDGDDRDCLHPEDYDTLQEENDETASPADVFYDVSKENENSMVPQGAPVGSLSVKNKAHCLQDFLMDVEKDELDSGEKIHLNPVGSDKVNGQSLETGSERECTNILEGDESDSLTDYDIVGGKESFTASLKFDDSGSWRGRKEEYVTGQEFHSDTDHLDSMQSEESYGDYIYDSNDQDDDDDDGIDEEGGGIRDENGKPRCQNVAEDMDIQLCASILNENSDENENINTMILLDKMHSCSSLEKQQRVNVVQLASPSENNLVTEKSNLPEYTTEIAGKSKENLLNHEMVLKDVLPPIIKDTESEKTFGPASISHDNNNISSTSELGTDLANTKVKLIQGSELPELTDSVKGKDEYFKNMTPKVDSSLDHIICTEPDLIGKPAEESHLSLIASVTDKDPQGNGSDLIKGRDGKSDILIEDETSIQKMYLGEGEVLVEGLVEEENRHLKLLPGKNTRDSFKLINSQFPFPQITNNEELNQKGSLKKATVTLKDEPNNLQIIVSKSPVQFENLEEIFDTSVSKEISDDITSDITSWEGNTHFEESFTDGPEKELDLFTYLKHCAKNIKAKDVAKPNEDVPSHVLITAPPMKEHLQLGVNNTKEKSTSTQKDSPLNDMIQSNDLCSKESISGGGTEISQFTPESIEATLSILSRKHVEDVGKNDFLQSERCANGLGNDNSSNTLNTDYSFLEINNKKERIEQQLPKEQALSPRSQEKEVQIPELSQVFVEDVKDILKSRLKEGHMNPQEVEEPSACADTKILIQNLIKRITTSQLVNEASTVPSDSQMSDSSGVSPMTNSSELKPESRDDPFCIGNLKSELLLNILKQDQHSQKITGVFELMRELTHMEYDLEKRGITSKVLPLQLENIFYKLLADGYSEKIEHVGDFNQKACSTSEMMEEKPHILGDIKSKEGNYYSPNLETVKEIGLESSTVWASTLPRDEKLKDLCNDFPSHLECTSGSKEMASGDSSTEQFSSELQQCLQHTEKMHEYLTLLQDMKPPLDNQESLDNNLEALKNQLRQLETFELGLAPIAVILRKDMKLAEEFLKSLPSDFPRGHVEELSISHQSLKTAFSSLSNVSSERTKQIMLAIDSEMSKLAVSHEEFLHKLKSFSDWVSEKSKSVKDIEIVNVQDSEYVKKRLEFLKNVLKDLGHTKMQLETTAFDVQFFISEYAQDLSPNQSKQLLRLLNTTQKCFLDVQESVTTQVERLETQLHLEQDLDDQKIVAERQQEYKEKLQGICDLLTQTENRLIGHQEAFMIGDGTVELKKYQSKQEELQKDMQGSAQALAEVVKNTENFLKENGEKLSQEDKALIEQKLNEAKIKCEQLNLKAEQSKKELDKVVTTAIKEETEKVAAVKQLEESKTKIENLLDWLSNVDKDSERAGTKHKQVIEQNGTHFQEGDGKSAIGEEDEVNGNLLETDVDGQVGTTQENLNQQYQKVKAQHEKIISQHQAVIIATQSAQVLLEKQGQYLSPEEKEKLQKNMKELKVHYETALAESEKKMKLTHSLQEELEKFDADYTEFEHWLQQSEQELENLEAGADDINGLMTKLKRQKSFSEDVISHKGDLRYITISGNRVLEAAKSCSKRDGGKVDTSATHREVQRKLDHATDRFRSLYSKCNVLGNNLKDLVDKYQHYEDASCGLLAGLQACEATASKHLSEPIAVDPKNLQRQLEETKALQGQISSQQVAVEKLKKTAEVLLDARGSLLPAKNDIQKTLDDIVGRYEDLSKSVNERNEKLQITLTRSLSVQDGLDEMLDWMGNVESSLKEQGQVPLNSTALQDIISKNIMLEQDIAGRQSSINAMNEKVKKFMETTDPSTASSLQAKMKDLSARFSEASHKHKETLAKMEELKTKVELFENLSEKLQTFLETKTQALTEVDVPGKDVTELSQYMQESTSEFLEHKKHLEVLHSLLKEISSHGLPSDKALVLEKTNNLSKKFKEMEDTIKEKKEAVTSCQEQLDAFQVLVKSLKSWIKETTKKVPIVQPSFGAEDLGKSLEDTKKLQEKWSLKTPEIQKVNNSGISLCNLISAVTTPAKAIAAVKSGGAVLNGEGTATNTEEFWANKGLTSIKKDMTDISHGYEDLGLLLKDKIAELNTKLSKLQKAQEESSAMMQWLQKMNKTATKWQQTPAPTDTEAVKTQVEQNKSFEAELKQNVNKVQELKDKLTELLEENPDTPEAPRWKQMLTEIDSKWQELNQLTIDRQQKLEESSNNLTQFQTVEAQLKQWLVEKELMVSVLGPLSIDPNMLNTQRQQVQILLQEFATRKPQYEQLTAAGQGILSRPGEDPSLRGIVKEQLAAVTQKWDSLTGQLSDRCDWIDQAIVKSTQYQSLLRSLSDKLSDLDNKLSSSLAVSTHPDAMNQQLETAQKMKQEIQQEKKQIKVAQALCEDLSALVKEEYLKAELSRQLEGILKSFKDVEQKAENHVQHLQSACASSHQFQQMSRDFQAWLDTKKEEQNKSHPISAKLDVLESLIKDHKDFSKTLTAQSHMYEKTIAEGENLLLKTQGSEKAALQLQLNTIKTNWDTFNKQVKERENKLKESLEKALKYKEQVETLWPWIDKCQNNLEEIKFCLDPAEGENSIAKLKSLQKEMDQHFGMVELLNNTANSLLSVCEIDKEVVTDENKSLIQKVDMVTEQLHSKKFCLENMTQKFKEFQEVSKESKRQLQCAKEQLDIHDSLGSQAYSNKYLTMLQTQQKSLQALKHQVDLAKRLAQDLVVEASDSKGTSDVLLQVETIAQEHSTLSQQVDEKCSFLETKLQGIGHFQNTIREMFSQFAEFDDELDSMAPVGRDAETLQKQKETIKAFLKKLEALMASNDNANKTCKMMLATEETSPDLVGIKRDLEALSKQCNKLLDRAQAREEQVEGTIKRLEEFYSKLKEFSILLQKAEEHEESQGPVGMETETINQQLNMFKVFQKEEIEPLQGKQQDVNWLGQGLIQSAAKSTSTQGLEHDLDDVNARWKTLNKKVAQRAAQLQEALLHCGRFQDALESLLSWMVDTEELVANQKPPSAEFKVVKAQIQEQKLLQRLLDDRKSTVEVIKREGEKIATTAEPADKVKILKQLSLLDSRWEALLNKAETRNRQLEGISVVAQQFHETLEPLNEWLTTIEKRLVNCEPIGTQASKLEEQIAQHKALEDDIINHNKHLHQAVSIGQSLKVLSSREDKDMVQSKLDFSQVWYIEIQEKSHSRSELLQQALCNAKIFGEDEVELMNWLNEVHDKLSKLSVQDYSTEGLWKQQSELRVLQEDILLRKQNVDQALLNGLELLKQTTGDEVLIIQDKLEAIKARYKDITKLSTDVAKTLEQALQLARRLHSTHEELCTWLDKVEVELLSYETQVLKGEEASQAQMRPKELKKEAKNNKALLDSLNEVSSALLELVPWRAREGLEKMVAEDNERYRLVSDTITQKVEEIDAAILRSQQFDQAADAELSWITETEKKLMSLGDIRLEQDQTSAQLQVQKTFTMEILRHKDIIDDLVKSGHKIMTACSEEEKQSMKKKLDKVLKNYDTICQINSERYLQLERAQSLVNQFWETYEELWPWLTETQSIISQLPAPALEYETLRQQQEEHRQLRELIAEHKPHIDKMNKTGPQLLELSPGEGFSIQEKYVAADTLYSQIKEDVKKRAVALDEAISQSTQFHDKIDQILESLERIVERLRQPPSISAEVEKIKEQISENKNVSVDMEKLQPLYETLKQRGEEMIARSGGTDKDISAKAVQDKLDQMVFIWENIHTLVEEREAKLLDVMELAEKFWCDHMSLIVTIKDTQDFIRDLEDPGIDPSVVKQQQEAAETIREEIDGLQEELDIVINLGSELIAACGEPDKPIVKKSIDELNSAWDSLNKAWKDRIDKLEEAMQAAVQYQDGLQAVFDWVDIAGGKLASMSPIGTDLETVKQQIEELKQFKSEAYQQQIEMERLNHQAELLLKKVTEESDKHTVQDPLMELKLIWDSLEERIINRQHKLEGALLALGQFQHALDELLAWLTHTEGLLSEQKPVGGDPKAIEIELAKHHVLQNDVLAHQSTVEAVNKAGNDLIESSAGEEASNLQNKLEVLNQRWQNVLEKTEQRKQQLDGALRQAKGFHGEIEDLQQWLTDTERHLLASKPLGGLPETAKEQLNVHMEVCAAFEAKEETYKSLMQKGQQMLARCPKSAETNIDQDINNLKEKWESVETKLNERKTKLEEALNLAMEFHNSLQDFINWLTQAEQTLNVASRPSLILDTVLFQIDEHKVFANEVNSHREQIIELDKTGTHLKYFSQKQDVVLIKNLLISVQSRWEKVVQRLVERGRSLDDARKRAKQFHEAWSKLMEWLEESEKSLDSELEIANDPDKIKTQLAQHKEFQKSLGAKHSVYDTTNRTGRSLKEKTSLADDNLKLDDMLSELRDKWDTICGKSVERQNKLEEALLFSGQFTDALQALIDWLYRVEPQLAEDQPVHGDIDLVMNLIDNHKAFQKELGKRTSSVQALKRSARELIEGSRDDSSWVKVQMQELSTRWETVCALSISKQTRLEAALRQAEEFHSVVHALLEWLAEAEQTLRFHGVLPDDEDALRTLIDQHKEFMKKLEEKRAELNKATTMGDTVLAICHPDSITTIKHWITIIRARFEEVLAWAKQHQQRLASALAGLIAKQELLEALLAWLQWAETTLTDKDKEVIPQEIEEVKALIAEHQTFMEEMTRKQPDVDKVTKTYKRRAADPSSLQSHIPVLDKGRAGRKRFPASSLYPSGSQTQIETKNPRVNLLVSKWQQVWLLALERRRKLNDALDRLEELREFANFDFDIWRKKYMRWMNHKKSRVMDFFRRIDKDQDGKITRQEFIDGILSSKFPTSRLEMSAVADIFDRDGDGYIDYYEFVAALHPNKDAYKPITDADKIEDEVTRQVAKCKCAKRFQVEQIGDNKYRFFLGNQFGDSQQLRLVRILRSTVMVRVGGGWMALDEFLVKNDPCRVHHHGSKMLRSESNSSITTTQPTIAKGRTNMELREKFILADGASQGMAAFRPRGRRSRPSSRGASPNRSTSVSSQAAQAASPQVPATTTPKGTPIQGSKLRLPGYLSGKGFHSGEDSGLITTAAARVRTQFADSKKTPSRPGSRAGSKAGSRASSRRGSDASDFDISEIQSVCSDVETVPQTHRPTPRAGSRPSTAKPSKIPTPQRKSPASKLDKSSKR

SEQ ID NO: 13029 - protein, 5171 aa, Homo sapiens
MHSSSYSYRSSDSVFSNTTSTRTSLDSNENLLLVHCGPTLINSCISFGSESFDGHRLEMLQQIANRVQRDSVICEDKLILAGNALQSDSKRLESGVQFQNEAEIAGYILECENLLRQHVIDVQILIDGKYYQADQLVQRVAKLRDEIMALRNECSSVYSKGRILTTEQTKLMISGITQSLNSGFAQTLHPSLTSGLTQSLTPSLTSSSMTSGLSSGMTSRLTPSVTPAYTPGFPSGLVPNFSSGVEPNSLQTLKLMQIRKPLLKSSLLDQNLTEEEINMKFVQDLLNWVDEMQVQLDRTEWGSDLPSVESHLENHKNVHRAIEEFESSLKEAKISEIQMTAPLKLTYAEKLHRLESQYAKLLNTSRNQERHLDTLHNFVSRATNELIWLNEKEEEEVAYDWSERNTNIARKKDYHAELMRELDQKEENIKSVQEIAEQLLLENHPARLTIEAYRAAMQTQWSWILQLCQCVEQHIKENTAYFEFFNDAKEATDYLRNLKDAIQRKYSCDRSSSIHKLEDLVQESMEEKEELLQYKSTIANLMGKAKTIIQLKPRNSDCPLKTSIPIKAICDYRQIEITIYKDDECVLANNSHRAKWKVISPTGNEAMVPSVCFTVPPPNKEAVDLANRIEQQYQNVLTLWHESHINMKSVVSWHYLINEIDRIRASNVASIKTMLPGEHQQVLSNLQSRFEDFLEDSQESQVFSGSDITQLEKEVNVCKQYYQELLKSAEREEQEESVYNLYISEVRNIRLRLENCEDRLIRQIRTPLERDDLHESVFRITEQEKLKKELERLKDDLGTITNKCEEFFSQAAASSSVPTLRSELNVVLQNMNQVYSMSSTYIDKLKTVNLVLKNTQAAEALVKLYETKLCEEEAVIADKNNIENLISTLKQWRSEVDEKRQVFHALEDELQKAKAISDEMFKTYKERDLDFDWHKEKADQLVERWQNVHVQIDNRLRDLEGIGKSLKYYRDTYHPLDDWIQQVETTQRKIQENQPENSKTLATQLNQQKMLVSEIEMKQSKMDECQKYAEQYSATVKDYELQTMTYRAMVDSQQKSPVKRRRMQSSADLIIQEFMDLRTRYTALVTLMTQYIKFAGDSLKRLEEEEKSLEEEKKEHVEKAKELQKWVSNISKTLKDAEKAGKPPFSKQKISSEEISTKKEQLSEALQTIQLFLAKHGDKMTDEERNELEKQVKTLQESYNLLFSESLKQLQESQTSGDVKVEEKIVAERQQEYKEKLQGICDLLTQTENRLIGHQEAFMIGDGTVELKKYQSKQEELQKDMQGSAQALAEVVKNTENFLKENGEKLSQEDKALIEQKLNEAKIKCEQLNLKAEQSKKELDKVVTTAIKEETEKVAAVKQLEESKTKIENLLDWLSNVDKDSERAGTKHKQVIEQNGTHFQEGDGKSAIGEEDEVNGNLLETDVDGQVGTTQENLNQQYQKVKAQHEKIISQHQAVIIATQSAQVLLEKQGQYLSPEEKEKLQKNMKELKVHYETALAESEKKMKLTHSLQEELEKFDADYTEFEHWLQQSEQELENLEAGADDINGLMTKLKRQKSFSEDVISHKGDLRYITISGNRVLEAAKSCSKRDGGKVDTSATHREVQRKLDHATDRFRSLYSKCNVLGNNLKDLVDKYQHYEDASCGLLAGLQACEATASKHLSEPIAVDPKNLQRQLEETKALQGQISSQQVAVEKLKKTAEVLLDARGSLLPAKNDIQKTLDDIVGRYEDLSKSVNERNEKLQITLTRSLSVQDGLDEMLDWMGNVESSLKEQGQVPLNSTALQDIISKNIMLEQDIAGRQSSINAMNEKVKKFMETTDPSTASSLQAKMKDLSARFSEASHKHKETLAKMEELKTKVELFENLSEKLQTFLETKTQALTEVDVPGKDVTELSQYMQESTSEFLEHKKHLEVLHSLLKEISSHGLPSDKALVLEKTNNLSKKFKEMEDTIKEKKEAVTSCQEQLDAFQVLVKSLKSWIKETTKKVPIVQPSFGAEDLGKSLEDTKKLQEKWSLKTPEIQKVNNSGISLCNLISAVTTPAKAIAAVKSGGAVLNGEGTATNTEEFWANKGLTSIKKDMTDISHGYEDLGLLLKDKIAELNTKLSKLQKAQEESSAMMQWLQKMNKTATKWQQTPAPTDTEAVKTQVEQNKSFEAELKQNVNKVQELKDKLTELLEENPDTPEAPRWKQMLTEIDSKWQELNQLTIDRQQKLEESSNNLTQFQTVEAQLKQWLVEKELMVSVLGPLSIDPNMLNTQRQQVQILLQEFATRKPQYEQLTAAGQGILSRPGEDPSLRGIVKEQLAAVTQKWDSLTGQLSDRCDWIDQAIVKSTQYQSLLRSLSDKLSDLDNKLSSSLAVSTHPDAMNQQLETAQKMKQEIQQEKKQIKVAQALCEDLSALVKEEYLKAELSRQLEGILKSFKDVEQKAENHVQHLQSACASSHQFQQMSRDFQAWLDTKKEEQNKSHPISAKLDVLESLIKDHKDFSKTLTAQSHMYEKTIAEGENLLLKTQGSEKAALQLQLNTIKTNWDTFNKQVKERENKLKESLEKALKYKEQVETLWPWIDKCQNNLEEIKFCLDPAEGENSIAKLKSLQKEMDQHFGMVELLNNTANSLLSVCEIDKEVVTDENKSLIQKVDMVTEQLHSKKFCLENMTQKFKEFQEVSKESKRQLQCAKEQLDIHDSLGSQAYSNKYLTMLQTQQKSLQALKHQVDLAKRLAQDLVVEASDSKGTSDVLLQVETIAQEHSTLSQQVDEKCSFLETKLQGIGHFQNTIREMFSQFAEFDDELDSMAPVGRDAETLQKQKETIKAFLKKLEALMASNDNANKTCKMMLATEETSPDLVGIKRDLEALSKQCNKLLDRAQAREEQVEGTIKRLEEFYSKLKEFSILLQKAEEHEESQGPVGMETETINQQLNMFKVFQKEEIEPLQGKQQDVNWLGQGLIQSAAKSTSTQGLEHDLDDVNARWKTLNKKVAQRAAQLQEALLHCGRFQDALESLLSWMVDTEELVANQKPPSAEFKVVKAQIQEQKLLQRLLDDRKSTVEVIKREGEKIATTAEPADKVKILKQLSLLDSRWEALLNKAETRNRQLEGISVVAQQFHETLEPLNEWLTTIEKRLVNCEPIGTQASKLEEQIAQHKALEDDIINHNKHLHQAVSIGQSLKVLSSREDKDMVQSKLDFSQVWYIEIQEKSHSRSELLQQALCNAKIFGEDEVELMNWLNEVHDKLSKLSVQDYSTEGLWKQQSELRVLQEDILLRKQNVDQALLNGLELLKQTTGDEVLIIQDKLEAIKARYKDITKLSTDVAKTLEQALQLARRLHSTHEELCTWLDKVEVELLSYETQVLKGEEASQAQMRPKELKKEAKNNKALLDSLNEVSSALLELVPWRAREGLEKMVAEDNERYRLVSDTITQKVEEIDAAILRSQQFDQAADAELSWITETEKKLMSLGDIRLEQDQTSAQLQVQKTFTMEILRHKDIIDDLVKSGHKIMTACSEEEKQSMKKKLDKVLKNYDTICQINSERYLQLERAQSLVNQFWETYEELWPWLTETQSIISQLPAPALEYETLRQQQEEHRQLRELIAEHKPHIDKMNKTGPQLLELSPGEGFSIQEKYVAADTLYSQIKEDVKKRAVALDEAISQSTQFHDKIDQILESLERIVERLRQPPSISAEVEKIKEQISENKNVSVDMEKLQPLYETLKQRGEEMIARSGGTDKDISAKAVQDKLDQMVFIWENIHTLVEEREAKLLDVMELAEKFWCDHMSLIVTIKDTQDFIRDLEDPGIDPSVVKQQQEAAETIREEIDGLQEELDIVINLGSELIAACGEPDKPIVKKSIDELNSAWDSLNKAWKDRIDKLEEAMQAAVQYQDGLQAVFDWVDIAGGKLASMSPIGTDLETVKQQIEELKQFKSEAYQQQIEMERLNHQAELLLKKVTEESDKHTVQDPLMELKLIWDSLEERIINRQHKLEGALLALGQFQHALDELLAWLTHTEGLLSEQKPVGGDPKAIEIELAKHHVLQNDVLAHQSTVEAVNKAGNDLIESSAGEEASNLQNKLEVLNQRWQNVLEKTEQRKQQLDGALRQAKGFHGEIEDLQQWLTDTERHLLASKPLGGLPETAKEQLNVHMEVCAAFEAKEETYKSLMQKGQQMLARCPKSAETNIDQDINNLKEKWESVETKLNERKTKLEEALNLAMEFHNSLQDFINWLTQAEQTLNVASRPSLILDTVLFQIDEHKVFANEVNSHREQIIELDKTGTHLKYFSQKQDVVLIKNLLISVQSRWEKVVQRLVERGRSLDDARKRAKQFHEAWSKLMEWLEESEKSLDSELEIANDPDKIKTQLAQHKEFQKSLGAKHSVYDTTNRTGRSLKEKTSLADDNLKLDDMLSELRDKWDTICGKSVERQNKLEEALLFSGQFTDALQALIDWLYRVEPQLAEDQPVHGDIDLVMNLIDNHKAFQKELGKRTSSVQALKRSARELIEGSRDDSSWVKVQMQELSTRWETVCALSISKQTRLEAALRQAEEFHSVVHALLEWLAEAEQTLRFHGVLPDDEDALRTLIDQHKEFMKKLEEKRAELNKATTMGDTVLAICHPDSITTIKHWITIIRARFEEVLAWAKQHQQRLASALAGLIAKQELLEALLAWLQWAETTLTDKDKEVIPQEIEEVKALIAEHQTFMEEMTRKQPDVDKVTKTYKRRAADPSSLQSHIPVLDKGRAGRKRFPASSLYPSGSQTQIETKNPRVNLLVSKWQQVWLLALERRRKLNDALDRLEELREFANFDFDIWRKKYMRWMNHKKSRVMDFFRRIDKDQDGKITRQEFIDGILSSKFPTSRLEMSAVADIFDRDGDGYIDYYEFVAALHPNKDAYKPITDADKIEDEVTRQVAKCKCAKRFQVEQIGDNKYRFFLGNQFGDSQQLRLVRILRSTVMVRVGGGWMALDEFLVKNDPCRAKGRTNMELREKFILADGASQGMAAFRPRGRRSRPSSRGASPNRSTSVSSQAAQAASPQVPATTTPKILHPLTRNYGKPWLTNSKMSTPCKAAECSDFPVPSAEGTPIQGSKLRLPGYLSGKGFHSGEDSGLITTAAARVRTQFADSKKTPSRPGSRAGSKAGSRASSRRGSDASDFDISEIQSVCSDVETVPQTHRPTPRAGSRPSTAKPSKIPTPQRKSPASKLDKSSKR

SEQ ID NO: 13030 - protein, 2649 aa, Homo sapiens
MHSSSYSYRSSDSVFSNTTSTRTSLDSNENLLLVHCGPTLINSCISFGSESFDGHRLEMLQQIANRVQRDSVICEDKLILAGNALQSDSKRLESGVQFQNEAEIAGYILECENLLRQHVIDVQILIDGKYYQADQLVQRVAKLRDEIMALRNECSSVYSKGRILTTEQTKLMISGITQSLNSGFAQTLHPSLTSGLTQSLTPSLTSSSMTSGLSSGMTSRLTPSVTPAYTPGFPSGLVPNFSSGVEPNSLQTLKLMQIRKPLLKSSLLDQNLTEEEINMKFVQDLLNWVDEMQVQLDRTEWGSDLPSVESHLENHKNVHRAIEEFESSLKEAKISEIQMTAPLKLTYAEKLHRLESQYAKLLNTSRNQERHLDTLHNFVSRATNELIWLNEKEEEEVAYDWSERNTNIARKKDYHAELMRELDQKEENIKSVQEIAEQLLLENHPARLTIEAYRAAMQTQWSWILQLCQCVEQHIKENTAYFEFFNDAKEATDYLRNLKDAIQRKYSCDRSSSIHKLEDLVQESMEEKEELLQYKSTIANLMGKAKTIIQLKPRNSDCPLKTSIPIKAICDYRQIEITIYKDDECVLANNSHRAKWKVISPTGNEAMVPSVCFTVPPPNKEAVDLANRIEQQYQNVLTLWHESHINMKSVVSWHYLINEIDRIRASNVASIKTMLPGEHQQVLSNLQSRFEDFLEDSQESQVFSGSDITQLEKEVNVCKQYYQELLKSAEREEQEESVYNLYISEVRNIRLRLENCEDRLIRQIRTPLERDDLHESVFRITEQEKLKKELERLKDDLGTITNKCEEFFSQAAASSSVPTLRSELNVVLQNMNQVYSMSSTYIDKLKTVNLVLKNTQAAEALVKLYETKLCEEEAVIADKNNIENLISTLKQWRSEVDEKRQVFHALEDELQKAKAISDEMFKTYKERDLDFDWHKEKADQLVERWQNVHVQIDNRLRDLEGIGKSLKYYRDTYHPLDDWIQQVETTQRKIQENQPENSKTLATQLNQQKMLVSEIEMKQSKMDECQKYAEQYSATVKDYELQTMTYRAMVDSQQKSPVKRRRMQSSADLIIQEFMDLRTRYTALVTLMTQYIKFAGDSLKRLEEEEIKRCKETSEHGAYSDLLQRQKATVLENSKLTGKISELERMVAELKKQKSRVEEELPKVREAAENELRKQQRNVEDISLQKIRAESEAKQYRRELETIVREKEAAERELERVRQLTIEAEAKRAAVEENLLNFRNQLEENTFTRRTLEDHLKRKDLSLNDLEQQKNKLMEELRRKRDNEEELLKLIKQMEKDLAFQKQVAEKQLKEKQKIELEARRKITEIQYTCRENALPVCPITQATSCRAVTGLQQEHDKQKAEELKQQVDELTAANRKAEQDMRELTYELNALQLEKTSSEEKARLLKDKLDETNNTLRCLKLELERKDQAEKGYSQQLRELGRQLNQTTGKAEEAMQEASDLKKIKRNYQLELESLNHEKGKLQREVDRITRAHAVAEKNIQHLNSQIHSFRDEKELERLQICQRKSDHLKEQFEKSHEQLLQNIKAEKENNDKIQRLNEELEKSNECAEMLKQKVEELTRQNNETKLMMQRIQAESENIVLEKQTIQQRCEALKIQADGFKDQLRSTNEHLHKQTKTEQDFQRKIKCLEEDLAKSQNLVSEFKQKCDQQNIIIQNTKKEVRNLNAELNASKEEKRRGEQKVQLQQAQVQELNNRLKKVQDELHLKTIEEQMTHRKMVLFQEESGKFKQSAEEFRKKMEKLMESKVITENDISGIRLDFVSLQQENSRAQENAKLCETNIKELERQLQQYREQMQQGQHMEANHYQKCQKLEDELIAQKREVENLKQKMDQQIKEHEHQLVLLQCEIQKKSTAKDCTFKPDFEMTVKECQHSGELSSRNTGHLHPTPRSPLLRWTQEPQPLEEKWQHRVVEQIPKEVQFQPPGAPLEKEKSQQCYSEYFSQTSTELQITFDETNPITRLSEIEKIRDQALNNSRPPVRYQDNACEMELVKVLTPLEIAKNKQYDMHTEVTTLKQEKNPVPSAEEWMLEGCRASGGLKKGDFLKKGLEPETFQNFDGDHACSVRDDEFKFQGLRHTVTARQLVEAKLLDMRTIEQLRLGLKTVEEVQKTLNKFLTKATSIAGLYLESTKEKISFASAAERIIIDKMVALAFLEAQAATGFIIDPISGQTYSVEDAVLKGVVDPEFRIRLLEAEKAAVGYSYSSKTLSVFQAMENRMLDRQKGKHILEAQIASGGVIDPVRGIRVPPEIALQQGLLNNAILQFLHEPSSNTRVFPNPNNKQALYYSELLRMCVFDVESQCFLFPFGERNISNLNVKKTHRISVVDTKTGSELTVYEAFQRNLIEKSIYLELSGQQYQWKEAMFFESYGHSSHMLTDTKTGLHFNINEAIEQGTIDKALVKKYQEGLITLTELADSLLSRLVPKKDLHSPVAGYWLTASGERISVLKASRRNLVDRITALRCLEAQVSTGGIIDPLTGKKYRVAEALHRGLVDEGFAQQLRQCELVITGIGHPITNKMMSVVEAVNANIINKEMGIRCLEFQYLTGGLIEPQVHSRLSIEEALQVGIIDVLIATKLKDQKSYVRNIICPQTKRKLTYKEALEKADFDFHTGLKLLEVSEPLMTGISSLYYSS

SEQ ID NO: 13031 - protein, 3060 aa, Homo sapiens
MHSSSYSYRSSDSVFSNTTSTRTSLDSNENLLLVHCGPTLINSCISFGSESFDGHRLEMLQQIANRVQRDSVICEDKLILAGNALQSDSKRLESGVQFQNEAEIAGYILECENLLRQHVIDVQILIDGKYYQADQLVQRVAKLRDEIMALRNECSSVYSKGRILTTEQTKLMISGITQSLNSGFAQTLHPSLTSGLTQSLTPSLTSSSMTSGLSSGMTSRLTPSVTPAYTPGFPSGLVPNFSSGVEPNSLQTLKLMQIRKPLLKSSLLDQNLTEEEINMKFVQDLLNWVDEMQVQLDRTEWGSDLPSVESHLENHKNVHRAIEEFESSLKEAKISEIQMTAPLKLTYAEKLHRLESQYAKLLNTSRNQERHLDTLHNFVSRATNELIWLNEKEEEEVAYDWSERNTNIARKKDYHAELMRELDQKEENIKSVQEIAEQLLLENHPARLTIEAYRAAMQTQWSWILQLCQCVEQHIKENTAYFEFFNDAKEATDYLRNLKDAIQRKYSCDRSSSIHKLEDLVQESMEEKEELLQYKSTIANLMGKAKTIIQLKPRNSDCPLKTSIPIKAICDYRQIEITIYKDDECVLANNSHRAKWKVISPTGNEAMVPSVCFTVPPPNKEAVDLANRIEQQYQNVLTLWHESHINMKSVVSWHYLINEIDRIRASNVASIKTMLPGEHQQVLSNLQSRFEDFLEDSQESQVFSGSDITQLEKEVNVCKQYYQELLKSAEREEQEESVYNLYISEVRNIRLRLENCEDRLIRQIRTPLERDDLHESVFRITEQEKLKKELERLKDDLGTITNKCEEFFSQAAASSSVPTLRSELNVVLQNMNQVYSMSSTYIDKLKTVNLVLKNTQAAEALVKLYETKLCEEEAVIADKNNIENLISTLKQWRSEVDEKRQVFHALEDELQKAKAISDEMFKTYKERDLDFDWHKEKADQLVERWQNVHVQIDNRLRDLEGIGKSLKYYRDTYHPLDDWIQQVETTQRKIQENQPENSKTLATQLNQQKMLVSEIEMKQSKMDECQKYAEQYSATVKDYELQTMTYRAMVDSQQKSPVKRRRMQSSADLIIQEFMDLRTRYTALVTLMTQYIKFAGDSLKRLEEEEKSLEEEKKEHVEKAKELQKWVSNISKTLKDAEKAGKPPFSKQKISSEEISTKKEQLSEALQTIQLFLAKHGDKMTDEERNELEKQVKTLQESYNLLFSESLKQLQESQTSGDVKVEEKLDKVIAGTIDQTTGEVLSVFQAVLRGLIDYDTGIRLLETQLMISGLISPELRKCFDLKDAKSHGLIDEQILCQLKELSKAKEIISAASPTTIPVLDALAQSMITESMAIKVLEILLSTGSLVIPATGEQLTLQKAFQQNLVSSALFSKVLERQNMCKDLIDPCTSEKVSLIDMVQRSTLQENTGMWLLPVRPQEGGRITLKCGRNISILRAAHEGLIDRETMFRLLSAQLLSGGLINSNSGQRMTVEEAVREGVIDRDTASSILTYQVQTGGIIQSNPAKRLTVDEAVQCDLITSSSALLVLEAQRGYVGLIWPHSGEIFPTSSSLQQELITNELAYKILNGRQKIAALYIPESSQVIGLDAAKQLGIIDNNTASILKNITLPDKMPDLGDLEACKNARRWLSFCKFQPSTVHDYRQEEDVFDGEEPVTTQTSEETKKLFLSYLMINSYMDANTGQRLLLYDGDLDEAVGMLLEGCHAEFDGNTAIKECLDVLSSSGVFLNNASGREKDECTATPSSFNKCHCGEPEHEETPENRKCAIDEEFNEMRNTVINSEFSQSGKLASTISIDPKVNSSPSVCVPSLISYLTQTELADISMLRSDSENILTNYENQSRVETNERANECSHSKNIQNFPSDLIENPIMKSKMSKFCGVNETENEDNTNRDSPIFDYSPRLSALLSHDKLMHSQGSFNDTHTPESNGNKCEAPALSFSDKTMLSGQRIGEKFQDQFLGIAAINISLPGEQYGQKSLNMISSNPQVQYHNDKYISNTSGEDEKTHPGFQQMPEDKEDESEIEEYSCAVTPGGDTDNAIVSLTCATPLLDETISASDYETSLLNDQQNNTGTDTDSDDDFYDTPLFEDDDHDSLLLDGDDRDCLHPEDYDTLQEENDETASPADVFYDVSKENENSMVPQGAPVGSLSVKNKAHCLQDFLMDVEKDELDSGEKIHLNPVGSDKVNGQSLETGSERECTNILEGDESDSLTDYDIVGGKESFTASLKFDDSGSWRGRKEEYVTGQEFHSDTDHLDSMQSEESYGDYIYDSNDQDDDDDDGIDEEGGGIRDENGKPRCQNVAEDMDIQLCASILNENSDENENINTMILLDKMHSCSSLEKQQRVNVVQLASPSENNLVTEKSNLPEYTTEIAGKSKENLLNHEMVLKDVLPPIIKDTESEKTFGPASISHDNNNISSTSELGTDLANTKVKLIQGSELPELTDSVKGKDEYFKNMTPKVDSSLDHIICTEPDLIGKPAEESHLSLIASVTDKDPQGNGSDLIKGRDGKSDILIEDETSIQKMYLGEGEVLVEGLVEEENRHLKLLPGKNTRDSFKLINSQFPFPQITNNEELNQKGSLKKATVTLKDEPNNLQIIVSKSPVQFENLEEIFDTSVSKEISDDITSDITSWEGNTHFEESFTDGPEKELDLFTYLKHCAKNIKAKDVAKPNEDVPSHVLITAPPMKEHLQLGVNNTKEKSTSTQKDSPLNDMIQSNDLCSKESISGGGTEISQFTPESIEATLSILSRKHVEDVGKNDFLQSERCANGLGNDNSSNTLNTDYSFLEINNKKERIEQQLPKEQALSPRSQEKEVQIPELSQVFVEDVKDILKSRLKEGHMNPQEVEEPSACADTKILIQNLIKRITTSQLVNEASTVPSDSQMSDSSGVSPMTNSSELKPESRDDPFCIGNLKSELLLNILKQDQHSQKITGVFELMRELTHMEYDLEKRGITSKVLPLQLENIFYKLLADGYSEKIEHVGDFNQKACSTSEMMEEKPHILGDIKSKEGNYYSPNLETVKEIGLESSTVWASTLPRDEKLKDLCNDFPSHLECTSGSKEMASGDSSTEQ

SEQ ID NO: 13032 - protein, 447 aa, Homo sapiens
VVTTAIKEETEKVAAVKQLEESKTKIENLLDWLSNVDKDSERAGTKHKQVIEQNGTHFQEGDGKSAIGEEDEVNGNLLETDVDGQVGTTQENLNQQYQKVKAQHEKIISQHQAVIIATQSAQVLLEKQGQYLSPEEKEKLQKNMKELKVHYETALAESEKKMKLTHSLQEELEKFDADYTEFEHWLQQSEQELENLEAGADDINGLMTKLKRQKSFSEDVISHKGDLRYITISGNRVLEAAKSCSKRDGGKVDTSATHREVQRKLDHATDRFRSLYSKCNVLGNNLKDLVDKYQHYEDASCGLLAGLQACEATASKHLSEPIAVDPKNLQRQLEETKALQGQISSQQVAVEKLKKTAEVLLDARGSLLPAKNDIQKTLDDIVGRYEDLSKSVNERNEKLQITLTRSLSVQDGLDEMLDWMGNVESSLKEQDVGTGYCRSSEQYKCHE

SEQ ID NO: 13033 - protein, 224 aa, Homo sapiens
MIAAAFLVLLRPYSIQCALFLLLLLLGTIATIVFFCCWHRKLQKGRHPMKSVFSGRSRSRDAVLRSHHFRSEGFRASPRHLRRRVAAAAAARLEEVKPVVEVHHQSEQETSVRKRRIKKSSRVQPEFYHSVQGASIRRPSSGNASYRCSMSSSADFSDEDDFSQKSGSASPAPGDTLPWNLPKHERSKRKIQGGSVLDPAERAVLRIADERDKVQKKTFTKWIN

SEQ ID NO: 13034 - protein, 81 aa, Homo sapiens
MQHSIFSLKKKRCHSLYTSMSSVSKDTDGNEISDIHVTGESEDMSAKERLLLWTQQATEGYAGIRCENFTTCWRDGKLFNA

SEQ ID NO: 13035 - protein, 905 aa, Homo sapiens
MGNVCGCVRAEKEEQYVDPAKTPLNPEKYSPGRKYFRRKPIKKTGGDKESVGANNENEGKKKSSSQPSKEQPAPLSRGLVQQESVTLNSALGDGIQQKKTEVVADSVKQKLLPSAVSSWSDCVNTSPAKDSETEVKVSELDERISEKDSTPYCAKRKKHLDDVNTSEITFQEKTDVFSFRKAASLSSIPSGIERSLEKGGFPEDPPKSYSSIQEKQNTERFCPHATQHFQFKKKRCHSLYTSMSSVSKDTDGNEISDIHVTGESEDMSAKERLLLWTQQATEGYAGIRCENFTTCWRDGKLFNAIIHKYRPDLIDMNTVAVQSNLANLEHAFYVAEKIGVIRLLDPEDVDVSSPDEKSVITYVSSLYDAFPKVPEGGEGIGANDVEVKWIEYQNMVNYLIQWIRHHVTTMSERTFPNNPVELKALYNQYLQFKETEIPPKETEKSKIKRLYKLLEIWIEFGRIKLLQGYHPNDIEKEWGKLIIAMLEREKALRPEVERLEMLQQIANRVQRDSVICEDKLILAGNALQSDSKRLESGVQFQNEAEIAGYILECENLLRQHVIDVQILIDGKYYQADQLVQRVAKLRDEIMALRNECSSVYSKGRILTTEQTKLMISGITQSLNSGFAQTLHPSLTSGLTQSLTPSLTSSSMTSGLSSGMTSRLTPSVTPAYTPGFPSGLVPNFSSGVEPNSLQTLKLMQIRKPLLKSSLLDQNLTEEEINMKFVQDLLNWVDEMQVQLDRTEWGSDLPSVESHLENHKNVHRAIEEFESSLKEAKISEIQMTAPLKLTYAEKLHRLESQYAKLLNTSRNQERHLDTLHNFVSRATNELIWLNEKEEEEVAYDWSERNTNIARKKDYHAELMRELDQKEENIKSVQEIAEQLLLENHPARLTIEVKLESVMVLVEY

SEQ ID NO: 13036 - protein, 5375 aa, Homo sapiens
MAGYLSPAAYLYVEEQEYLQAYEDVLERYKDERDKVQKKTFTKWINQHLMKVRKHVNDLYEDLRDGHNLISLLEVLSGDTLPREKGRMRFHRLQNVQIALDYLKRRQVKLVNIRNDDITDGNPKLTLGLIWTIILHFQISDIHVTGESEDMSAKERLLLWTQQATEGYAGIRCENFTTCWRDGKLFNAIIHKYRPDLIDMNTVAVQSNLANLEHAFYVAEKIGVIRLLDPEDVDVSSPDEKSVITYVSSLYDAFPKVPEGGEGIGANDVEVKWIEYQNMVNYLIQWIRHHVTTMSERTFPNNPVELKALYNQYLQFKETEIPPKETEKSKIKRLYKLLEIWIEFGRIKLLQGYHPNDIEKEWGKLIIAMLEREKALRPEVERLEMLQQIANRVQRDSVICEDKLILAGNALQSDSKRLESGVQFQNEAEIAGYILECENLLRQHVIDVQILIDGKYYQADQLVQRVAKLRDEIMALRNECSSVYSKGRILTTEQTKLMISGITQSLNSGFAQTLHPSLTSGLTQSLTPSLTSSSMTSGLSSGMTSRLTPSVTPAYTPGFPSGLVPNFSSGVEPNSLQTLKLMQIRKPLLKSSLLDQNLTEEEINMKFVQDLLNWVDEMQVQLDRTEWGSDLPSVESHLENHKNVHRAIEEFESSLKEAKISEIQMTAPLKLTYAEKLHRLESQYAKLLNTSRNQERHLDTLHNFVSRATNELIWLNEKEEEEVAYDWSERNTNIARKKDYHAELMRELDQKEENIKSVQEIAEQLLLENHPARLTIEAYRAAMQTQWSWILQLCQCVEQHIKENTAYFEFFNDAKEATDYLRNLKDAIQRKYSCDRSSSIHKLEDLVQESMEEKEELLQYKSTIANLMGKAKTIIQLKPRNSDCPLKTSIPIKAICDYRQIEITIYKDDECVLANNSHRAKWKVISPTGNEAMVPSVCFTVPPPNKEAVDLANRIEQQYQNVLTLWHESHINMKSVVSWHYLINEIDRIRASNVASIKTMLPGEHQQVLSNLQSRFEDFLEDSQESQVFSGSDITQLEKEVNVCKQYYQELLKSAEREEQEESVYNLYISEVRNIRLRLENCEDRLIRQIRTPLERDDLHESVFRITEQEKLKKELERLKDDLGTITNKCEEFFSQAAASSSVPTLRSELNVVLQNMNQVYSMSSTYIDKLKTVNLVLKNTQAAEALVKLYETKLCEEEAVIADKNNIENLISTLKQWRSEVDEKRQVFHALEDELQKAKAISDEMFKTYKERDLDFDWHKEKADQLVERWQNVHVQIDNRLRDLEGIGKSLKYYRDTYHPLDDWIQQVETTQRKIQENQPENSKTLATQLNQQKMLVSEIEMKQSKMDECQKYAEQYSATVKDYELQTMTYRAMVDSQQKSPVKRRRMQSSADLIIQEFMDLRTRYTALVTLMTQYIKFAGDSLKRLEEEEKSLEEEKKEHVEKAKELQKWVSNISKTLKDAEKAGKPPFSKQKISSEEISTKKEQLSEALQTIQLFLAKHGDKMTDEERNELEKQVKTLQESYNLLFSESLKQLQESQTSGDVKVEEKIVAERQQEYKEKLQGICDLLTQTENRLIGHQEAFMIGDGTVELKKYQSKQEELQKDMQGSAQALAEVVKNTENFLKENGEKLSQEDKALIEQKLNEAKIKCEQLNLKAEQSKKELDKVVTTAIKEETEKVAAVKQLEESKTKIENLLDWLSNVDKDSERAGTKHKQVIEQNGTHFQEGDGKSAIGEEDEVNGNLLETDVDGQVGTTQENLNQQYQKVKAQHEKIISQHQAVIIATQSAQVLLEKQGQYLSPEEKEKLQKNMKELKVHYETALAESEKKMKLTHSLQEELEKFDADYTEFEHWLQQSEQELENLEAGADDINGLMTKLKRQKSFSEDVISHKGDLRYITISGNRVLEAAKSCSKRDGGKVDTSATHREVQRKLDHATDRFRSLYSKCNVLGNNLKDLVDKYQHYEDASCGLLAGLQACEATASKHLSEPIAVDPKNLQRQLEETKALQGQISSQQVAVEKLKKTAEVLLDARGSLLPAKNDIQKTLDDIVGRYEDLSKSVNERNEKLQITLTRSLSVQDGLDEMLDWMGNVESSLKEQGQVPLNSTALQDIISKNIMLEQDIAGRQSSINAMNEKVKKFMETTDPSTASSLQAKMKDLSARFSEASHKHKETLAKMEELKTKVELFENLSEKLQTFLETKTQALTEVDVPGKDVTELSQYMQESTSEFLEHKKHLEVLHSLLKEISSHGLPSDKALVLEKTNNLSKKFKEMEDTIKEKKEAVTSCQEQLDAFQVLVKSLKSWIKETTKKVPIVQPSFGAEDLGKSLEDTKKLQEKWSLKTPEIQKVNNSGISLCNLISAVTTPAKAIAAVKSGGAVLNGEGTATNTEEFWANKGLTSIKKDMTDISHGYEDLGLLLKDKIAELNTKLSKLQKAQEESSAMMQWLQKMNKTATKWQQTPAPTDTEAVKTQVEQNKSFEAELKQNVNKVQELKDKLTELLEENPDTPEAPRWKQMLTEIDSKWQELNQLTIDRQQKLEESSNNLTQFQTVEAQLKQWLVEKELMVSVLGPLSIDPNMLNTQRQQVQILLQEFATRKPQYEQLTAAGQGILSRPGEDPSLRGIVKEQLAAVTQKWDSLTGQLSDRCDWIDQAIVKSTQYQSLLRSLSDKLSDLDNKLSSSLAVSTHPDAMNQQLETAQKMKQEIQQEKKQIKVAQALCEDLSALVKEEYLKAELSRQLEGILKSFKDVEQKAENHVQHLQSACASSHQFQQMSRDFQAWLDTKKEEQNKSHPISAKLDVLESLIKDHKDFSKTLTAQSHMYEKTIAEGENLLLKTQGSEKAALQLQLNTIKTNWDTFNKQVKERENKLKESLEKALKYKEQVETLWPWIDKCQNNLEEIKFCLDPAEGENSIAKLKSLQKEMDQHFGMVELLNNTANSLLSVCEIDKEVVTDENKSLIQKVDMVTEQLHSKKFCLENMTQKFKEFQEVSKESKRQLQCAKEQLDIHDSLGSQAYSNKYLTMLQTQQKSLQALKHQVDLAKRLAQDLVVEASDSKGTSDVLLQVETIAQEHSTLSQQVDEKCSFLETKLQGIGHFQNTIREMFSQFAEFDDELDSMAPVGRDAETLQKQKETIKAFLKKLEALMASNDNANKTCKMMLATEETSPDLVGIKRDLEALSKQCNKLLDRAQAREEQVEGTIKRLEEFYSKLKEFSILLQKAEEHEESQGPVGMETETINQQLNMFKVFQKEEIEPLQGKQQDVNWLGQGLIQSAAKSTSTQGLEHDLDDVNARWKTLNKKVAQRAAQLQEALLHCGRFQDALESLLSWMVDTEELVANQKPPSAEFKVVKAQIQEQKLLQRLLDDRKSTVEVIKREGEKIATTAEPADKVKILKQLSLLDSRWEALLNKAETRNRQLEGISVVAQQFHETLEPLNEWLTTIEKRLVNCEPIGTQASKLEEQIAQHKVLQEDILLRKQNVDQALLNGLELLKQTTGDEVLIIQDKLEAIKARYKDITKLSTDVAKTLEQALQLARRLHSTHEELCTWLDKVEVELLSYETQVLKGEEASQAQMRPKELKKEAKNNKALLDSLNEVSSALLELVPWRAREGLEKMVAEDNERYRLVSDTITQKVEEIDAAILRSQQFDQAADAELSWITETEKKLMSLGDIRLEQDQTSAQLQVQKTFTMEILRHKDIIDDLVKSGHKIMTACSEEEKQSMKKKLDKVLKNYDTICQINSERYLQLERAQSLVNQFWETYEELWPWLTETQSIISQLPAPALEYETLRQQQEEHRQLRELIAEHKPHIDKMNKTGPQLLELSPGEGFSIQEKYVAADTLYSQIKEDVKKRAVALDEAISQSTQFHDKIDQILESLERIVERLRQPPSISAEVEKIKEQISENKNVSVDMEKLQPLYETLKQRGEEMIARSGGTDKDISAKAVQDKLDQMVFIWENIHTLVEEREAKLLDVMELAEKFWCDHMSLIVTIKDTQDFIRDLEDPGIDPSVVKQQQEAAETIREEIDGLQEELDIVINLGSELIAACGEPDKPIVKKSIDELNSAWDSLNKAWKDRIDKLEEAMQAAVQYQDGLQAVFDWVDIAGGKLASMSPIGTDLETVKQQIEELKQFKSEAYQQQIEMERLNHQAELLLKKVTEESDKHTVQDPLMELKLIWDSLEERIINRQHKLEGALLALGQFQHALDELLAWLTHTEGLLSEQKPVGGDPKAIEIELAKHHVLQNDVLAHQSTVEAVNKAGNDLIESSAGEEASNLQNKLEVLNQRWQNVLEKTEQRKQQLDGALRQAKGFHGEIEDLQQWLTDTERHLLASKPLGGLPETAKEQLNVHMEVCAAFEAKEETYKSLMQKGQQMLARCPKSAETNIDQDINNLKEKWESVETKLNERKTKLEEALNLAMEFHNSLQDFINWLTQAEQTLNVASRPSLILDTVLFQIDEHKVFANEVNSHREQIIELDKTGTHLKYFSQKQDVVLIKNLLISVQSRWEKVVQRLVERGRSLDDARKRAKQFHEAWSKLMEWLEESEKSLDSELEIANDPDKIKTQLAQHKEFQKSLGAKHSVYDTTNRTGRSLKEKTSLADDNLKLDDMLSELRDKWDTICGKSVERQNKLEEALLFSGQFTDALQALIDWLYRVEPQLAEDQPVHGDIDLVMNLIDNHKAFQKELGKRTSSVQALKRSARELIEGSRDDSSWVKVQMQELSTRWETVCALSISKQTRLEAALRQAEEFHSVVHALLEWLAEAEQTLRFHGVLPDDEDALRTLIDQHKEFMKKLEEKRAELNKATTMGDTVLAICHPDSITTIKHWITIIRARFEEVLAWAKQHQQRLASALAGLIAKQELLEALLAWLQWAETTLTDKDKEVIPQEIEEVKALIAEHQTFMEEMTRKQPDVDKVTKTYKRRAADPSSLQSHIPVLDKGRAGRKRFPASSLYPSGSQTQIETKNPRVNLLVSKWQQVWLLALERRRKLNDALDRLEELREFANFDFDIWRKKYMRWMNHKKSRVMDFFRRIDKDQDGKITRQEFIDGILSSKFPTSRLEMSAVADIFDRDGDGYIDYYEFVAALHPNKDAYKPITDADKIEDEVTRQVAKCKCAKRFQVEQIGDNKYRFFLGNQFGDSQQLRLVRILRSTVMVRVGGGWMALDEFLVKNDPCRVHHHGSKMLRSESNSSITTTQPTIAKGRTNMELREKFILADGASQGMAAFRPRGRRSRPSSRGASPNRSTSVSSQAAQAASPQVPATTTPKGTPIQGSKLRLPGYLSGKGFHSGEDSGLITTAAARVRTQFADSKKTPSRPGSRAGSKAGSRASSRRGSDASDFDISEIQSVCSDVETVPQTHRPTPRAGSRPSTAKPSKIPTPQRKSPASKLDKSSKR

SEQ ID NO: 13037 - protein, 255 aa, Homo sapiens
MILNKALLLGALALTAVMSPCGGEDIVADHVASYGVNFYQSHGPSGQYTHEFDGDEEFYVDLETKETVWQLPMFSKFISFDPQSALRNMAVGKHTLEFMMRQSNSTAATNEVPEVTVFSKFPVTLGQPNTLICLVDNIFPPVVNITWLSNGHSVTEGVSETSFLSKSDHSFFKISYLTFLPSADEIYDCKVEHWGLDEPLLKHWEPEIPAPMSELTETLVCALGLSVGLMGIVVGTVFIIQGLRSVGASRHQGLL

SEQ ID NO: 13038 - protein, 494 aa, Homo sapiens
MLPKRRRARVGSPSGDAASSTPPSTRFPGVAIYLVEPRMGRSRRAFLTGLARSKGFRVLDACSSEATHVVMEETSAEEAVSWQERRMAAAPPGCTPPALLDISWLTESLGAGQPVPVECRHRLEVAGPRKGPLSPAWMPAYACQRPTPLTHHNTGLSEALEILAEAAGFEGSEGRLLTFCRAASVLKALPSPVTTLSQLQGLPHFGEHSSRVVQELLEHGVCEEVERVRRSERYQTMKLFTQIFGVGVKTADRWYREGLRTLDDLREQPQKLTQQQKAGLQHHQDLSTPVLRSDVDALQQVVEEAVGQALPGATVTLTGGFRRGKLQGHDVDFLITHPKEGQEAGLLPRVMCRLQDQGLILYHQHQHSCCESPTRLAQQSHMDAFERSFCIFRLPQPPGAAVGGSTRPCPSWKAVRVDLVVAPVSQFPFALLGWTGSKLFQRELRRFSRKEKGLWLNSHGLFDPEQKTFFQAASEEDIFRHLGLEYLPPEQRNA

SEQ ID NO: 13039 - protein, 457 aa, Homo sapiens
MLPKRRRARVGSPSGDAASSTPPSTRFPGVAIYLVEPRMGRSRRAFLTGLARSKGFRVLDACSSEATHVVMEETSAEEAVSWQERRMAAAPPGCTPPALLDISWLTESLGAGQPVPVECRHRLEVAGPRKGPLSPAWMPAYACQRPTPLTHHNTGLSEALEILAEAAGFEGSEGRLLTFCRAASVLKALPSPVTTLSQLQGLPHFGEHSSRVVQELLEHGVCEEVERVRRSERYQTMKLFTQIFGVGVKTADRWYREGLRTLDDLREQPQKLTQQQKAAPPGPEHPSPAVRCRCPAAGGGGSCGAGPAWGHRHADRRLPQGLILYHQHQHSCCESPTRLAQQSHMDAFERSFCIFRLPQPPGAAVGGSTRPCPSWKAVRVDLVVAPVSQFPFALLGWTGSKLFQRELRRFSRKEKGLWLNSHGLFDPEQKTFFQAASEEDIFRHLGLEYLPPEQRNA

SEQ ID NO: 13040 - protein, 508 aa, Homo sapiens
MLPKRRRARVGSPSGDAASSTPPSTRFPGVAIYLVEPRMGRSRRAFLTGLARSKGFRVLDACSSEATHVVMEETSAEEAVSWQERRMAAAPPGCTPPALLDISWLTESLGAGQPVPVECRHRLEVAGPRKGPLSPAWMPAYACQRPTPLTHHNTGLSEALEILAEAAGFEGSEGRLLTFCRAASVLKALPSPVTTLSQLQGLPHFGEHSSRVVQELLEHGVCEEVERVRRSERAPAPPGPEHPSPAVRCRCPAAGGGGSCGAGPAWGHRHADRRLPQGLILYHQHQHSCCESPTRLAQQSHMDAFERSFCIFRLPQPPGAAVGGSTRPCPSWKAVRVDLVVAPVSQFPFALLGWTGSKLFQRELRRFSRKEKGLWLNSHGLFDPEQGSSSGKTPRSRKSCFCCRRHFSKRLQRKTSSDTWALSTFLQSRETPEPACVPHFHSGNWAAPNLATECLQADMLPPDPHLHPSPPRPGSSGGQLCLQDQLSPCWCAAGCDEVGALSASLITV

SEQ ID NO: 13041 - protein, 168 aa, Homo sapiens
MAEGSRIPQARALLQQCLHARLQIRPADGDVAAQWVEVQRGLVIYVCFFKGADKELLPKMVNTLLNVKLSETENGKHVSILDLPGNILIIPQATLGGRLKGRNMQYHSNSGKEEGFELYSQFVTLCEKEVAANSKCAEARVVVEHGTYGNRQVLKLDTNGPFTHLIEF

SEQ ID NO: 13042 - protein, 268 aa, Homo sapiens
MSWKMALQIPGGFWAAAVTVMLVMLSTPVAEARDFPKDFLVQFKGMCYFTNGTERVRGVARYIYNREEYGRFDSDVGEFQAVTELGRSIEDWNNYKDFLEQERAAVDKVCRHNYEAELRTTLQRQVEPTVTISPSRTEALNHHNLLVCSVTDFYPAQIKVRWFRNDQEETAGVVSTSLIRNGDWTFQILVMLEITPQRGDIYTCQVEHPSLQSPITVEWRAQSESAQSKMLSGIGGFVLGLIFLGLGLIIRHRGQKGPRGPPPAGLLH

SEQ ID NO: 13043 - protein, 227 aa, Homo sapiens
MALQIPGGFWAAAVTVMLVMLSTPVAEARDFPKDFLVQFKGMCYFTNGTERVRGVARYIYNREEYGRFDSDVGEFQAVTELGRSIEDWNNYKDFLEQERAAVDKVCRHNYEAELRTTLQRQVEPTVTISPSRTEALNHHNLLVCSVTDFYPAQIKVRWFRNDQEETAGVVSTSLIRNGDWTFQILVMLEITPQRGDIYTCQVEHPSLQSPITVEWRPRGPPPAGLLH

SEQ ID NO: 13044 - protein, 209 aa, Homo sapiens
MKAVVQRVTRASVTVGGEQISAIGRGICVLLGISLEDTQKELEHMVRKILNLRVFEDESGKHWSKSVMDKQYEILCVSQFTLQCVLKGNKPDFHLAMPTEQAEGFYNSFLEQLRKTYRPELIKDGKFGAYMQVHIQNDGPVTIELESPAPGTATSDPKQLSKLEKQQQRKEKTRAKGPSESSKERNTPRKEDRSASSGAEGDVSSEREP

SEQ ID NO: 13045 - protein, 142 aa, Homo sapiens
MATSIGVSFSVGDGVPEAEKNAGEPENTYILRPVFQQRFRPSVVKDCIHAVLKEELANAEYSPEEMPQLTKHLSENIKDKLKEMGFDRYKMVVQVVIGEQRGEGVFMASRCFWDADTDNYTHDVFMNDSLFCVVAAFGCFYY

SEQ ID NO: 13046 - protein, 874 aa, Homo sapiens
MEVLREKVEEEEEAEREEAAEWAEWARMEKMMRPVEVRKEEITLKQETLRDLEKKLSEIQITVSAELPAFTKDTIDISKLPISYKTNTPKEEHLLQVADNFSRQYSHLCPDRVPLFLHPLNECEVPKFVSTTLRPTLMPYPELYNWDSCAQFVSDFLTMVPLPDPLKPPSHLYSSTTVLKYQKGNCFDFSTLLCSMLIGSGYDAYCVNGYGSLDLCHMDLTREVCPLTVKPKETIKKEEKVLPKKYTIKPPRDLCSRFEQEQEVKKQQEIRAQEKKRLREEEERLMEAEKAKPDALHGLRVHSWVLVLSGKREVPENFFIDPFTGHSYSTQDEHFLGIESLWNHKNYWINMQDCWNCCKDLIFDLGDPVRWEYMLLGTDKSQLSLTEEDDSGINDEDDVENLGKEDEDKSFDMPHSWVEQIEISPEAFETRCPNGKKVIQYKRAKLEKWAPYLNSNGLVSRLTTYEDLQCTNILEIKEWYQNREDMLELKHINKTTDLKTDYFKPGHPQALRVHSYKSMQPEMDRVIEFYETARVDGLMKREETPRTMTEYYQGRPDFLSYRHASFGPRVKKLTLSSAESNPRPIVKITERFFRNPAKPAEEDVAERVFLVAEERIQLRYHCREDHITASKREFLRRTEVDSKGNKIIMTPDMCISFEVEPMEHTKKLLYQYEAMMHLKREEKLSRHQVWESELEVLEILKLREEEEAAHTLTISIYDTKRNEKSKEYREAMERMMHEEHLRQVETQLDYLAPFLAQLPPGEKLTCWQAVRLKDECLSDFKQRLINKANLIQARFEKETQELQKKQQWYQENQVTLTPEDEDLYLSYCSQAMFRIRILEQRLNRHKELAPLKYLALEEKLYKDPRLGELQKIFA

SEQ ID NO: 13047 - protein, 809 aa, Homo sapiens
MEVLREKVEEEEEAEREEAAEWAEWARMEKMMRPVEVRKEEITLKQETLRDLEKKLSEIQITVSAELPAFTKDTIDISKLPISYKTNTPKEEHLLQVADNFSRQYSHLCPDRVPLFLHPLNECEVPKFVSTTLRPTLMPYPELYNWDSCAQFVSDFLTMVPLPDPLKPTIKKEEKVLPKKYTIKPPRDLCSRFEQEQEVKKQQEIRAQEKKRLREEEERLMEAEKAKPDALHGLRVHSWVLVLSGKREVPENFFIDPFTGHSYSTQDEHFLGIESLWNHKNYWINMQDCWNCCKDLIFDLGDPVRWEYMLLGTDKSQLSLTEEDDSGINDEDDVENLGKEDEDKSFDMPHSWVEQIEISPEAFETRCPNGKKVIQYKRAKLEKWAPYLNSNGLVSRLTTYEDLQCTNILEIKEWYQNREDMLELKHINKTTDLKTDYFKPGHPQALRVHSYKSMQPEMDRVIEFYETARVDGLMKREETPRTMTEYYQGRPDFLSYRHASFGPRVKKLTLSSAESNPRPIVKITERFFRNPAKPAEEDVAERVFLVAEERIQLRYHCREDHITASKREFLRRTEVDSKGNKIIMTPDMCISFEVEPMEHTKKLLYQYEAMMHLKREEKLSRHQVWESELEVLEILKLREEEEAAHTLTISIYDTKRNEKSKEYREAMERMMHEEHLRQVETQLDYLAPFLAQLPPGEKLTCWQAVRLKDECLSDFKQRLINKANLIQARFEKETQELQKKQQWYQENQVTLTPEDEDLYLSYCSQAMFRIRILEQRLNRHKELAPLKYLALEEKLYKDPRLGELQKIFA

SEQ ID NO: 13048 - protein, 113 aa, Homo sapiens
MSAIQNLHSFDPFADASKGDDLLPAGTEDYIHIRIQQRNGRKTLTTVQGIADDYDKKKLVKAFKKKFACNGTVIEHPEYGEVIQLQGDQRKNICQFLVEIGLAKDDQLKVHGF

SEQ ID NO: 13049 - protein, 378 aa, Homo sapiens
MATVIHNPLKALGDQFYKEAIEHCRSYNSRLCAERSVRLPFLDSQTGVAQNNCYIWMEKRHRGPGLAPGQLYTYPARCWRKKRRLHPPEDPKLRLLEIKPEVELPLKKDGFTSESTTLEALLRGEGVEKKVDAREEESIQEIQRVLENDENVEEGNEEEDLEEDIPKRKNRTRGRARGSAGGRRRHDAASQEDHDKPYVCDICGKRYKNRPGLSYHYAHTHLASEEGDEAQDQETRSPPNHRNENHRPQKGPDGTVIPNNYCDFCLGGSNMNKKSGRPEELVSCADCGRSGHPTCLQFTLNMTEAVKTYKWQCIECKSCILCGTSENDDQLLFCDDCDRGYHMYCLNPPVAEPPEGSWSCHLCWELLKEKASAFGCQA

SEQ ID NO: 13050 - protein, 357 aa, Homo sapiens
MATVIHNPLKALGDQFYKEAIEHCRSYNSRLCAERSVRLPFLDSQTGVAQNNCYIWMEKRHRGPGLAPGQLYTYPARCWRKKRRLHPPEDPKLRLLEIKPEVELPLKKDGFTSESTTLEALLRGEGVEKKVDAREEESIQEIQRVLENDENVEEGNEEEDLEEDIPKRKNRTRGRARGSAGGRRRHDAASQEDHDKPYVCDICGKRYKNRPGLSYHYAHTHLASEEGDEAQDQETRSPPNHRNENHRPQKGPDGTVIPNNYCDFCLGGSNMNKKSGRPEELVSCADCGRSAHLGGEGRKEKEAAAAARTTEDLFGSTSESDTSTFHGFDEDDLEEPRSCRGRRSGRGSPTADKKGSC

SEQ ID NO: 13051 - protein, 412 aa, Homo sapiens
MFYGRINGRNFAASSLPVAFAATPLMLFLPNPQLICSFPISSRNHITGLMPPGKLKLENLFHMCTRLGDQFYKEAIEHCRSYNSRLCAERSVRLPFLDSQTGVAQNNCYIWMEKRHRGPGLAPGQLYTYPARCWRKKRRLHPPEDPKLRLLEIKPEVELPLKKDGFTSESTTLEALLRGEGVEKKVDAREEESIQEIQRVLENDENVEEGNEEEDLEEDIPKRKNRTRGRARGSAGGRRRHDAASQEDHDKPYVCDICGKRYKNRPGLSYHYAHTHLASEEGDEAQDQETRSPPNHRNENHRPQKGPDGTVIPNNYCDFCLGGSNMNKKSGRPEELVSCADCGRSAHLGGEGRKEKEAAAAARTTEDLFGSTSESDTSTFHGFDEDDLEEPRSCRGRRSGRGSPTADKKGSC

SEQ ID NO: 13052 - protein, 195 aa, Homo sapiens
MATVIHNPLKALGDQFYKEAIEHCRSYNSRLCAERSVRLPFLDSQTGVAQNNCYIWMEKRHRGPGLAPGQLYTYPARCWRKKRRLHPPEDPKLRLLEIKPEVELPLKKDGFTSESTTLEALLRGEGVEKKVDAREEESIQEIQRVLENDENVEEGNEEEDLEEDIPKRKNRTRGRARCPLPSLHCFLPSLCRDRC

SEQ ID NO: 13053 - protein, 367 aa, Homo sapiens
MGFTDLEEPISGCPGGPWALGLGDQFYKEAIEHCRSYNSRLCAERSVRLPFLDSQTGVAQNNCYIWMEKRHRGPGLAPGQLYTYPARCWRKKRRLHPPEDPKLRLLEIKPEVELPLKKDGFTSESTTLEALLRGEGVEKKVDAREEESIQEIQRVLENDENVEEGNEEEDLEEDIPKRKNRTRGRARGSAGGRRRHDAASQEDHDKPYVCDICGKRYKNRPGLSYHYAHTHLASEEGDEAQDQETRSPPNHRNENHRPQKGPDGTVIPNNYCDFCLGGSNMNKKSGRPEELVSCADCGRSAHLGGEGRKEKEAAAAARTTEDLFGSTSESDTSTFHGFDEDDLEEPRSCRGRRSGRGSPTADKKGSC

SEQ ID NO: 13054 - protein, 1029 aa, Homo sapiens
MLFRARGPVRGRGWGRPAEAPRRGRSPPWSPAWICCWALAGCQAAWAGDLPSSSSRPLPPCQEKDYHFEYTECDSSGSRWRVAIPNSAVDCSGLPDPVRGKECTFSCASGEYLEMKNQVCSKCGEGTYSLGSGIKFDEWDELPAGFSNIATFMDTVVGPSDSRPDGCNNSSWIPRGNYIESNRDDCTVSLIYAVHLKKSGYVFFEYQYVDNNIFFEFFIQNDQCQEMDTTTDKWVKLTDNGEWGSHSVMLKSGTNILYWRTTGILMGSKAVKPVLVKNITIEGVAYTSECFPCKPGTFSNKPGSFNCQVCPRNTYSEKGAKECIRCKDDSQFSEEGSSECTERPPCTTKDYFQIHTPCDEEGKTQIMYKWIEPKICREDLTDAIRLPPSGEKKDCPPCNPGFYNNGSSSCHPCPPGTFSDGTKECRPCPAGTEPALGFEYKWWNVLPGNMKTSCFNVGNSKCDGMNGWEVAGDHIQSGAGGSDNDYLILNLHIPGFKPPTSMTGATGSELGRITFVFETLCSADCVLYFMVDINRKSTNVVESWGGTKEKQAYTHIIFKNATFTFTWAFQRTNQGQDNRRFINDMVKIYSITATNAVDGVASSCRACALGSEQSGSSCVPCPPGHYIEKETNQCKECPPDTYLSIHQVYGKEACIPCGPGSKNNQDHSVCYSDCFFYHEKENQSLHYDFSNLSSVGSLMNGPSFTSKGTKYFHFFNISLCGHEGKKMALCTNNITDFTVKEIVAGSDDYTNLVGAFVCQSTIIPSESKGFRAALSSQSIILADTFIGVTVETTLKNINIKEDMFPVPTSQIPDVHFFYKSSTATTSCINGRSTAVKMRCNPTKSGAGVISVPSKCPAGTCDGCTFYFLWESAEACPLCTEHDFHEIEGACKRGFQETLYVWNEPKWCIKGISLPEKKLATCETVDFWLKVGAGVGAFTAVLLVALTCYFWKKNQKLEYKYSKLVMTTNSKECELPAADSCAIMEGEDNEEEVVYSNKQSLLGKLKSLATKEKEDHFESVQLKTSRSPNI

SEQ ID NO: 13055 - protein, 789 aa, Homo sapiens
MLEGNYQVMLKSGTNILYWRTTGILMGSKAVKPVLVKNITIEGVAYTSECFPCKPGTFSNKPGSFNCQVCPRNTYSEKGAKECIRCKDDSQFSEEGSSECTERPPCTTKDYFQIHTPCDEEGKTQIMYKWIEPKICREDLTDAIRLPPSGEKKDCPPCNPGFYNNGSSSCHPCPPGTFSDGTKECRPCPAGTEPALGFEYKWWNVLPGNMKTSCFNVGNSKCDGMNGWEVAGDHIQSGAGGSDNDYLILNLHIPGFKPPTSMTGATGSELGRITFVFETLCSADCVLYFMVDINRKSTNVVESWGGTKEKQAYTHIIFKNATFTFTWAFQRTNQGQDNRRFINDMVKIYSITATNAVDGVASSCRACALGSEQSGSSCVPCPPGHYIEKETNQCKECPPDTYLSIHQVYGKEACIPCGPGSKNNQDHSVCYSDCFFYHEKENQSLHYDFSNLSSVGSLMNGPSFTSKGTKYFHFFNISLCGHEGKKMALCTNNITDFTVKEIVAGSDDYTNLVGAFVCQSTIIPSESKGFRAALSSQSIILADTFIGVTVETTLKNINIKEDMFPVPTSQIPDVHFFYKSSTATTSCINGRSTAVKMRCNPTKSGAGVISVPSKCPAGTCDGCTFYFLWESAEACPLCTEHDFHEIEGACKRGFQETLYVWNEPKWCIKGISLPEKKLATCETVDFWLKVGAGVGAFTAVLLVALTCYFWKKNQKLEYKYSKLVMTTNSKECELPAADSCAIMEGEDNEEEVVYSNKQSLLGKLKSLATKEKEDHFESVQLKTSRSPNI

SEQ ID NO: 13056 - protein, 862 aa, Homo sapiens
MHSSWIPRGNYIESNRDDCTVSLIYAVHLKKSGYVFFEYQYVDNNIFFEFFIQNDQCQEMDTTTDKWVKLTDNGEWGSHSVMLKSGTNILYWRTTGILMGSKAVKPVLVKNITIEGVAYTSECFPCKPGTFSNKPGSFNCQVCPRNTYSEKGAKECIRCKDDSQFSEEGSSECTERPPCTTKDYFQIHTPCDEEGKTQIMYKWIEPKICREDLTDAIRLPPSGEKKDCPPCNPGFYNNGSSSCHPCPPGTFSDGTKECRPCPAGTEPALGFEYKWWNVLPGNMKTSCFNVGNSKCDGMNGWEVAGDHIQSGAGGSDNDYLILNLHIPGFKPPTSMTGATGSELGRITFVFETLCSADCVLYFMVDINRKSTNVVESWGGTKEKQAYTHIIFKNATFTFTWAFQRTNQGQDNRRFINDMVKIYSITATNAVDGVASSCRACALGSEQSGSSCVPCPPGHYIEKETNQCKECPPDTYLSIHQVYGKEACIPCGPGSKNNQDHSVCYSDCFFYHEKENQSLHYDFSNLSSVGSLMNGPSFTSKGTKYFHFFNISLCGHEGKKMALCTNNITDFTVKEIVAGSDDYTNLVGAFVCQSTIIPSESKGFRAALSSQSIILADTFIGVTVETTLKNINIKEDMFPVPTSQIPDVHFFYKSSTATTSCINGRSTAVKMRCNPTKSGAGVISVPSKCPAGTCDGCTFYFLWESAEACPLCTEHDFHEIEGACKRGFQETLYVWNEPKWCIKGISLPEKKLATCETVDFWLKVGAGVGAFTAVLLVALTCYFWKKNQKLEYKYSKLVMTTNSKECELPAADSCAIMEGEDNEEEVVYSNKQSLLGKLKSLATKEKEDHFESVQLKTSRSPNI

SEQ ID NO: 13057 - protein, 546 aa, Homo sapiens
MAAGSTTLRAVGKLQVRLATKTEPKKLEKYLQKLSALPMTADILAETGIRKTVKRLRKHQHVGDFARDLAARWKKLVLVDRNTGPDPQDPEESASRQRFGEALQEREKAWGFPENATAPRSPSHSPEHRRTARRTPPGQQRPHPRSPSREPRAERKRPRMAPADSGPHRDPPTRTAPLPMPEGPEPAVPGEQPGRGHAHAAQGGPLLGQGCQGQPQGEAVGSHSKGHKSSRGASAQKSPPVQESQSERLQAAVADSAGPKTVPSHVFSELWDPSEAWMQANYDLLSAFEAMTSQANPEALSAPTLQEEAAFPGRRVNAKMPVYSGSRPACQLQVPTLRQQCLRVPRNNPDALGDVEGVPYSALEPVLEGWTPDQPYRTEKDNAALARETDELWRIHCLQDFKEEKPQEHESWRELYLRLRDAREQRLRVVTTKIRSARENKPSGRQTKMICFNSVAKTPYDASRRQEKSAGAADPGNGEMEPAPKPAGSSQAPSGLGDGDGGSVSGGGSSNRHAAPADKTRKQAAKKVAPLMAKAIRDYKGRFSRR

SEQ ID NO: 13058 - protein, 1966 aa, Homo sapiens
MWIPTEHEKYGVVIASFRGTVPYGLSLEIGDTVQILEKCDGWYRGFALKNPNIKGIFPSSYVHLKNACVKNKGQFEMVIPTEDSVITEMTSTLRDWGTMWKQLYVRNEGDLFHRLWHIMNEILDLRRQVLVGHLTHDRMKDVKRHITARLDWGNEQLGLDLVPRKEYAMVDPEDISITELYRLMEHRHRKKDTPVQASSHHLFVQMKSLMCSNLGEELEVIFSLFDSKENRPISERFFLRLNRNGLPKAPDKPERHCSLFVDLGSSELRKDIYITVHIIRIGRMGAGEKKNACSVQYRRPFGCAVLSIADLLTGETKDDLILKVYMCNTESEWYQIHENIIKKLNARYNLTGSNAGLAVSLQLLHGDIEQIRREYSSVFSHGVSITRKLGFSNIIMPGEMRNDLYITIERGEFEKGGKSVARNVEVTMFIVDSSGQTLKDFISFGSGEPPASEYHSFVLYHNNSPRWSELLKLPIPVDKFRGAHIRFEFRHCSTKEKGEKKLFGFSFVPLMQEDGRTLPDGTHELIVHKCEENTNLQDTTRYLKLPFSKGIFLGNNNQAMKATKESFCITSFLCSTKLTQNGDMLDLLKWRTHPDKITGCLSKLKEIDGSEIVKFLQDTLDTLFGILDENSQKYGSKVFDSLVHIINLLQDSKFHHFKPVMDTYIESHFAGALAYRDLIKVLKWYVDRITEAERQEHIQEVLKAQEYIFKYIVQSRRLFSLATGGQNEEEFRCCIQELLMSVRFFLSQESKGSGALSQSQAVFLSSFPAVYSELLKLFDVREVANLVQDTLGSLPTILHVDDSLQAIKLQCIGKTVESQLYTNPDSRYILLPVVLHHLHIHLQEQKDLIMCARILSNVFCLIKKNSSEKSVLEEIDVIVASLLDILLRTILEITSRPQPSSSAMRFQFQDVTGEFVACLLSLLRQMTDRHYQQLLDSFNTKEELRDFLLQIFTVFRILIRPEMFPKDWTVMRLVANNVIITTVLYLSDALRKNFLNENFDYKIWDSYFYLAVIFINQLCLQLEMFTPSKKKKVLEKYGDMRVTMGCEIFSMWQNLGEHKLHFIPALIGPFLEVTLIPQPDLRNVMIPIFHDMMDWEQRRSGNFKQVEAKLIDKLDSLMSEGKGDETYRELFNSILLKKIERETWRESGVSLIATVTRLMERLLDYRDCMKMGEVDGKKIGCTVSLLNFYKTELNKEEMYIRYIHKLYDLHLKAQNFTEAAYTLLLYDELLEWSDRPLREFLTYPMQTEWQRKEHLHLTIIQNFDRGKCWENGIILCRKIAEQYESYYDYRNLSKMRMMEASLYDKIMDQQRLEPEFFRVGFYGKKFPFFLRNKEFVCRGHDYERLEAFQQRMLNEFPHAIAMQHANQPDETIFQAEAQYLQIYAVTPIPESQEVLQREGVPDNIKSFYKVNHIWKFRYDRPFHKGTKDKENEFKSLWVERTSLYLVQSLPGISRWFEVEKREVVEMSPLENAIEVLENKNQQLKTLISQCQTRQMQNINPLTMCLNGVIDAAVNGGVSRYQEAFFVKEYILSHPEDGEKIARLRELMLEQAQILEFGLAVHEKFVPQDMRPLHKKLVDQFFVMKSSLGIQEFSACMQASPVHFPNGSPRVCRNSAPASVSPDGTRVIPRRSPLSYPAVNRYSSSSLSSQASAEVSNITGQSESSDEVFNMQPSPSTSSLSSTHSASPNVTSSAPSSARASPLLSDKHKHSRENSCLSPRERPCSAIYPTPVEPSQRMLFNHIGDGALPRSDPNLSAPEKAVNPTPSSWSLDSGKEAKNMSDSGKLISPPVPPRPTQTASPARHTTSVSPSPAGRSPLKGSVQSFTPSPVEYHSPGLISNSPVLSGSYSSGISSLSRCSTSETSGFENQVNEQSAPLPVPVPVPVPSYGGEEPVRKESKTPPPYSVYERTLRRPVPLPHSLSIPVTSEPPALPPKPLAARSSHLENGARRTDPGPRPRPLPRKVSQL

SEQ ID NO: 13059 - protein, 1937 aa, Homo sapiens
MWIPTEHEKYGVVIASFRGTVPYGLSLEIGDTVQILEKCDGWYRGFALKNPNIKGIFPSSYVHLKNACVKNKGQFEMVIPTEDSVITEMTSTLRDWGTMWKQLYVRNEGDLFHRLWHIMNEILDLRRQVLVGHLTHDRMKDVKRHITARLDWGNEQLGLDLVPRKEYAMVDPEDISITELYRLMEHRHRKKDTPVQASSHHLFVQMKSLMCSNLGEELEVIFSLFDSKENRPISERFFLRLNRNGLPKAPDKPERHCSLFVDLGSSELRKDIYITVHIIRIGRMGAGEKKNACSVQYRRPFGCAVLSIADLLTGETKDDLILKVYMCNTESEWYQIHENIIKKLNARYNLTGSNAGLAVSLQLLHGDIEQIRREYSSVFSHGVSITRKLGFSNIIMPGEMRNDLYITIERGEFEKGGKSVARNVEVTMFIVDSSGQTLKDFISFGSGEPPASEYHSFVLYHNNSPRWSELLKLPIPVDKFRGAHIRFEFRHCSTKEKGEKKLFGFSFVPLMQEDGRTLPDGTHELIVHKCEENTNLQDTTRYLKLPFSKGIFLGNNNQAMKATKESFCITSFLCSTKLTQNGDMLDLLKWRTHPDKITGCLSKLKEIDGSEIVKFLQDTLDTLFGILDENSQKYGSKVFDSLVHIINLLQDSKFHHFKPVMDTYIESHFAGALAYRDLIKVLKWYVDRITEAERQEHIQEVLKAQEYIFKYIVQSRRLFSLATGGQNEEEFRCCIQELLMSVRFFLSQESKGSGALSQSQAVFLSSFPAVYSELLKLFDVREVANLVQDTLGSLPTILHVDDSLQAIKLQCIGKTVESQLYTNPDSRYILLPVVLHHLHIHLQEQKDLIMCARILSNVFCLIKKNSSEKSVLEEIDVIVASLLDILLRTILEITSRPQPSSSAMRFQFQDVTGEFVACLLSLLRQMTDRHYQQLLDSFNTKEELRDFLLQIFTVFRILIRPEMFPKDWTVMRLVANNVIITTVLYLSDALRKNFLNENFDYKIWDSYFYLAVIFINQLCLQLEMFTPSKKKKVLEKYGDMRVTMGCEIFSMWQNLGEHKLHFIPALIGPFLEVTLIPQPDLRNVMIPIFHDMMDWEQRRSGNFKQVEAKLIDKLDSLMSEGKGDETYRELFNSIIPLFGPYPSLLKKIERETWRESGVSLIATVTRLMERLLDYRDCMKMGEVDGKKIGCTVSLLNFYKTELNKEEMYIRYIHKLYDLHLKAQNFTEAAYTLLLYDELLEWSDRPLREFLTYPMQTEWQRKEHLHLTIIQNFDRGKCWENGIILCRKIAEQYESYYDYRNLSKMRMMEASLYDKIMDQQRLEPEFFRVGFYGKKFPFFLRNKEFVCRGHDYERLEAFQQRMLNEFPHAIAMQHANQPDETIFQAEAQYLQIYAVTPIPESQEVLQREGVPDNIKSFYKVNHIWKFRYDRPFHKGTKDKENEFKSLWVERTSLYLVQSLPGISRWFEVEKREVVEMSPLENAIEVLENKNQQLKTLISQCQTRQMQNINPLTMCLNGVIDAAVNGGVSRYQEAFFVKEYILSHPEDGEKIARLRELMLEQAQILEFGLAVHEKFVPQDMRPLHKKLVDQFFVMKSSLGIQEFSACMQASPVHFPNGSPRVCRNSAPASVSPDGTRVIPRRSPLSYPAVNRYSSSSLSSQASAEVSNITGQSESSDEVFNMQPSPSTSSLSSTHSASPNVTSSAPSSARASPLLSDKHKHSRENSCLSPRERPCSAIYPTPVEPSQRMLFNHIGDGALPRSDPNLSAPEKASPARHTTSVSPSPAGRSPLKGSVQSFTPSPVEYHSPGLISNSPVLSGSYSSGISSLSRCSTSETSGFENQVNEQSAPLPVPVPVPVPSYGGEEPVRKESKTPPPYSVYERTLRRPVPLPHSLSIPVTSEPPALPPKPLAARSSHLENGARRTDPGPRPRPLPRKVSQL

SEQ ID NO: 13060 - protein, 1975 aa, Homo sapiens
MWIPTEHEKYGVVIASFRGTVPYGLSLEIGDTVQILEKCDGWYRGFALKNPNIKGIFPSSYVHLKNACVKNKGQFEMVIPTEDSVITEMTSTLRDWGTMWKQLYVRNEGDLFHRLWHIMNEILDLRRQVLVGHLTHDRMKDVKRHITARLDWGNEQLGLDLVPRKEYAMVDPEDISITELYRLMEHRHRKKDTPVQASSHHLFVQMKSLMCSNLGEELEVIFSLFDSKENRPISERFFLRLNRNGLPKAPDKPERHCSLFVDLGSSELRKDIYITVHIIRIGRMGAGEKKNACSVQYRRPFGCAVLSIADLLTGETKDDLILKVYMCNTESEWYQIHENIIKKLNARYNLTGSNAGLAVSLQLLHGDIEQIRREYSSVFSHGVSITRKLGFSNIIMPGEMRNDLYITIERGEFEKGGKSVARNVEVTMFIVDSSGQTLKDFISFGSGEPPASEYHSFVLYHNNSPRWSELLKLPIPVDKFRGAHIRFEFRHCSTKEKGEKKLFGFSFVPLMQEDGRTLPDGTHELIVHKCEENTNLQDTTRYLKLPFSKGIFLGNNNQAMKATKESFCITSFLCSTKLTQNGDMLDLLKWRTHPDKITGCLSKLKEIDGSEIVKFLQDTLDTLFGILDENSQKYGSKVFDSLVHIINLLQDSKFHHFKPVMDTYIESHFAGALAYRDLIKVLKWYVDRITEAERQEHIQEVLKAQEYIFKYIVQSRRLFSLATGGQNEEEFRCCIQELLMSVRFFLSQESKGSGALSQSQAVFLSSFPAVYSELLKLFDVREVANLVQDTLGSLPTILHVDDSLQAIKLQCIGKTVESQLYTNPDSRYILLPVVLHHLHIHLQEQKDLIMCARILSNVFCLIKKNSSEKSVLEEIDVIVASLLDILLRTILEITSRPQPSSSAMRFQFQDVTGEFVACLLSLLRQMTDRHYQQLLDSFNTKEELRDFLLQIFTVFRILIRPEMFPKDWTVMRLVANNVIITTVLYLSDALRKNFLNENFDYKIWDSYFYLAVIFINQLCLQLEMFTPSKKKKVLEKYGDMRVTMGCEIFSMWQNLGEHKLHFIPALIGPFLEVTLIPQPDLRNVMIPIFHDMMDWEQRRSGNFKQVEAKLIDKLDSLMSEGKGDETYRELFNSIIPLFGPYPSLLKKIERETWRESGVSLIATVTRLMERLLDYRDCMKMGEVDGKKIGCTVSLLNFYKTELNKEEMYIRYIHKLYDLHLKAQNFTEAAYTLLLYDELLEWSDRPLREFLTYPMQTEWQRKEHLHLTIIQNFDRGKCWENGIILCRKIAEQYESYYDYRNLSKMRMMEASLYDKIMDQQRLEPEFFRVGFYGKKFPFFLRNKEFVCRGHDYERLEAFQQRMLNEFPHAIAMQHANQPDETIFQAEAQYLQIYAVTPIPESQEVLQREGVPDNIKSFYKVNHIWKFRYDRPFHKGTKDKENEFKSLWVERTSLYLVQSLPGISRWFEVEKREVVEMSPLENAIEVLENKNQQLKTLISQCQTRQMQNINPLTMCLNGVIDAAVNGGVSRYQEAFFVKEYILSHPEDGEKIARLRELMLEQAQILEFGLAVHEKFVPQDMRPLHKKLVDQFFVMKSSLGIQEFSACMQASPVHFPNGSPRVCRNSAPASVSPDGTRVIPRRSPLSYPAVNRYSSSSLSSQASAEVSNITGQSESSDEVFNMQPSPSTSSLSSTHSASPNVTSSAPSSARASPLLSDKHKHSRENSCLSPRERPCSAIYPTPVEPSQRMLFNHIGDGALPRSDPNLSAPEKAVNPTPSSWSLDSGKEAKNMSDSGKLISPPVPPRPTQTASPARHTTSVSPSPAGRSPLKGSVQSFTPSPVEYHSPGLISNSPVLSGSYSSGISSLSRCSTSETSGFENQVNEQSAPLPVPVPVPVPSYGGEEPVRKESKTPPPYSVYERTLRRPVPLPHSLSIPVTSEPPALPPKPLAARSSHLENGARRTDPGPRPRPLPRKVSQL

SEQ ID NO: 13061 - protein, 279 aa, Homo sapiens
MLMILSLLLFPASPLLSDKHKHSRENSCLSPRERPCSAIYPTPVEPSQRMLFNHIGDGALPRSDPNLSAPEKAVNPTPSSWSLDSGKEAKNMSDSGKLISPPVPPRPTQTASPARHTTSVSPSPAGRSPLKGSVQSFTPSPVEYHSPGLISNSPVLSGSYSSGISSLSRCSTSETSGFENQVNEQSAPLPVPVPVPVPSYGGEEPVRKESKTPPPYSVYERTLRRPVPLPHSLSIPVTSEPPALPPKPLAARSSHLENGARRTDPGPRPRPLPRKVSQL

SEQ ID NO: 13062 - protein, 397 aa, Homo sapiens
MEELQEPLRGQLRLCFTQAARTSLLLLRLNDAALRALQECQRQQVRPVIAFQGHRGYLRLPGPGWSCLFSFIVSQCCQEGAGGSLDLVCQRFLRSGPNSLHCLGSLRERLIIWAAMDSIPAPSSVQGHNLTEDARHPESWQNTGGYSEGDAVSQPQMALEEVSVSDPLASNQGQSLPGSSREHMAQWEVRSQTHVPNREPVQALPSSASRKRLDKKRSVPVATVELEEKRFRTLPLVPSPLQGLTNQDLQEGEDWEQEDEDMDPRLEHSSSVQEDSESPSPEDIPDYLLQYRAIHSAEQQHAYEQDFETDYAEYRILHARVGTASQRFIELGAEIKRVRRGTPEYKVLEDKIIQEYKKFRKQYPSYREEKRRCEYLHQKLSHIKGLILEFEEKNRGS

SEQ ID NO: 13063 - protein, 351 aa, Homo sapiens
MGLTVSFHPQYLRLPGPGWSCLFSFIVSQCCQEGAGGSLDLVCQRFLRSGPNSLHCLGSLRERLIIWAAMDSIPAPSSVQGHNLTEDARHPESWQNTGGYSEGDAVSQPQMALEEVSVSDPLASNQGQSLPGSSREHMAQWEVRSQTHVPNREPVQALPSSASRKRLDKKRSVPVATVELEEKRFRTLPLVPSPLQGLTNQDLQEGEDWEQEDEDMDPRLEHSSSVQEDSESPSPEDIPDYLLQYRAIHSAEQQHAYEQDFETDYAEYRILHARVGTASQRFIELGAEIKRVRRGTPEYKVLEDKIIQEYKKFRKQYPSYREEKRRCEYLHQKLSHIKGLILEFEEKNRGS

SEQ ID NO: 13064 - protein, 265 aa, Homo sapiens
MPSLPHSHRVMLDSVTHSTFLPNASFCDPLMSWTDLFSNEEYYPAFEHQTACDSYWTSVHPEYWTKRHVWEWLQFCCDQYKLDTNCISFCNFNISGLQLCSMTQEEFVEAAGLCGEYLYFILQNIRTQGYSFFNDAEESKATIKDYADSNCLKTSGIKSQDCHSHSRTSLQSSHLWEFVRDLLLSPEENCGILEWEDREQGIFRVVKSEALAKMWGQRKKNDRMTYEKLSRALRYYYKTGILERVDRRLVYKFGKNAHGWQEDKL

SEQ ID NO: 13065 - protein, 255 aa, Homo sapiens
MLDSVTHSTFLPNASFCDPLMSWTDLFSNEEYYPAFEHQTACDSYWTSVHPEYWTKRHVWEWLQFCCDQYKLDTNCISFCNFNISGLQLCSMTQEEFVEAAGLCGEYLYFILQNIRTQGYSFFNDAEESKATIKDYADSNCLKTSGIKSQDCHSHSRTSLQSSHLWEFVRDLLLSPEENCGILEWEDREQGIFRVVKSEALAKMWGQRKKNDRMTYEKLSRALRYYYKTGILERVDRRLVYKFGKNAHGWQEDKL

SEQ ID NO: 13066 - protein, 138 aa, Homo sapiens
MLDSVTHSTFLPNASFCDPLMSWTDLFSNEEYYPAFEHQTACDSYWTSVHPEYWTKRHVWEWLQFCCDQYKLDTNCISFCNFNISGLQLCSMTQEEFVEAAGLCGEYLYFILQNIRTQGQCSEGQTSRGGTRIRTKQL

SEQ ID NO: 13067 - protein, 160 aa, Homo sapiens
MLDSVTHSTFLPNASFCDPLMSWTDLFSNEEYYPAFEHQTDADSNCLKTSGIKSQDCHSHSRTSLQSSHLWEFVRDLLLSPEENCGILEWEDREQGIFRVVKSEALAKMWGQRKKNDRMTYEKLSRALRYYYKTGILERVDRRLVYKFGKNAHGWQEDKL

SEQ ID NO: 13068 - protein, 786 aa, Homo sapiens
MAGLTAAAPRPGVLLLLLSILHPSRPGGVPGAIPGGVPGGVFYPGAGLGALGGGALGPGGKPLKPVPGGLAGAGLGAGLGAFPAVTFPGALVPGGVADAAAAYKAAKAGAGLGGVPGVGGLGVSAGAVVPQPGAGVKPGKVPGVGLPGVYPGGVLPGARFPGVGVLPGVPTGAGVKPKAPGVGGAFAGIPGVGPFGGPQPGVPLGYPIKAPKLPGGYGLPYTTGKLPYGYGPGGVAGAAGKAGYPTGTGVGPQAAAAAAAKAAAKFGAGAAGVLPGVGGAGVPGVPGAIPGIGGIAGVGTPAAAAAAAAAAKAAKYGAAAGLVPGGPGFGPGVVGVPGAGVPGVGVPGAGIPVVPGAGIPGAAVPGVVSPEAAAKAAAKAAKYGARPGVGVGGIPTYGVGAGGFPGFGVGVGGIPGVAGVPGVGGVPGVGGVPGVGISPEAQAAAAAKAAKYGAAGAGVLGGLVPGAPGAVPGVPGTGGVPGVGTPAAAAAKAAAKAAQFGLVPGVGVAPGVGVAPGVGVAPGVGLAPGVGVAPGVGVAPGVGVAPGIGPGGVAAAAKSAAKVAAKAQLRAAAGLGAGIPGLGVGVGVPGLGVGAGVPGLGVGAGVPGFGAGADEGVRRSLSPELREGDPSSSQHLPSTPSSPRVPGALAAAKAAKYGAAVPGVLGGLGALGGVGIPGGVVGAGPAAAAAAAKAAAKAAQFGLVGAAGLGGLGVGGLGVPGVGGLGGIPPAAAAKAAKYGAAGLGGVLGGAGQFPLGGVAARPGFGLSPIFPGGACLGKACGRKRK

SEQ ID NO: 13069 - protein, 730 aa, Homo sapiens
MAGLTAAAPRPGVLLLLLSILHPSRPGGVPGAIPGGVPGGVFYPGAGLGALGGGALGPGGKPLKPVPGGLAGAGLGAGLGAFPAVTFPGALVPGGVADAAAAYKAAKAGAGLGGVPGVGGLGVSAGAVVPQPGAGVKPGKVPGVGLPGVYPGGVLPGARFPGVGVLPGVPTGAGVKPKAPGVGGAFAGIPGVGPFGGPQPGVPLGYPIKAPKLPGGYGLPYTTGKLPYGYGPGGVAGAAGKAGYPTGTGVGPQAAAAAAAKAAAKFGAGAAGVLPGVGGAGVPGVPGAIPGIGGIAGVGTPAAAAAAAAAAKAAKYGAAAGLVPGGPGFGPGVVGVPGAGVPGVGVPGAGIPVVPGAGIPGAAVPGVVSPEAAAKAAAKAAKYGARPGVGVGGIPTYGVGAGGFPGFGVGVGGIPGVAGVPGVGGVPGVGGVPGVGISPEAQAAAAAKAAKYGVGTPAAAAAKAAAKAAQFALLNLAGLVPGVGVAPGVGVAPGVGVAPGVGLAPGVGVAPGVGVAPGVGVAPGIGPGGVAAAAKSAAKVAAKAQLRAAAGLGAGIPGLGVGVGVPGLGVGAGVPGLGVGAGVPGFGAVPGALAAAKAAKYGAAVPGVLGGLGALGGVGIPGGVVGAGPAAAAAAAKAAAKAAQFGLVGAAGLGGLGVGGLGVPGVGGLGGIPPAAAAKAAKYGAAGLGGVLGGAGQFPLGGVAARPGFGLSPIFPGGACLGKACGRKRK

SEQ ID NO: 13070 - protein, 724 aa, Homo sapiens
MAGLTAAAPRPGVLLLLLSILHPSRPGGVPGAIPGGVPGGVFYPGAGLGALGGGALGPGGKPLKPVPGGLAGAGLGAGLGAFPAVTFPGALVPGGVADAAAAYKAAKAGAGLGGVPGVGGLGVSAGAVVPQPGAGVKPGKVPGVGLPGVYPGGVLPGARFPGVGVLPGVPTGAGVKPKAPGVGGAFAGIPGVGPFGGPQPGVPLGYPIKAPKLPGGYGLPYTTGKLPYGYGPGGVAGAAGKAGYPTGTGVGPQAAAAAAAKAAAKFGAGAAGVLPGVGGAGVPGVPGAIPGIGGIAGVGTPAAAAAAAAAAKAAKYGAAAGLVPGGPGFGPGVVGVPGAGVPGVGVPGAGIPVVPGAGIPGAAVPGVVSPEAAAKAAAKAAKYGARPGVGVGGIPTYGVGAGGFPGFGVGVGGIPGVAGVPGVGGVPGVGGVPGVGISPEAQAAAAAKAAKYGVGTPAAAAAKAAAKAAQFGLVPGVGVAPGVGVAPGVGVAPGVGLAPGVGVAPGVGVAPGVGVAPGIGPGGVAAAAKSAAKVAAKAQLRAAAGLGAGIPGLGVGVGVPGLGVGAGVPGLGVGAGVPGFGAVPGALAAAKAAKYGAAVPGVLGGLGALGGVGIPGGVVGAGPAAAAAAAKAAAKAAQFGLVGAAGLGGLGVGGLGVPGVGGLGGIPPAAAAKAAKYGAAGLGGVLGGAGQFPLGGVAARPGFGLSPIFPGGACLGKACGRKRK

SEQ ID NO: 13071 - protein, 757 aa, Homo sapiens
MAGLTAAAPRPGVLLLLLSILHPSRPGGVPGAIPGGVPGGVFYPGAGLGALGGGALGPGGKPLKPVPGGLAGAGLGAGLGAFPAVTFPGALVPGGVADAAAAYKAAKAGAGLGGVPGVGGLGVSAGAVVPQPGAGVKPGKVPGVGLPGVYPGGVLPGARFPGVGVLPGVPTGAGVKPKAPGVGGAFAGIPGVGPFGGPQPGVPLGYPIKAPKLPGGYGLPYTTGKLPYGYGPGGVAGAAGKAGYPTGTGVGPQAAAAAAAKAAAKFGAGAAGVLPGVGGAGVPGVPGAIPGIGGIAGVGTPAAAAAAAAAAKAAKYGAAAGLVPGGPGFGPGVVGVPGAGVPGVGVPGAGIPVVPGAGIPGAAVPGVVSPEAAAKAAAKAAKYGARPGVGVGGIPTYGVGAGGFPGFGVGVGGIPGVAGVPGVGGVPGVGGVPGVGISPEAQAAAAAKAAKYGVGTPAAAAAKAAAKAAQFGLVPGVGVAPGVGVAPGVGVAPGVGLAPGVGVAPGVGVAPGVGVAPGIGPGGVAAAAKSAAKVAAKAQLRAAAGLGAGIPGLGVGVGVPGLGVGAGVPGLGVGAGVPGFGAGADEGVRRSLSPELREGDPSSSQHLPSTPSSPRVPGALAAAKAAKYGAAVPGVLGGLGALGGVGIPGGVVGAGPAAAAAAAKAAAKAAQFGLVGAAGLGGLGVGGLGVPGVGGLGGIPPAAAAKAAKYGAAGLGGVLGGAGQFPLGGVAARPGFGLSPIFPGGACLGKACGRKRK

SEQ ID NO: 13072 - protein, 711 aa, Homo sapiens
MAGLTAAAPRPGVLLLLLSILHPSRPGGVPGAIPGGVPGGVFYPGAGLGALGGGALGPGGKPLKPVPGGLAGAGLGAGLGAFPAVTFPGALVPGGVADAAAAYKAAKAGAGLGGVPGVGGLGVSAAPSVPGAVVPQPGAGVKPGKVPGVGLPGVYPGGVLPGARFPGVGVLPGVPTGAGVKPKAPGVGGAFAGIPGVGPFGGPQPGVPLGYPIKAPKLPGGYGLPYTTGKLPYGYGPGGVAGAAGKAGYPTGTGVGPQAAAAAAAKAAAKFGAGAAGVLPGVGGAGVPGVPGAIPGIGGIAGVGTPAAAAAAAAAAKAAKYGAAAGLVPGGPGFGPGVVGVPGAGVPGVGVPGAGIPVVPGAGIPGAAVPGVVSPEAAAKAAAKAAKYGARPGVGVGGIPTYGVGAGGFPGFGVGVGGIPGVAGVPGVGGVPGVGGVPGVGISPEAQAAAAAKAAKYGVGTPAAAAAKAAAKAAQFGLVPGVGVAPGVGVAPGVGVAPGVGLAPGVGVAPGVGVAPGVGVAPGIGPGGVAAAAKSAAKVAAKAQLRAAAGLGAGIPGLGVGVGVPGLGVGAGVPGLGVGAGVPGFGAVPGALAAAKAAKYGAAVPGVLGGLGALGGVGIPGGVVGAGPAAAAAAAKAAAKAAQFGLVGAAGLGGLGVGGLGVPGVGGLGGIPPAAAAKAAKYGVAARPGFGLSPIFPGGACLGKACGRKRK

SEQ ID NO: 13073 - protein, 687 aa, Homo sapiens
MAGLTAAAPRPGVLLLLLSILHPSRPGGVPGAIPGGVPGGVFYPGAGLGALGGGALGPGGKPLKPVPGGLAGAGLGAGLGAFPAVTFPGALVPGGVADAAAAYKAAKAGAGLGGVPGVGGLGVSAGAVVPQPGAGVKPGKVPGVGLPGVYPGGVLPGARFPGVGVLPGVPTGAGVKPKAPGVGGAFAGIPGVGPFGGPQPGVPLGYPIKAPKLPGGYGLPYTTGKLPYGYGPGGVAGAAGKAGYPTGTGVGPQAAAAAAAKAAAKFGAGAAGVLPGVGGAGVPGVPGAIPGIGGIAGVGTPAAAAAAAAAAKAAKYGAAAGLVPGGPGFGPGVVGVPGAGVPGVGVPGAGIPVVPGAGIPGAAVPGVVSPEAAAKAAAKAAKYGARPGVGVGGIPTYGVGAGGFPGFGVGVGGIPGVAGVPGVGGVPGVGGVPGVGISPEAQAAAAAKAAKYGLVPGVGVAPGVGVAPGVGVAPGVGLAPGVGVAPGVGVAPGVGVAPGIGPGGVAAAAKSAAKVAAKAQLRAAAGLGAGIPGLGVGVGVPGLGVGAGVPGLGVGAGVPGFGAVPGALAAAKAAKYGAAVPGVLGGLGALGGVGIPGGVVGAGPAAAAAAAKAAAKAAQFGLVGAAGLGGLGVGGLGVPGVGGLGGIPPAAAAKAAKYGVAARPGFGLSPIFPGGACLGKACGRKRK

SEQ ID NO: 13074 - protein, 677 aa, Homo sapiens
MAGLTAAAPRPGVLLLLLSILHPSRPGGVPGAIPGGVPGGVFYPALGPGGKPLKPVPGGLAGAGLGAGLGAFPAVTFPGALVPGGVADAAAAYKAAKAGAGLGGVPGVGGLGVSAGAVVPQPGAGVKPGKVPGVGLPGVYPGGVLPGARFPGVGVLPGVPTGAGVKPKAPGVGGAFAGIPGVGPFGGPQPGVPLGYPIKAPKLPGGYGLPYTTGKLPYGYGPGGVAGAAGKAGYPTGTGVGPQAAAAAAAKAAAKFGAGAAGVLPGVGGAGVPGVPGAIPGIGGIAGVGTPAAAAAAAAAAKAAKYGAAAGLVPGGPGFGPGVVGVPGAGVPGVGVPGAGIPVVPGAGIPGAAVPGVVSPEAAAKAAAKAAKYGARPGVGVGGIPTYGVGAGGFPGFGVGVGGIPGVAGVPGVGGVPGVGGVPGVGISPEAQAAAAAKAAKYGLVPGVGVAPGVGVAPGVGVAPGVGLAPGVGVAPGVGVAPGVGVAPGIGPGGVAAAAKSAAKVAAKAQLRAAAGLGAGIPGLGVGVGVPGLGVGAGVPGLGVGAGVPGFGAVPGALAAAKAAKYGAAVPGVLGGLGALGGVGIPGGVVGAGPAAAAAAAKAAAKAAQFGLVGAAGLGGLGVGGLGVPGVGGLGGIPPAAAAKAAKYGVAARPGFGLSPIFPGGACLGKACGRKRK

SEQ ID NO: 13075 - protein, 658 aa, Homo sapiens
MAGLTAAAPRPGVLLLLLSILHPSRPGGVPGAIPGGVPGGVFYPGAGLGALGGGALGPGGKPLKPVPGGLAGAGLGAGLGAFPAVTFPGALVPGGVADAAAAYKAAKAGAGLGGVPGVGGLGVSAGAVVPQPGAGVKPGKVPGVGLPGVYPGGVLPGARFPGVGVLPGVPTGAGVKPKAPGVGGAFAGIPGVGPFGGPQPGVPLGYPIKAPKLPGYGPGGVAGAAGKAGYPTGTGVGPQAAAAAAAKAAAKFGAGAAGVLPGVGGAGVPGVPGAIPGIGGIAGVGTPAAAAAAAAAAKAAKYGAAAGLVPGGPGFGPGVVGVPGAGVPGVGVPGAGIPVVPGAGIPGAAVPGVVSPEAAAKAAAKAAKYGARPGVGVGGIPTYGVGAGGFPGFGVGVGGIPGVAGVPGVGGVPGVGGVPGVGISPEAQAAAAAKAAKYGLVPGVGVAPGVGVAPGVGVAPGVGLAPGVGVAPGVGVAPGVGVAPGIGPGGVAGAAAGLGAGIPGLGVGVGVPGLGVGAGVPGLGVGAGVPGFGAVPGALAAAKAAKYGAAVPGVLGGLGALGGVGIPGGVVGAGPAAAAAAAKAAAKAAQFGLVGAAGLGGLGVGGLGVPGVGGLGGIPPAAAAKAAKYGVAARPGFGLSPIFPGGACLGKACGRKRK

SEQ ID NO: 13076 - protein, 792 aa, Homo sapiens
MAGLTAAAPRPGVLLLLLSILHPSRPGGVPGAIPGGVPGGVFYPGAGLGALGGGALGPGGKPLKPVPGGLAGAGLGAGLGAFPAVTFPGALVPGGVADAAAAYKAAKAGAGLGGVPGVGGLGVSAGAVVPQPGAGVKPGKVPGVGLPGVYPGGVLPGARFPGVGVLPGVPTGAGVKPKAPGVGGAFAGIPGVGPFGGPQPGVPLGYPIKAPKLPGGYGLPYTTGKLPYGYGPGGVAGAAGKAGYPTGTGVGPQAAAAAAAKAAAKFGAGAAGVLPGVGGAGVPGVPGAIPGIGGIAGVGTPAAAAAAAAAAKAAKYGAAAGLVPGGPGFGPGVVGVPGAGVPGVGVPGAGIPVVPGAGIPGAAVPGVVSPEAAAKAAAKAAKYGARPGVGVGGIPTYGVGAGGFPGFGVGVGGIPGVAGVPGVGGVPGVGGVPGVGISPEAQAAAAAKAAKYGAAGAGVLGGLVPGAPGAVPGVPGTGGVPGVGTPAAAAAKAAAKAAQFALLNLAGLVPGVGVAPGVGVAPGVGVAPGVGLAPGVGVAPGVGVAPGVGVAPGIGPGGVAAAAKSAAKVAAKAQLRAAAGLGAGIPGLGVGVGVPGLGVGAGVPGLGVGAGVPGFGAGADEGVRRSLSPELREGDPSSSQHLPSTPSSPRVPGALAAAKAAKYGAAVPGVLGGLGALGGVGIPGGVVGAGPAAAAAAAKAAAKAAQFGLVGAAGLGGLGVGGLGVPGVGGLGGIPPAAAAKAAKYGAAGLGGVLGGAGQFPLGGVAARPGFGLSPIFPGGACLGKACGRKRK

SEQ ID NO: 13077 - protein, 759 aa, Homo sapiens
MAGLTAAAPRPGVLLLLLSILHPSRPGGVPGAIPGGVPGGVFYPGAGLGALGGGALGPGGKPLKPVPGGLAGAGLGAGLGAFPAVTFPGALVPGGVADAAAAYKAAKAGAGLGGVPGVGGLGVSAGAVVPQPGAGVKPGKVPGVGLPGVYPGGVLPGARFPGVGVLPGVPTGAGVKPKAPGVGGAFAGIPGVGPFGGPQPGVPLGYPIKAPKLPGGYGLPYTTGKLPYGYGPGGVAGAAGKAGYPTGTGVGPQAAAAAAAKAAAKFGAGAAGVLPGVGGAGVPGVPGAIPGIGGIAGVGTPAAAAAAAAAAKAAKYGAAAGLVPGGPGFGPGVVGVPGAGVPGVGVPGAGIPVVPGAGIPGAAVPGVVSPEAAAKAAAKAAKYGARPGVGVGGIPTYGVGAGGFPGFGVGVGGIPGVAGVPGVGGVPGVGGVPGVGISPEAQAAAAAKAAKYGAAGAGVLGGLVPGAPGAVPGVPGTGGVPGVGTPAAAAAKAAAKAAQFALLNLAGLVPGVGVAPGVGVAPGVGVAPGVGLAPGVGVAPGVGVAPGVGVAPGIGPGGVAAAAKSAAKVAAKAQLRAAAGLGAGIPGLGVGVGVPGLGVGAGVPGLGVGAGVPGFGAVPGALAAAKAAKYGAAVPGVLGGLGALGGVGIPGGVVGAGPAAAAAAAKAAAKAAQFGLVGAAGLGGLGVGGLGVPGVGGLGGIPPAAAAKAAKYGAAGLGGVLGGAGQFPLGGVAARPGFGLSPIFPGGACLGKACGRKRK

SEQ ID NO: 13078 - protein, 570 aa, Homo sapiens
MAGLTAAAPRPGVLLLLLSILHPSRPGGVPGAIPGGVPGGVFYPGAGLGALGGGALGPGGKPLKPVPGGLAGAGLGAGVGGAFAGIPGVGPFGGPQPGVPLGYPIKAPKLPGYGPGGVAGAAGKAGYPTGTGVGPQAAAAAAAKAAAKFGAGAAGVLPGVGGAGVPGVPGAIPGIGGIAGVGTPAAAAAAAAAAKAAKYGAAAGLVPGGPGFGPGVVGVPGAGVPGVGVPGAGIPVVPGAGIPGAAVPGVVSPEAAAKAAAKAAKYGARPGVGVGGIPTYGVGAGGFPGFGVGVGGIPGVAGVPGVGGVPGVGGVPGVGISPEAQAAAAAKAAKYGLVPGVGVAPGVGVAPGVGVAPGVGLAPGVGVAPGVGVAPGVGVAPGIGPGGVAAAAKSAAKVAAKAQLRAAAGLGAGIPGLGVGVGVPGLGVGAGVPGLGVGAGVPGFGAVPGALAAAKAAKYGAAVPGVLGGLGALGGVGIPGGVVGAGPAAAAAAAKAAAKAAQFGLVGAAGLGGLGVGGLGVPGVGGLGGIPPAAAAKAAKYGVAARPGFGLSPIFPGGACLGKACGRKRK

SEQ ID NO: 13079 - protein, 692 aa, Homo sapiens
MAGLTAAAPRPGVLLLLLSILHPSRPGGVPGAIPGGVPGGVFYPGAGLGALGGGALGPGGKPLKPVPGGLAGAGLGAGLGAFPAVTFPGALVPGGVADAAAAYKAAKAGAGLGGVPGVGGLGVSAAPSVPGAVVPQPGAGVKPGKVPGVGLPGVYPGGVLPGARFPGVGVLPGVPTGAGVKPKAPGVGGAFAGIPGVGPFGGPQPGVPLGYPIKAPKLPGGYGLPYTTGKLPYGYGPGGVAGAAGKAGYPTGTGVGPQAAAAAAAKAAAKFGAGAAGVLPGVGGAGVPGVPGAIPGIGGIAGVGTPAAAAAAAAAAKAAKYGAAAGLVPGGPGFGPGVVGVPGAGVPGVGVPGAGIPVVPGAGIPGAAVPGVVSPEAAAKAAAKAAKYGARPGVGVGGIPTYGVGAGGFPGFGVGVGGIPGVAGVPGVGGVPGVGGVPGVGISPEAQAAAAAKAAKYGLVPGVGVAPGVGVAPGVGVAPGVGLAPGVGVAPGVGVAPGVGVAPGIGPGGVAAAAKSAAKVAAKAQLRAAAGLGAGIPGLGVGVGVPGLGVGAGVPGLGVGAGVPGFGAVPGALAAAKAAKYGAAVPGVLGGLGALGGVGIPGGVVGAGPAAAAAAAKAAAKAAQFGLVGAAGLGGLGVGGLGVPGVGGLGGIPPAAAAKAAKYGVAARPGFGLSPIFPGGACLGKACGRKRK

SEQ ID NO: 13080 - protein, 705 aa, Homo sapiens
MAGLTAAAPRPGVLLLLLSILHPSRPGGVPGAIPGGVPGGVFYPGAGLGALGGGALGPGGKPLKPVPGGLAGAGLGAGLGAFPAVTFPGALVPGGVADAAAAYKAAKAGAGLGGVPGVGGLGVSAGAVVPQPGAGVKPGKVPGVGLPGVYPGGVLPGARFPGVGVLPGVPTGAGVKPKAPGVGGAFAGIPGVGPFGGPQPGVPLGYPIKAPKLPGGYGLPYTTGKLPYGYGPGGVAGAAGKAGYPTGTGVGPQAAAAAAAKAAAKFGAGAAGVLPGVGGAGVPGVPGAIPGIGGIAGVGTPAAAAAAAAAAKAAKYGAAAGLVPGGPGFGPGVVGVPGAGVPGVGVPGAGIPVVPGAGIPGAAVPGVVSPEAAAKAAAKAAKYGARPGVGVGGIPTYGVGAGGFPGFGVGVGGIPGVAGVPGVGGVPGVGGVPGVGISPEAQAAAAAKAAKYGLVPGVGVAPGVGVAPGVGVAPGVGLAPGVGVAPGVGVAPGVGVAPGIGPGGVAAAAKSAAKVAAKAQLRAAAGLGAGIPGLGVGVGVPGLGVGAGVPGLGVGAGVPGFGAVPGALAAAKAAKYGAAVPGVLGGLGALGGVGIPGGVVGAGPAAAAAAAKAAAKAAQFGLVGAAGLGGLGVGGLGVPGVGGLGGIPPAAAAKAAKYGAAGLGGVLGGAGQFPLGGVAARPGFGLSPIFPGGACLGKACGRKRK

SEQ ID NO: 13081 - protein, 560 aa, Homo sapiens
MVTPVTWMDNPIEVYVNDSVWVPGPTDDRCPAKPEEEGMMINISIGYHYPPICLGRAPGCLMPAVQNWLVEVPTVSPNSRFTYHMVSGMSLRPRVNCLQDFSYQRSLKFRPKGKTCPKEIPKGSKNTEVLVWEECVANSVVILQNNEFGTIIDWAPRGQFYHNCSGQTQSCPSAQVSPAVDSDLTESLDKHKHKKLQSFYLWEWEEKGISTPRPKIISPVSGPEHPELWRLTVASHHIRIWSGNQTLETRYRKPFYTIDLNSILTVPLQSCVKPPYMLVVGNIVIKPASQTITCENCRLFTCIDSTFNWQHRILLVRAREGMWIPVSTDRPWEASPSIHILTEILKGVLNRSKRFIFTLIAVIMGLIAVTATAAVAGVALHSSVQSVNFVNYWQKNSTRLWNSQSSIDQKLASQINDLRQTVIWMGDRLMTLEHHFQLQCDWNTSDFCITPQIYNESEHHWDMVRRHLQGREDNLTLDISKLKEQIFEASKAHLNLVPGTEAIAGVADGLANLNPVTWIKTIRSTMIINLILIVVCLFCLLLVCRCTQQLRRDSDIENGP

SEQ ID NO: 13082 - protein, 238 aa, Homo sapiens
MAAAPLLLLLLLVPVPLLPLLAQGPGGALGNRHAVYWNSSNQHLRREGYTVQVNVNDYLDIYCPHYNSSGVGPGAGPGPGGGAEQYVLYMVSRNGYRTCNASQGFKRWECNRPHAPHSPIKFSEKFQRYSAFSLGYEFHAGHEYYYISTPTHNLHWKCLRMKVFVCCASTSHSGEKPVPTLPQFTMGPNVKINVLEDFEGENPQVPKLEKSISGTSPKREHLPLAVGIAFFLMTFLAS

SEQ ID NO: 13083 - protein, 212 aa, Homo sapiens
MAAAPLLLLLLLVPVPLLPLLAQGPGGALGNRHAVYWNSSNQHLRREGYTVQVNVNDYLDIYCPHYNSSGVGPGAGPGPGGGAEQYVLYMVSRNGYRTCNASQGFKRWECNRPHAPHSPIKFSEKFQRYSAFSLGYEFHAGHEYYYISTPTHNLHWKCLRMKVFVCCASKDFEGENPQVPKLEKSISGTSPKREHLPLAVGIAFFLMTFLAS

SEQ ID NO: 13084 - protein, 699 aa, Homo sapiens
MNPSEMQRKAPPRRRRHRNRAPLTHKMNKMVTSEEQMKLPSTKKAEPPTWAQLKKLTQLATKYLENTKVTQTPESMLLAALMIVSMVVSLPMPAGAAVANYTNWAYVPFPPLIRAVTWMDNPIEVYVNDSVWVPGPIDDRCPAKPEEEGMMINISIGYRYPPICLGRAPGCLMPAVQNWLVEVPTVSPISRFTYHMVSGMSLRPRVNYLQDFSYQRSLKFRPKGKPCPKEIPKESKNTEVLVWEECVANSAVILQNNEFGTIIDWAPRGQFYHNCSGQTQSCPSAQVSPAVDSDLTESLDKHKHKKLQSFYPWEWGEKRISTPRPKIVSPVSGPEHPELWRLTVASHHIRIWSGNQTLETRDRKPFYTVDLNSSLTLPLQSCVKPPYMLVVGNIVIKPDSQTITCENCRLLTCIDSTFNWQHRILLVRAREGVWIPVSMDRPWEASPSVHILTEVLKGVLNRSKRFIFTLIAVIMGLIAVTATAAVAGVALHSSVQSVNFVNDGQKNSTRLWNSQSSIDQKLANQINDLRQTVIWMGDRLMSLEHRFQLQCDWNTSDFCITPQIYNDSEHHWDMVRRHLQGREDNLTLDISKLKEQIFEASKAHLNLVPGTEAIAGVADGLANLNPVTWVKTIGSTTIINLILILVCLFCLLLVCRCTQQLRRDSDHRERAMMTMAVLSKRKGGNVGKSKRDQIVTVSV

SEQ ID NO: 13085 - protein, 452 aa, Homo sapiens
MEFQAVVMAVGGGSRMTDLTSSIPKPLLPVGNKPLIWYPLNLLERVGFEEVIVVTTRDVQKALCAEFKMKMKPDIVCIPDDADMGTADSLRYIYPKLKTDVLVLSCDLITDVALHEVVDLFRAYDASLAMLMRKGQDSIEPVPGQKGKKKAVEQRDFIGVDSTGKRLLFMANEADLDEELVIKGSILQKHPRIRFHTGLVDAHLYCLKKYIVDFLMENGSITSIRSELIPYLVRKQFSSASSQQGQEEKEEDLKKKELKSLDIYSFIKEANTLNLAPYDACWNACRGDRWEDLSRSQVRCYVHIMKEGLCSRVSTLGLYMEANRQVPKLLSALCPEEPPVHSSAQIVSKHLVGVDSLIGPETQIGEKSSIKRSVIGSSCLIKDRVTITNCLLMNSVTVEEGSNIQGSVICNNAVIEKGADIKDCLIGSGQRIEAKAKRVNEVIVGNDQLMEI

SEQ ID NO: 13086 - protein, 412 aa, Homo sapiens
MEFQAVVMAVGGGSRMTDLTSSIPKPLLPVGNKPLIWYPLNLLERVGFEEVIVVTTRDVQKALCAEFKMKMKPDIVCIPDDADMGTADSLRYIYPKLKTDVLVLSCDLITDVALHEVVDLFRAYDASLAMLMRKGQDSIEPVPGQKGKKKAVEQRDFIGVDSTGKRLLFMANEADLDEELVIKGSILQKHPRIRFHTGLVDAHLYCLKKYIVDFLMENGSITSIRSELIPYLVRKQFSSASSQQGQEEKEEDLKKKELKSLDIYSFIKEANTLNLAPYDACWNACRGDRWEDLSRSQVRCYVHIMKEGLCSRVSTLGLYMEANRQVPKLLSALCPEEPPVHSSAQIVSKHLVGVDSLIGPETQIGEKSSIKRSVIGSSCLIKDRVTITNCLLMNSVTVEEGYVSPCTHLRQR

SEQ ID NO: 13087 - protein, 401 aa, Homo sapiens
MEFQAVVMAVGGGSRMTDLTSSIPKPLLPVGNKPLIWYPLNLLERVGFEEVIVVTTRDVQKALCAEFKMKMKPDIVCIPDDADMGTADSLRYIYPKLKTDVLVLSCDLITDVALHEVVDLFRAYDASLAMLMRKGQDSIEPVPGQKGKKKAVEQRDFIGVDSTGKRLLFMANEADLDEELVIKGSILQKHPRIRFHTGLVDAHLYCLKKYIVDFLMENGSITSIRSELIPYLVRKQFSSASSQQGQEEKEEDLKKKELKSLDIYSFIKEANTLNLAPYDACWNACRGDRWEDLSRSQVRCYVHIMKEGLCSRVSTLGLYMEANRQVPKLLSALCPEEPPVHSSAQIVSKHLVGVDSLIGPETQIGEKSSIKRSVIGSSCLIKDRVTITNCLLMNSVTVEEG

SEQ ID NO: 13088 - protein, 76 aa, Homo sapiens
MGAAISQGALIAIVCNGLVGFLLLLLWVILCWACHSRSADVDSLSESSPNSSPGPCPEKAPPPQKPSHEGSYLLQP

SEQ ID NO: 13089 - protein, 75 aa, Homo sapiens
MGAAISQGALIAIVCNGLVGFLLLLLWVILCWACHSRSADVDSLSESRTQESACLELDPAAQSLASLAPIGAQWP

SEQ ID NO: 13090 - protein, 858 aa, Homo sapiens
MVNFTVDQIRAIMDKKANIRNMSVIAHVDHGKSTLTDSLVCKAGIIASARAGETRFTDTRKDEQERCITIKSTAISLFYELSENDLNFIKQSKDGAGFLINLIDSPGHVDFSSEVTAALRVTDGALVVVDCVSGVCVQTETVLRQAIAERIKPVLMMNKMDRALLELQLEPEELYQTFQRIVENVNVIISTYGEGESGPMGNIMIDPVLGTVGFGSGLHGWAFTLKQFAEMYVAKFAAKGEGQLGPAERAKKVEDMMKKLWGDRYFDPANGKFSKSATSPEGKKLPRTFCQLILDPIFKVFDAIMNFKKEETAKLIEKLDIKLDSEDKDKEGKPLLKAVMRRWLPAGDALLQMITIHLPSPVTAQKYRCELLYEGPPDDEAAMGIKSCDPKGPLMMYISKMVPTSDKGRFYAFGRVFSGLVSTGLKVRIMGPNYTPGKKEDLYLKPIQRTILMMGRYVEPIEDVPCGNIVGLVGVDQFLVKTGTITTFEHAHNMRVMKFSVSPVVRVAVEAKNPADLPKLVEGLKRLAKSDPMVQCIIEESGEHIIAGAGELHLEICLKDLEEDHACIPIKKSDPVVSYRETVSEESNVLCLSKSPNKHNRLYMKARPFPDGLAEDIDKGEVSARQELKQRARYLAEKYEWDVAEARKIWCFGPDGTGPNILTDITKGVQYLNEIKDSVVAGFQWATKEGALCEENMRGVRFDVHDVTLHADAIHRGGGQIIPTARRCLYASVLTAQPRLMEPIYLVEIQCPEQVVGGIYGVLNRKRGHVFEESQVAGTPMFVVKAYLPVNESFGFTADLRSNTGGQAFPQCVFDHWQILPGDPFDNSSRPSQVVAETRKRKGLKEGIPALDNFLDKL

SEQ ID NO: 13091 - protein, 330 aa, Homo sapiens
MTPNSTGEVPSPIPKGALGLSLALASLIITANLLLALGIAWDRRLRSPPAGCFFLSLLLAGLLTGLALPTLPGLWNQSRRGYWSCLLVYLAPNFSFLSLLANLLLVHGERYMAVLRPLQPPGSIRLALLLTWAGPLLFASLPALGWNHWTPGANCSSQAIFPAPYLYLEVYGLLLPAVGAAAFLSVRVLATAHRQLQDICRLERAVCRDEPSALARALTWRQARAQAGAMLLFGLCWGPYVATLLLSVLAYEQRPPLGPGTLLSLLSLGSASAAAVPVAMGLGDQRYTAPWRAAAQRCLQGLWGRASRDSPGPSIAYHPSSQSSVDLDLN

SEQ ID NO: 13092 - protein, 699 aa, Homo sapiens
MNPSEMQRKAPPRRRRHRNRAPLTHKMNKMVTSEEQMKLPSTKKAEPPTWAQLKKLTQLATKYLENTKVTQTPESMLLAALMIVSMVVSLPMPAGAAAANYTYWAYVPFPPLIRAVTWMDNPTEVYVNDSVWVPGPIDDRCPAKPEEEGMMINISIGYHYPPICLGRAPGCLMPAVQNWLVEVPTVSPICRFTYHMVSGMSLRPRVNYLQDFSYQRSLKFRPKGKPCPKEIPKESKNTEVLVWEECVANSAVILQNNEFGTIIDWAPRGQFYHNCSGQTQSCPSAQVSPAVDSDLTESLDKHKHKKLQSFYPWEWGEKGISTPRPKIVSPVSGPEHPELWRLTVASHHIRIWSGNQTLETRDRKPFYTIDLNSSLTVPLQSCVKPPYMLVVGNIVIKPDSQTITCENCRLLTCIDSTFNWQHRILLVRAREGVWIPVSMDRPWEASPSVHILTEVLKGVLNRSKRFIFTLIAVIMGLIAVTATAAVAGVALHSSVQSVNFVNDWQKNSTRLWNSQSSIDQKLANQINDLRQTVIWMGDRLMSLEHRFQLQCDWNTSDFCITPQIYNESEHHWDMVRRHLQGREDNLTLDISKLKEQIFEASKAHLNLVPGTEAIAGVADGLANLNPVTWVKTIGSTTIINLILILVCLFCLLLVCRCTQQLRRDSDHRERAMMTMAVLSKRKGGNVGKSKRDQIVTVSV

SEQ ID NO: 13093 - protein, 584 aa, Homo sapiens
MIFAGKAPSNTSTLMKFYSLLLYSLLFSFPFLCHPLPLPSYLHHTINLTHSLLAASNPSLVNNCWLCISLSSSAYTAVPAVQTDWATSPISLHLRTSFNSPHLYPPEELIYFLDRSSKTSPDISHQQAAALLRTYLKNLSPYINSTPPIFGPLTTQTTIPVAAPLCISWQRPTGIPLGNLSPSRCSFTLHLRSPTTNINETIGAFQLHITDKPSINTDKLKNISSNYCLGRHLPCISLHPWLSSPCSSDSPPRPSSCLLIPSPENNSERLLVDTRRFLIHHENRTFPSTQLPHQSPLQPLTAAALAGSLGVWVQDTPFSTPSHLFTLHLQFCLAQGLFFLCGSSTYMCLPANWTGTCTLVFLTPKIQFANGTEELPVPLMTPTQQKRVIPLIPLMVGLGLSASTVALGTGIAGISTSVMTFRSLSNDFSASITDISQTLSVLQAQVDSLAAVVLQNRRGLDLLTAEKGGLCIFLNEECCFYLNQSGLVYDNIKKLKDRAQKLANQASNYAEPPWALSNWMSWVLPIVSPLIPIFLLLLFGPCIFRLVSQFIQNRIQAITNHSIRQMFLLTSPQYHPLPQDLPSA

SEQ ID NO: 13094 - protein, 699 aa, Homo sapiens
MNLLPKSSREFGSVDYWEKFFQQRGKKAFEWYGTYLELCGVLHKYIKPREKVLVIGCGNSELSEQLYDVGYRDIVNIDISEVVIKQMKECNATRRPQMSFLKMDMTQMEFPDASFQVVLDKGTLDAVLTDEEEKTLQQVDRMLAEVGRVLQVGGRYLCISLAQAHILKKAVGHFSREGWMVRVHQVANSQDQVLEAEPQFSLPVFAFIMTKFRPVPGSALQIFELCAQEQRKPVRLESAERLAEAVQERQQYAWLCSQLRRKARLGSVSLDLCDGDTGEPRYTLHVVDSPTVKPSRDNHFAIFIIPQGRETEWLFGMDEGRKQLAASAGFRRLITVALHRGQQYESMDHIQAELSARVMELAPAGMPTQQQVPFLSVGGDIGVRTVQHQDCSPLSGDYVIEDVQGDDKRYFRRLIFLSNRNVVQSEARLLKDVSHKAQKKRKKDRKKQRPADAEDLPAAPGQSIDKSYLCCEHHKAMIAGLALLRNPELLLEIPLALLVVGLGGGSLPLFVHDHFPKSCIDAVEIDPSMLEVATQWFGFSQSDRMKVHIADGLDYIASLAGGGEARPCYDVIMFDVDSKDPTLGMSCPPPAFVEQSFLQKVKSILTPEGVFILNLVCRDLGLKDSVLAGLKAVFPLLYVRRIEGEVNEILFCQLHPEQKLATPELLETAQALERTLRKPGRGWDDTYVLSDMLKTVKIV

SEQ ID NO: 13095 - protein, 642 aa, Homo sapiens
MNLLPKSSREFGSVDYWEKFFQQRGKKAFEWYGTYLELCGVLHKYIKPREKVLVIGCGNSELSEQLYDVGYRDIVNIDISEVVIKQMKECNATRRPQMSFLKMDMTQMEFPDASFQVVLDKGTLDAVLTDEEEKTLQQVDRMLAEVGRVLQVGGRYLCISLAQAHILKKAVGHFSREGWMVRVHQVANSQDQVLEAEPQFSLPVFAFIMTKFRPVPGSALQIFELCAQEQRKPVRLESAERLAEAVQERQQYAWLCSQLRRKARLGSVSLDLCDGDTGEPRYTLHVVDSPTVKPSRDNHFAIFIIPQGRETEWLFGMDEGRKQLAASAGFRRLITVALHRGQQYESMDHIQAELSARVMELAPAGMPTQQQVPFLSVGGDIGVRTVQHQDCSPLSGDYVIEDVQGDDKRYFRRLIFLSNRNVVQSEARLLKDVSHKAQKKRKKDRKKQRPADAEDLPAAPGQSIDKSYLCCEHHKAMIAGLALLRNPELLLEIPLALLVVGLGGGSLPLFVHDHFPKSCIDAVEIDPSMLEVATQWFGFSQSDRMKVHIADGLDYIASLAGGGEARPCYDVIMFDVDSKDPTLGMSCPPPAFVEQSFLQKVKSILTPEGVFILNLVCRDLGLKDSVLAGLKAVFPLLYVRRI

SEQ ID NO: 13096 - protein, 613 aa, Homo sapiens
MKECNATRRPQMSFLKMDMTQMEFPDASFQVVLDKGTLDAVLTDEEEKTLQQVDRMLAEVGRVLQVGGRYLCISLAQAHILKKAVGHFSREGWMVRVHQVANSQDQVLEAEPQFSLPVFAFIMTKFRPVPGSALQIFELCAQEQRKPVRLESAERLAEAVQERQQYAWLCSQLRRKARLGSVSLDLCDGDTGEPRYTLHVVDSPTVKPSRDNHFAIFIIPQGRETEWLFGMDEGRKQLAASAGFRRLITVALHRGQQYESMDHIQAELSARVMELAPAGMPTQQQVPFLSVGGDIGVRTVQHQDCSPLSGDYVIEDVQGDDKRYFRRLIFLSNRNVVQSEARLLKDVSHKAQKKRKKDRKKQRPADAEDLPAAPGQSIDKSYLCCEHHKAMIAGLALLRNPELLLEIPLALLVVGLGGGSLPLFVHDHFPKSCIDAVEIDPSMLEVATQWFGFSQSDRMKVHIADGLDYIASLAGGGEARPCYDVIMFDVDSKDPTLGMSCPPPAFVEQSFLQKVKSILTPEGVFILNLVCRDLGLKDSVLAGLKAVFPLLYVRRIEGEVNEILFCQLHPEQKLATPELLETAQALERTLRKPGRGWDDTYVLSDMLKTVKIV

SEQ ID NO: 13097 - protein, 543 aa, Homo sapiens
MNLLPKSSREFGSVDYWEKFFQQRGKKAFEWYGTYLELCGVLHKYIKPREKVLVIGCGNSELSEQLYDVGYRDIVNIDISEVVIKQMKECNATRRPQMSFLKMDMTQMEFPDASFQVVLDKGTLDAVLTDEEEKTLQQVDRMLAEVGRVLQGRETEWLFGMDEGRKQLAASAGFRRLITVALHRGQQYESMDHIQAELSARVMELAPAGMPTQQQVPFLSVGGDIGVRTVQHQDCSPLSGDYVIEDVQGDDKRYFRRLIFLSNRNVVQSEARLLKDVSHKAQKKRKKDRKKQRPADAEDLPAAPGQSIDKSYLCCEHHKAMIAGLALLRNPELLLEIPLALLVVGLGGGSLPLFVHDHFPKSCIDAVEIDPSMLEVATQWFGFSQSDRMKVHIADGLDYIASLAGGGEARPCYDVIMFDVDSKDPTLGMSCPPPAFVEQSFLQKVKSILTPEGVFILNLVCRDLGLKDSVLAGLKAVFPLLYVRRIEGEVNEILFCQLHPEQKLATPELLETAQALERTLRKPGRGWDDTYVLSDMLKTVKIV

SEQ ID NO: 13098 - protein, 396 aa, Homo sapiens
MKECNATRRPQMSFLKMDMTQMEFPDASFQVVLDKGTLDAVLTDEEEKTLQQVDRMLAEVGRVLQVGGRYLCISLAQAHILKKAVGHFSREGWMVRVHQVANSQDQVLEAEPQFSLPVFAFIMTKFRPVPGSALQIFELCAQEQRKPVRLESAERLAEAVQERQQYAWLCSQLRRKARLGSVSLDLCDGDTGEPRYTLHVVDSLPLFVHDHFPKSCIDAVEIDPSMLEVATQWFGFSQSDRMKVHIADGLDYIASLAGGGEARPCYDVIMFDVDSKDPTLGMSCPPPAFVEQSFLQKVKSILTPEGVFILNLVCRDLGLKDSVLAGLKAVFPLLYVRRIEGEVNEILFCQLHPEQKLATPELLETAQALERTLRKPGRGWDDTYVLSDMLKTVKIV

SEQ ID NO: 13099 - protein, 310 aa, Homo sapiens
MAGAAPTTAFGQAVIGPPGSGKTTYCLGMSEFLRALGRRVAVVNLDPANEGLPYECAVDVGELVGLGDVMDALRLGPNGGLLYCMEYLEANLDWLRAKLDPLRGHYFLFDCPGQVELCTHHGALRSIFSQMAQWDLRLTAVHLVDSHYCTDPAKFISVLCTSLATMLHVELPHINLLSKMDLIEHYGKLAFNLDYYTEVLDLSYLLDHLASDPFFRHYRQLNEKLVQLIEDYSLVSFIPLNIQDKESIQRVLQAVDKANGYCFRAQEQRSLEAMMSAAMGADFHFSSTLGIQEKYLAPSNQSVEQEAMQL

SEQ ID NO: 13100 - protein, 1308 aa, Homo sapiens
MKPATGLWVWVSLLVAAGTVQPSDSQSVCAGTENKLSSLSDLEQQYRALRKYYENCEVVMGNLEITSIEHNRDLSFLRSVREVTGYVLVALNQFRYLPLENLRIIRGTKLYEDRYALAIFLNYRKDGNFGLQELGLKNLTEILNGGVYVDQNKFLCYADTIHWQDIVRNPWPSNLTLVSTNGSSGCGRCHKSCTGRCWGPTENHCQTLTRTVCAEQCDGRCYGPYVSDCCHRECAGGCSGPKDTDCFACMNFNDSGACVTQCPQTFVYNPTTFQLEHNFNAKYTYGAFCVKKCPHNFVVDSSSCVRACPSSKMEVEENGIKMCKPCTDICPKACDGIGTGSLMSAQTVDSSNIDKFINCTKINGNLIFLVTGIHGDPYNAIEAIDPEKLNVFRTVREITGFLNIQSWPPNMTDFSVFSNLVTIGGRVLYSGLSLLILKQQGITSLQFQSLKEISAGNIYITDNSNLCYYHTINWTTLFSTINQRIVIRDNRKAENCTAEGMVCNHLCSSDGCWGPGPDQCLSCRRFSRGRICIESCNLYDGEFREFENGSICVECDPQCEKMEDGLLTCHGPGPDNCTKCSHFKDGPNCVEKCPDGLQGANSFIFKYADPDRECHPCHPNCTQGCNGPTSHDCIYYPWTGHSTLPQHARTPLIAAGVIGGLFILVIVGLTFAVYVRRKSIKKKRALRRFLETELVEPLTPSGTAPNQAQLRILKETELKRVKVLGSGAFGTVYKGIWVPEGETVKIPVAIKILNETTGPKANVEFMDEALIMASMDHPHLVRLLGVCLSPTIQLVTQLMPHGCLLEYVHEHKDNIGSQLLLNWCVQIAKGMMYLEERRLVHRDLAARNVLVKSPNHVKITDFGLARLLEGDEKEYNADGGKMPIKWMALECIHYRKFTHQSDVWSYGVTIWELMTFGGKPYDGIPTREIPDLLEKGERLPQPPICTIDVYMVMVKCWMIDADSRPKFKELAAEFSRMARDPQRYLVIQGDDRMKLPSPNDSKFFQNLLDEEDLEDMMDAEEYLVPQAFNIPPPIYTSRARIDSNRSEIGHSPPPAYTPMSGNQFVYRDGGFAAEQGVSVPYRAPTSTIPEAPVAQGATAEIFDDSCCNGTLRKPVAPHVQEDSSTQRYSADPTVFAPERSPRGELDEEGYMTPMRDKPKQEYLNPVEENPFVSRRKNGDLQALDNPEYHNASNGPPKAEDEYVNEPLYLNTFANTLGKAEYLKNNILSMPEKAKKAFDNPDYWNHSLPPRSTLQHPDYLQEYSTKYFYKQNGRIRPIVAENPEYLSEFSLKPGTVLPPPPYRHRNTVV

SEQ ID NO: 13101 - protein, 1298 aa, Homo sapiens
MKPATGLWVWVSLLVAAGTVQPSDSQSVCAGTENKLSSLSDLEQQYRALRKYYENCEVVMGNLEITSIEHNRDLSFLRSVREVTGYVLVALNQFRYLPLENLRIIRGTKLYEDRYALAIFLNYRKDGNFGLQELGLKNLTEILNGGVYVDQNKFLCYADTIHWQDIVRNPWPSNLTLVSTNGSSGCGRCHKSCTGRCWGPTENHCQTLTRTVCAEQCDGRCYGPYVSDCCHRECAGGCSGPKDTDCFACMNFNDSGACVTQCPQTFVYNPTTFQLEHNFNAKYTYGAFCVKKCPHNFVVDSSSCVRACPSSKMEVEENGIKMCKPCTDICPKACDGIGTGSLMSAQTVDSSNIDKFINCTKINGNLIFLVTGIHGDPYNAIEAIDPEKLNVFRTVREITGFLNIQSWPPNMTDFSVFSNLVTIGGRVLYSGLSLLILKQQGITSLQFQSLKEISAGNIYITDNSNLCYYHTINWTTLFSTINQRIVIRDNRKAENCTAEGMVCNHLCSSDGCWGPGPDQCLSCRRFSRGRICIESCNLYDGEFREFENGSICVECDPQCEKMEDGLLTCHGPGPDNCTKCSHFKDGPNCVEKCPDGLQGANSFIFKYADPDRECHPCHPNCTQGCIGSSIEDCIGLMDRTPLIAAGVIGGLFILVIVGLTFAVYVRRKSIKKKRALRRFLETELVEPLTPSGTAPNQAQLRILKETELKRVKVLGSGAFGTVYKGIWVPEGETVKIPVAIKILNETTGPKANVEFMDEALIMASMDHPHLVRLLGVCLSPTIQLVTQLMPHGCLLEYVHEHKDNIGSQLLLNWCVQIAKGMMYLEERRLVHRDLAARNVLVKSPNHVKITDFGLARLLEGDEKEYNADGGKMPIKWMALECIHYRKFTHQSDVWSYGVTIWELMTFGGKPYDGIPTREIPDLLEKGERLPQPPICTIDVYMVMVKCWMIDADSRPKFKELAAEFSRMARDPQRYLVIQGDDRMKLPSPNDSKFFQNLLDEEDLEDMMDAEEYLVPQAFNIPPPIYTSRARIDSNRSEIGHSPPPAYTPMSGNQFVYRDGGFAAEQGVSVPYRAPTSTIPEAPVAQGATAEIFDDSCCNGTLRKPVAPHVQEDSSTQRYSADPTVFAPERSPRGELDEEGYMTPMRDKPKQEYLNPVEENPFVSRRKNGDLQALDNPEYHNASNGPPKAEDEYVNEPLYLNTFANTLGKAEYLKNNILSMPEKAKKAFDNPDYWNHSLPPRSTLQHPDYLQEYSTKYFYKQNGRIRPIVAENPEYLSEFSLKPGTVLPPPPYRHRNTVV

SEQ ID NO: 13102 - protein, 1292 aa, Homo sapiens
MKPATGLWVWVSLLVAAGTVQPSDSQSVCAGTENKLSSLSDLEQQYRALRKYYENCEVVMGNLEITSIEHNRDLSFLRSVREVTGYVLVALNQFRYLPLENLRIIRGTKLYEDRYALAIFLNYRKDGNFGLQELGLKNLTEILNGGVYVDQNKFLCYADTIHWQDIVRNPWPSNLTLVSTNGSSGCGRCHKSCTGRCWGPTENHCQTLTRTVCAEQCDGRCYGPYVSDCCHRECAGGCSGPKDTDCFACMNFNDSGACVTQCPQTFVYNPTTFQLEHNFNAKYTYGAFCVKKCPHNFVVDSSSCVRACPSSKMEVEENGIKMCKPCTDICPKACDGIGTGSLMSAQTVDSSNIDKFINCTKINGNLIFLVTGIHGDPYNAIEAIDPEKLNVFRTVREITGFLNIQSWPPNMTDFSVFSNLVTIGGRVLYSGLSLLILKQQGITSLQFQSLKEISAGNIYITDNSNLCYYHTINWTTLFSTINQRIVIRDNRKAENCTAEGMVCNHLCSSDGCWGPGPDQCLSCRRFSRGRICIESCNLYDGEFREFENGSICVECDPQCEKMEDGLLTCHGPGPDNCTKCSHFKDGPNCVEKCPDGLQGANSFIFKYADPDRECHPCHPNCTQGCNGPTSHDCIYYPWTGHSTLPQHARTPLIAAGVIGGLFILVIVGLTFAVYVRRKSIKKKRALRRFLETELVEPLTPSGTAPNQAQLRILKETELKRVKVLGSGAFGTVYKGIWVPEGETVKIPVAIKILNETTGPKANVEFMDEALIMASMDHPHLVRLLGVCLSPTIQLVTQLMPHGCLLEYVHEHKDNIGSQLLLNWCVQIAKGMMYLEERRLVHRDLAARNVLVKSPNHVKITDFGLARLLEGDEKEYNADGGKMPIKWMALECIHYRKFTHQSDVWSYGVTIWELMTFGGKPYDGIPTREIPDLLEKGERLPQPPICTIDVYMVMVKCWMIDADSRPKFKELAAEFSRMARDPQRYLVIQGDDRMKLPSPNDSKFFQNLLDEEDLEDMMDAEEYLVPQAFNIPPPIYTSRARIDSNRNQFVYRDGGFAAEQGVSVPYRAPTSTIPEAPVAQGATAEIFDDSCCNGTLRKPVAPHVQEDSSTQRYSADPTVFAPERSPRGELDEEGYMTPMRDKPKQEYLNPVEENPFVSRRKNGDLQALDNPEYHNASNGPPKAEDEYVNEPLYLNTFANTLGKAEYLKNNILSMPEKAKKAFDNPDYWNHSLPPRSTLQHPDYLQEYSTKYFYKQNGRIRPIVAENPEYLSEFSLKPGTVLPPPPYRHRNTVV

SEQ ID NO: 13103 - protein, 1282 aa, Homo sapiens
MKPATGLWVWVSLLVAAGTVQPSDSQSVCAGTENKLSSLSDLEQQYRALRKYYENCEVVMGNLEITSIEHNRDLSFLRSVREVTGYVLVALNQFRYLPLENLRIIRGTKLYEDRYALAIFLNYRKDGNFGLQELGLKNLTEILNGGVYVDQNKFLCYADTIHWQDIVRNPWPSNLTLVSTNGSSGCGRCHKSCTGRCWGPTENHCQTLTRTVCAEQCDGRCYGPYVSDCCHRECAGGCSGPKDTDCFACMNFNDSGACVTQCPQTFVYNPTTFQLEHNFNAKYTYGAFCVKKCPHNFVVDSSSCVRACPSSKMEVEENGIKMCKPCTDICPKACDGIGTGSLMSAQTVDSSNIDKFINCTKINGNLIFLVTGIHGDPYNAIEAIDPEKLNVFRTVREITGFLNIQSWPPNMTDFSVFSNLVTIGGRVLYSGLSLLILKQQGITSLQFQSLKEISAGNIYITDNSNLCYYHTINWTTLFSTINQRIVIRDNRKAENCTAEGMVCNHLCSSDGCWGPGPDQCLSCRRFSRGRICIESCNLYDGEFREFENGSICVECDPQCEKMEDGLLTCHGPGPDNCTKCSHFKDGPNCVEKCPDGLQGANSFIFKYADPDRECHPCHPNCTQGCIGSSIEDCIGLMDRTPLIAAGVIGGLFILVIVGLTFAVYVRRKSIKKKRALRRFLETELVEPLTPSGTAPNQAQLRILKETELKRVKVLGSGAFGTVYKGIWVPEGETVKIPVAIKILNETTGPKANVEFMDEALIMASMDHPHLVRLLGVCLSPTIQLVTQLMPHGCLLEYVHEHKDNIGSQLLLNWCVQIAKGMMYLEERRLVHRDLAARNVLVKSPNHVKITDFGLARLLEGDEKEYNADGGKMPIKWMALECIHYRKFTHQSDVWSYGVTIWELMTFGGKPYDGIPTREIPDLLEKGERLPQPPICTIDVYMVMVKCWMIDADSRPKFKELAAEFSRMARDPQRYLVIQGDDRMKLPSPNDSKFFQNLLDEEDLEDMMDAEEYLVPQAFNIPPPIYTSRARIDSNRNQFVYRDGGFAAEQGVSVPYRAPTSTIPEAPVAQGATAEIFDDSCCNGTLRKPVAPHVQEDSSTQRYSADPTVFAPERSPRGELDEEGYMTPMRDKPKQEYLNPVEENPFVSRRKNGDLQALDNPEYHNASNGPPKAEDEYVNEPLYLNTFANTLGKAEYLKNNILSMPEKAKKAFDNPDYWNHSLPPRSTLQHPDYLQEYSTKYFYKQNGRIRPIVAENPEYLSEFSLKPGTVLPPPPYRHRNTVV

SEQ ID NO: 13104 - protein, 224 aa, Homo sapiens
MPGRAPLRTVPGALGAWLLGGLWAWTLCGLCSLGAVGAPRPCQAPQQWEGRQVMYQQSSGRNSRALLSYDGLNQRVRVLDERKALIPCKRLFEYILLYKDGVMFQIDQATKQCSKMTLTQPWDPLDIPQNSTFEDQYSIGGPQEQITVQEWSDRKSARSYETWIGIYTVKDCYPVQETFTINYSVILSTRFFDIQLGIKDPSVFTPPSTCQMAQLEKMSEDCSW

SEQ ID NO: 13105 - protein, 90 aa, Homo sapiens
MPGRAPLRTVPGALGAWLLGGLWAWTLCGLCSLGAVGAPRPCQAPQQWEGRQVMYQQSSGRNSRALLSYDGLNQRVRVLDERKALIPCKR

SEQ ID NO: 13106 - protein, 163 aa, Homo sapiens
MVRDWEGRCAHRGRPAGGGLSNTQRGGGRLFEYILLYKDGVMFQIDQATKQCSKMTLTQPWDPLDIPQNSTFEDQYSIGGPQEQITVQEWSDRKSARSYETWIGIYTVKDCYPVQETFTINYSVILSTRFFDIQLGIKDPSVFTPPSTCQMAQLEKMSEDCSW

SEQ ID NO: 13107 - protein, 149 aa, Homo sapiens
MSTNICSFKDRCVSILCCKFCKQVLSSRGMKAVLLADTEIDLFSTDIPPTNAVDFTGRCYFTKICKCKLKDIACLKCGNIVGYHVIVPCSSCLLSCNNGHFWMFHSQAVYDINRLDSTGVNVLLWGNLPEIEESTDEDVLNISAEECIR

SEQ ID NO: 13108 - protein, 109 aa, Homo sapiens
MSTNICSFKDSAVDFTGRCYFTKICKCKLKDIACLKCGNIVGYHVIVPCSSCLLSCNNGHFWMFHSQAVYDINRLDSTGVNVLLWGNLPEIEESTDEDVLNISAEECIR

SEQ ID NO: 13109 - protein, 625 aa, Homo sapiens
MIFLYQVVHFILFTSVSGECVTQLLKDTCFEGGDITTVFTPSAKYCQVVCTYHPRCLLFTFTAESPSEDPTRWFTCVLKDSVTETLPRVNRTAAISGYSFKQCSHQISACNKDIYVDLDMKGINYNSSVAKSAQECQERCTDDVHCHFFTYATRQFPSLEHRNICLLKHTQTGTPTRITKLDKVVSGFSLKSCALSNLACIRDIFPNTVFADSNIDSVMAPDAFVCGRICTHHPGCLFFTFFSQEWPKESQRNLCLLKTSESGLPSTRIKKSKALSGFSLQSCRHSIPVFCHSSFYHDTDFLGEELDIVAAKSHEACQKLCTNAVRCQFFTYTPAQASCNEGKGKCYLKLSSNGSPTKILHGRGGISGYTLRLCKMDNECTTKIKPRIVGGTASVRGEWPWQVTLHTTSPTQRHLCGGSIIGNQWILTAAHCFYGVESPKILRVYSGILNQSEIKEDTSFFGVQEIIIHDQYKMAESGYDIALLKLETTVNYTDSQRPICLPSKGDRNVIYTDCWVTGWGYRKLRDKIQNTLQKAKIPLVTNEECQKRYRGHKITHKMICAGYREGGKDACKGDSGGPLSCKHNEVWHLVGITSWGEGCAQRERPGVYTNVVEYVDWILEKTQAV

SEQ ID NO: 13110 - protein, 571 aa, Homo sapiens
MIFLYQVVHFILFTSVSGECVTQLLKDTCFEGGDITTVFTPSAKYCQVVCTYHPRCLLFTFTAESPSEDPTRWFTCVLKDSVTETLPRVNRTAAISGYSFKQCSHQISNICLLKHTQTGTPTRITKLDKVVSGFSLKSCALSNLACIRDIFPNTVFADSNIDSVMAPDAFVCGRICTHHPGCLFFTFFSQEWPKESQRNLCLLKTSESGLPSTRIKKSKALSGFSLQSCRHSIPVFCHSSFYHDTDFLGEELDIVAAKSHEACQKLCTNAVRCQFFTYTPAQASCNEGKGKCYLKLSSNGSPTKILHGRGGISGYTLRLCKMDNECTTKIKPRIVGGTASVRGEWPWQVTLHTTSPTQRHLCGGSIIGNQWILTAAHCFYGVESPKILRVYSGILNQSEIKEDTSFFGVQEIIIHDQYKMAESGYDIALLKLETTVNYTDSQRPICLPSKGDRNVIYTDCWVTGWGYRKLRDKIQNTLQKAKIPLVTNEECQKRYRGHKITHKMICAGYREGGKDACKGDSGGPLSCKHNEVWHLVGITSWGEGCAQRERPGVYTNVVEYVDWILEKTQAV

SEQ ID NO: 13111 - protein, 126 aa, Homo sapiens
MPDPSKSAPAPKKGSKKAVTKAQKKDGKKRKRGRKESYSIYVYKVLKQVHPDTGISSKAMGIMNSFVNDIFERIASEASRLAHYNKRSTITSREVQTAVRLLLPGELAKHAVSEGTKAVTKYTSSK

SEQ ID NO: 13112 - protein, 595 aa, Homo sapiens
MALTDGGWCLPKRFGAAGADASDSRAFPAREPSTPPSPISSSSSSCSRGGERGPGGASNCGTPQLDTEAAAGPPARSLLLSSYASHPFGAPHGPSAPGVAGPGGNLSSWEDLLLFTDLDQAATASKLLWSSRGAKLSPFAPEQPEEMYQTLAALSSQGPAAYDGAPGGFVHSAAAAAAAAAAASSPVYVPTTRVGSMLPGLPYHLQGSGSGPANHAGGAGAHPGWPQASADSPPYGSGGGAAGGGAAGPGGAGSAAAHVSARFPYSPSPPMANGAAREPGGYAAAGSGGAGGVSGGGSSLAAMGGREPQYSSLSAARPLNGTYHHHHHHHHHHPSPYSPYVGAPLTPAWPAGPFETPVLHSLQSRAGAPLPVPRGPSADLLEDLSESRECVNCGSIQTPLWRRDGTGHYLCNACGLYSKMNGLSRPLIKPQKRVPSSRRLGLSCANCHTTTTTLWRRNAEGEPVCNACGLYMKLHGVPRPLAMKKEGIQTRKRKPKNINKSKTCSGNSNNSIPMTPTSTSSNSDDCSKNTSPTTQPTASGAGAPVMTGAGESTNPENSELKYSGQDGLYIGVSLASPAEVTSSVRPDSWCALALA

SEQ ID NO: 13113 - protein, 449 aa, Homo sapiens
MYQTLAALSSQGPAAYDGAPGGFVHSAAAAAAAAAAASSPVYVPTTRVGSMLPGLPYHLQGSGSGPANHAGGAGAHPGWPQASADSPPYGSGGGAAGGGAAGPGGAGSAAAHVSARFPYSPSPPMANGAAREPGGYAAAGSGGAGGVSGGGSSLAAMGGREPQYSSLSAARPLNGTYHHHHHHHHHHPSPYSPYVGAPLTPAWPAGPFETPVLHSLQSRAGAPLPVPRGPSADLLEDLSESRECVNCGSIQTPLWRRDGTGHYLCNACGLYSKMNGLSRPLIKPQKRVPSSRRLGLSCANCHTTTTTLWRRNAEGEPVCNACGLYMKLHGVPRPLAMKKEGIQTRKRKPKNINKSKTCSGNSNNSIPMTPTSTSSNSDDCSKNTSPTTQPTASGAGAPVMTGAGESTNPENSELKYSGQDGLYIGVSLASPAEVTSSVRPDSWCALALA

SEQ ID NO: 13114 - protein, 859 aa, Homo sapiens
MTSKQAMSSNEQERLLCYNGEVLVFQLSKGNFADKEPTKTPILHVRRMVFDRGTKVFVQKSTGFFTIKEENSHLKIMCCNCVSDFRTGINLPYIVIEKNKKNNVFEYFLLILHSTNKFEMRLSFKLGYEMKDGLRVLNGPLILWRHVKAFFFISSQTGKVVSVSGNFSSIQWAGEIENLGMVLLGLKECCLSEEECTQEPSKSDYAIWNTKFCVYSLESQEVLSDIYIIPPAYSSVVTYVHICATEIIKNQLRISLIALTRKNQLISFQNGTPKNVCQLPFGDPCAVQLMDSGGGNLFFVVSFISNNACAVWKESFQVAAKWEKLSLVLIDDFIGSGTEQVLLLFKDSLNSDCLTSFKITDLGKINYSSEPSDCNEDDLFEDKQENRYLVVPPLETGLKVCFSSFRELRQHLLLKEKIISKSYKALINLVQGKDDNTSSAEEKECLVPLCGEEENSVHILDEKLSDNFQDSEQLVEKIWYRVIDDSLVVGVKTTSSLKLSLNDVTLSLLMDQAHDSRFRLLKCQNRVIKLSTNPFPAPYLMPCEIGLEAKRVTLTPDSKKEESFVCEHPSKKECVQIITAVTSLSPLLTFSKFCCTVLLQIMERESGNCPKDRYVVCGRVFLSLEDLSTGKYLLTFPKKKPIEHMEDLFALLAAFHKSCFQITSPGYALNSMKVWLLEHMKCEIIKEFPEVYFCERPGSFYGTLFTWKQRTPFEGILIIYSRNQTVMFQCLHNLIRILPINCFLKNLKSGSENFLIDNMAFTLEKELVTLSSLSSAIAKHESNFMQRCEVSKGKSSVVAAALSDRRENIHPYRKELQREKKKMLQTNLKVSGALYREITLKVAEVQLKSDFAAQKLSNL

SEQ ID NO: 13115 - protein, 359 aa, Homo sapiens
MDPLGPAKPQWSWRCCLTTLLFQLLMAVCFFSYLRVSQDDPTVYPNGSRFPDSTGTPAHSIPLILLWTWPFNKPIALPRCSEMVPGTADCNITADRKVYPQADAVIVHHREVMYNPSAQLPRSPRRQGQRWIWFSMESPSHCWQLKAMDGYFNLTMSYRSDSDIFTPYGWLEPWSGQPAHPPLNLSAKTELVAWAVSNWGPNSARVRYYQSLQAHLKVDVYGRSHKPLPQGTMMETLSRYKFYLAFENSLHPDYITEKLWRNALEAWAVPVVLGPSRSNYERFLPPDAFIHVDDFQSPKDLARYLQELDKDHARYLSYFRWRETLRPRSFSWALAFCKACWKLQEESRYQTRGIAAWFT

SEQ ID NO: 13116 - protein, 364 aa, Homo sapiens
MDPLGPAKPQWSWRCCLTTLLFQLLMAVCFFSYLRVSQDDPTVYPNGSRFPDSTGTPAHSIPLILLWTWPFNKPIALPRCSEMVPGTADCNITADRKVYPQADAVIVHHREVMYNPSAQLPRSPRRQGQRWIWFSMESPSHCWQLKAMDGYFNLTMSYRSDSDIFTPYGWLEPWSGQPAHPPLNLSAKTELVAWAVSNWGPNSARVRYYQSLQAHLKVDVYGRSHKPLPQGTMMETLSRYKFYLAFENSLHPDYITEKLWRNALEAWAVPVVLGPSRSNYERFLPPDAFIHVDDFQSPKDLARYLQELDKDHARYLSYFRWRETLRPRSFSWALAFCKACWKLQEESSGGLIYLRTRLPEASPA

SEQ ID NO: 13117 - protein, 320 aa, Homo sapiens
MTSIPFPGDRLLQVDGVILCGLTHKQAVQCLKGPGQVARLVLERRVPRSTQQCPSANDSMGDERTAVSLVTALPGRPSSCVSVTDGPKFEVKLKKNANGLGFSFVQMEKESCSHLKSDLVRIKRLFPGQPAEENGAIAAGDIILAVNGRSTEGLIFQEVLHLLRGAPQEVTLLLCRPPPGALPEMEQEWQTPELSADKEFTRATCTDSCTSPILDQEDSWRDSASPDAGEGLGLRPESSQKAIREAQWGQNRERPWASSLTHSPESHPHLCKLHQERDESTLATSLEKDVRQNCYSVCDIMRLGRYSFSSPLTRLSTDIF

SEQ ID NO: 13118 - protein, 666 aa, Homo sapiens
MGQTKSKIKSKYASYLSFIKILLKRGGVKVSTKNLIKLFQIIEQFCPWFPEQGTLDLKDWKRIGKELKQAGRKGNIIPLTVWNDWAIIKAALEPFQTEEDSVSVSDAPGSCIIDCNEKTRKKSQKETESLHCEYVAEPVMAQSTQNADYNQLQEVIYPETLKLEGKGPELMGPSESKPRGTSPLPAGQVPVTLQPQKQVKENKTQPPVAYQYWPPAELQYQPPPESQYGYPGMPPAPQGRAPYPQPPTRRLNPTAPPSRQGSELHEIIDKSRKEGDTEAWQFPVTLELMPPGEGAQEGEPPTVEARYKSFSIKMLKDMKEGVKQYGPNSPYMRTLLDSIAHGHRLIPYDWEILAKSSLSPSQFLQFKTWWIDGVQEQVRRNRAANPPVNIDADQLLGIGQNWSTISQQALMQNEAIEQVRAICLRAWEKIQDPGSTCPSFNTVRQGSKEPYPDFVARLQDVAQKSIADEKARKVIVELMAYENANPECQSAIKPLKGKVPAGSDVISEYVKACDGMGGAMHKAMLMAQAITGVVLGGQVRTFGGKCYNCGQIGHLKKNCPVLNKQNITIQATTTGREPPDLCPRCKKGKHWASQCRSKFDKNGQPLSGNEQRGQPQAPQQTGAFPIQPFVPQGFQGQQPPLSQVFQGISQLPQYNNCPPPQAAVQQ

SEQ ID NO: 13119 - protein, 505 aa, Homo sapiens
MKRTPTAEEREREAKKLRLLEELEDTWLPYLTPKDDEFYQQWQLKYPKLILREASSVSEELHKEVQEAFLTLHKHGCLFRDLVRIQGKDLLTPVSRILIGNPGCTYKYLNTRLFTVPWPVKGSNIKHTEAEIAAACETFLKLNDYLQIETIQALEELAAKEKANEDAVPLCMSADFPRVGMGSSYNGQDEVDIKSRAAYNVTLLNFMDPQKMPYLKEEPYFGMGKMAVSWHHDENLVDRSAVAVYSYSCEGPEEESEDDSHLEGRDPDIWHVGFKISWDIETPGLAIPLHQGDCYFMLDDLNATHQHCVLAGSQPRFSSTHRVAECSTGTLDYILQRCQLALQNVCDDVDNDDVSLKSFEPAVLKQGEEIHNEVEFEWLRQFWFQGNRYRKCTDWWCQPMAQLEALWKKMEGVTNAVLHEVKREGLPVEQRNEILTAILASLTARQNLRREWHARCQSRIARTLPADQKPECRPYWEKDDASMPLPFDLTDIVSELRGQLLEAKP

SEQ ID NO: 13120 - protein, 127 aa, Homo sapiens
MEWRKVSECNSVEPCREVKKWPYRCIHHGKNFSRMTNAVLHEVKREGLPVEQRNEILTAILASLTARQNLRREWHARCQSRIARTLPADQKPECRPYWEKDDASMPLPFDLTDIVSELRGQLLEAKP

SEQ ID NO: 13121 - protein, 60 aa, Homo sapiens
MACQGREECWCQSRIARTLPADQKPECRPYWEKDDASMPLPFDLTDIVSELRGQLLEAKP

SEQ ID NO: 13122 - protein, 106 aa, Homo sapiens
MAQLEALWKKMEGVTNAVLHEVKREGLPVEQRNEILTAILASLTARQNLRREWHARCQSRIARTLPADQKPECRPYWEKDDASMPLPFDLTDIVSELRGQLLEAKP

SEQ ID NO: 13123 - protein, 479 aa, Homo sapiens
MVRIQRRKLLASCLCVTATVFLLVTLQVMVELGKFERKEFKSSSLQDGHTKMEEAPTHLNSFLKKEGLTFNRKRKWELDSYPIMLWWSPLTGETGRLGQCGADACFFTINRTYLHHHMTKAFLFYGTDFNIDSLPLPRKAHHDWAVFHEESPKNNYKLFHKPVITLFNYTATFSRHSHLPLTTQYLESIEVLKSLRYLVPLQSKNKLRKRLAPLVYVQSDCDPPSDRDSYVRELMTYIEVDSYGECLRNKDLPQQLKNPASMDADGFYRIIAQYKFILAFENAVCDDYITEKFWRPLKLGVVPVYYGSPSITDWLPSNKSAILVSEFSHPRELASYIRRLDSDDRLYEAYVEWKLKGEISNQRLLTALRERKWGVQDVNQDNYIDAFECMVCTKVWANIRLQEKGLPPKRWEAEDTHLSCPEPTVFAFSPLRTPPLSSLREMWISSFEQSKKEAQALRWLVDRNQNFSSQEFWGLVFKD

SEQ ID NO: 13124 - protein, 520 aa, Homo sapiens
MVRIQRRKLLASCLCVTATVFLLVTLALDTVENLMKVTGPPQGVTDSMQCFNDQRPLSNTRSSEHIKEVMVELGKFERKEFKSSSLQDGHTKMEEAPTHLNSFLKKEGLTFNRKRKWELDSYPIMLWWSPLTGETGRLGQCGADACFFTINRTYLHHHMTKAFLFYGTDFNIDSLPLPRKAHHDWAVFHEESPKNNYKLFHKPVITLFNYTATFSRHSHLPLTTQYLESIEVLKSLRYLVPLQSKNKLRKRLAPLVYVQSDCDPPSDRDSYVRELMTYIEVDSYGECLRNKDLPQQLKNPASMDADGFYRIIAQYKFILAFENAVCDDYITEKFWRPLKLGVVPVYYGSPSITDWLPSNKSAILVSEFSHPRELASYIRRLDSDDRLYEAYVEWKLKGEISNQRLLTALRERKWGVQDVNQDNYIDAFECMVCTKVWANIRLQEKGLPPKRWEAEDTHLSCPEPTVFAFSPLRTPPLSSLREMWISSFEQSKKEAQALRWLVDRNQNFSSQEFWGLVFKD

SEQ ID NO: 13125 - protein, 357 aa, Homo sapiens
MGIGQLPHYALVVPADGGDWEVRPMWSRCLFLHHQPDLPPSSHDQSIPLLWSQEESPPLAENDGTDFNIDSLPLPRKAHHDWAVFHEESPKNNYKLFHKPVITLFNYTATFSRHSHLPLTTQYLESIEVLKSLRYLVPLQSKNKLRKRLAPLVYVQSDCDPPSDRDSYVRELMTYIEVDSYGECLRNKDLPQQLKNPASMDADGFYRIIAQYKFILAFENAVCDDYITEKFWRPLKLGVVPVYYGSPSITDWLPSNKSAILVSEFSHPRELASYIRRLDSDDRLYEAYVEWKLKGEISNQRLLTALRERKWGVQDVNQDNYIDAFECMVCTKVWANIRLQEKVSKSKVGIEPAGWPS

SEQ ID NO: 13126 - protein, 391 aa, Homo sapiens
MVELGKFERKEFKSSSLQDGHTKMEEAPTHLNSFLKKEGLTFNRKRKWELDSYPIMLWWSPLTGETGRLGQCGADACFFTINRTYLHHHMTKAFLFYGTDFNIDSLPLPRKAHHDWAVFHEESPKNNYKLFHKPVITLFNYTATFSRHSHLPLTTQYLESIEVLKSLRYLVPLQSKNKLRKRLAPLVYVQSDCDPPSDRDSYVRELMTYIEVDSYGECLRNKDLPQQLKNPASMDADGFYRIIAQYKFILAFENAVCDDYITEKFWRPLKLGVVPVYYGSPSITDWLPSNKSAILVSEFSHPRELASYIRRLDSDDRLYEAYVEWKLKGEISNQRLLTALRERKWGVQDVNQDNYIDAFECMVCTKVWANIRLQEKVSKSKVGIEPAGWPS

SEQ ID NO: 13127 - protein, 419 aa, Homo sapiens
MVRIQRRKLLASCLCVTATVFLLVTLQVMVELGKFERKEFKSSSLQDGHTKMEEAPTHLNSFLKKEGLTFNRKRKWELDSYPIMLWWSPLTGETGRLGQCGADACFFTINRTYLHHHMTKAFLFYGTDFNIDSLPLPRKAHHDWAVFHEESPKNNYKLFHKPVITLFNYTATFSRHSHLPLTTQYLESIEVLKSLRYLVPLQSKNKLRKRLAPLVYVQSDCDPPSDRDSYVRELMTYIEVDSYGECLRNKDLPQQLKNPASMDADGFYRIIAQYKFILAFENAVCDDYITEKFWRPLKLGVVPVYYGSPSITDWLPSNKSAILVSEFSHPRELASYIRRLDSDDRLYEAYVEWKLKGEISNQRLLTALRERKWGVQDVNQDNYIDAFECMVCTKVWANIRLQEKVSKSKVGIEPAGWPS

SEQ ID NO: 13128 - protein, 451 aa, Homo sapiens
MVELGKFERKEFKSSSLQDGHTKMEEAPTHLNSFLKKEGLTFNRKRKWELDSYPIMLWWSPLTGETGRLGQCGADACFFTINRTYLHHHMTKAFLFYGTDFNIDSLPLPRKAHHDWAVFHEESPKNNYKLFHKPVITLFNYTATFSRHSHLPLTTQYLESIEVLKSLRYLVPLQSKNKLRKRLAPLVYVQSDCDPPSDRDSYVRELMTYIEVDSYGECLRNKDLPQQLKNPASMDADGFYRIIAQYKFILAFENAVCDDYITEKFWRPLKLGVVPVYYGSPSITDWLPSNKSAILVSEFSHPRELASYIRRLDSDDRLYEAYVEWKLKGEISNQRLLTALRERKWGVQDVNQDNYIDAFECMVCTKVWANIRLQEKGLPPKRWEAEDTHLSCPEPTVFAFSPLRTPPLSSLREMWISSFEQSKKEAQALRWLVDRNQNFSSQEFWGLVFKD

SEQ ID NO: 13129 - protein, 92 aa, Homo sapiens
MEEAPTHLNSFLKKEGLTFNRKRKWELDSYPIMLWWSPLTGETGRLGQCGADACFFTINRTYLHHHMTKAFLFYGKQDFRLSPLFAVVFLQS

SEQ ID NO: 13130 - protein, 343 aa, Homo sapiens
MLVVQMPFSFPMAHFILFVFTVSTIFHVQQRLAKIQAMWELPVQIPVLASTSKALGPSQLRGMWTINAIGRLGNQMGEYATLYALAKMNGRPAFIPAQMHSTLAPIFRITLPVLHSATASRIPWQNYHLNDWMEEEYRHIPGEYVRFTGYPCSWTFYHHLRQEILQEFTLHDHVREEAQKFLRGLQVNGSRPGTFVGVHVRRGDYVHVMPKVWKGVVADRRYLQQALDWFRARYSSLIFVVTSNGMAWCRENIDTSHGDVVFAGDGIEGSPAKDFALLTQCNHTIMTIGTFGIWAAYLTGGDTIYLANYTLPDSPFLKIFKPEAAFLPEWTGIAADLSPLLKH

SEQ ID NO: 13131 - protein, 1857 aa, Homo sapiens
MFGLKVKKKRNKAEKGLILANKAAKDSQGDTEALQEEPSHQEGPRGDLVHDDASIFPVPSASPKRRSKLLTKIHDGEVRSQNYQIAITITEARQLVGENIDPVVTIEIGDEKKQSTVKEGTNSPFYNEYFVFDFIGPQVHLFDKIIKISVFHHKLIGSVLIGSFKVDLGTVYNQPGHQFCNKWALLTDPGDIRTGTKGYLKCDISVMGKGDVLKTSPKTSDTEEPIEKNLLIPNGFPLERPWARFYVRLYKAEGLPKMNSSIMANVTKAFVGDSKDLVDPFVEVSFAGQMGRTTVQKNCADPVWHEQVIFKEMFPPLCRRVKIQVWDEGSMNDVALATHFIDLKKISNEQDGDKGFLPTFGPAWINLYGSPRNHSLMDDYQEMNEGFGEGVSFRGRILVEIAVEILSGRAQESKFSKALKELKLPSKDKDSKSSKGKDKADKTEDGKSQQASNKTNSTEVEVESFDVPPEIVPEKNEEFLLFGAFFEATMIDRKIGDKPISFEVSIGNFGNLIDGGSHHGSKKSAESAEEDLLPLLHEGQGDVAHDVPIPMASTTHPEKPLVTEGNRNYNYLPFEAKKPCVYFISSWGDQTFRLHWSNMLEKMADFLEESIEEVRELIKISQEAPEEKMKTVLSDFISRSSAFISEAEKKPKMLNQTTLDKKRLTLCWQELEAMCKEAKGIIQQQKKKLSVDEMIHEAQNFVEKIRFLVDEPQHTIPDVFIWMLSNNRRVAYARIASKDLLYSPVAGQMGKHCGKIKTHFLKPPGKRPAGWSVQAKVDVYLWLGSIKHASAILDNLPVGYEAEMSSKGAGTNHPPSNLLYQEQHVFQLRAHMYQARGLIAADSNGLSDPFAKVTFLSHCQTTKIISQTLSPTWNQMLLFNDLVLHGDVKELAESPPLVVVELYDSDAVGKPEYLGATVAAPVVKLADQDYEPPRLCYHPIFCGNLSGGDLLAVFELLQVPPSGLQGLPPVEPPDITQIYPVPANIRPVLSKYRVEVLFWGVREMKKVQLLSVDRPQALIECGGQGVKSCVIQSYKNNPNFSIQADAFEVELPENELLHPPLSICVVDWRAFGRSTLVGTYTINYLKQFLCKLREPLAPITQVDGTQPGHDISDSLTATESSGAHSSSQDPPADHIYVDVEPPPTVVPDSAQAQPAILVDVPDSSPMLEPEHTPVAQEPPKDGKPKDPRKPSRRSTKRRKRTIADESAENVIDWWSKYYASLKKAQKAKERNPKGKKGNTEAKPDEVVVDIEDGPKKKKDKMLKKKPKDDGIPNLAILQIYDGDLESEFNNFEDWVKTFELFRGKSTEDDHGLDGDRVIGKFKGSFCIYKSPQDSSSEDSGQLRIQQGIPPNHPVTVLIRVYIVAAFNLSPADPDGKSDPYIVIKLGKTEIKDRDKYIPKQLNPVFGRSFEIQATFPKESLLSILIYDHDMIGTDDLIGETKIDLENRFYSKHRAICGLQSQYEIEGYNAWRDTSKPTEILTKLCKDNKLDGPYFHPGKIQIGNQVFSGKTIFTEEDTDETVESYEHLALKVLHSWEDIPEVGCRLVPEHIETRPLYHKDKPGMEQGRLQMWVDMFPKDMPQPGPPVDISPRRPKGYELRVTIWNTEDVILEDENIFTGQKSSDIYVKGWLKGLEDDKQETDVHYNSLTGEGNFNWRFLFPFQYLPAEKQMVITKRENIFSLEKMECKTPAVLVLQVWDFERLSSDDFLGTLEMNLNSFPRAAKSAKACDLAKFENASEETKISIFQQKRVRGWWPFSKSKELTGKVEAEFHLVTAEEAEKNPVGKARKEPEPLAKPNRPDTSFSWFMSPFKCLYYLIWKNYKKYIIIAFILIILIIFLVLFIYTLPGAISRRIVVGS

SEQ ID NO: 13132 - protein, 517 aa, Homo sapiens
MIESDTSSIMSGIIRNSGQNHHPSPQEYRLLATTSDDDLPGDLQSLSWLTAVDVPRLQQMASGRVDLGGPCVPHPHPGALAGVADLHVGATPSPLLHGPAGMAPRGMPGLGPITGHRDSMSQFPVGGQPSSGLQDPPHLYSPATQPQFPLPPGAQQCPPVGLYGPPFGVRPPYPQPHVAVHSSQELHPKHYPKPIYSYSCLIAMALKNSKTGSLPVSEIYSFMKEHFPYFKTAPDGWKNSVRHNLSLNKCFEKVENKMSGSSRKGCLWALNLARIDKMEEEMHKWKRKDLAAIHRSMANPEELDKLISDRPESCRRPGKPGEPEAPVLTHATTVAVAHGCLAVSQLPPQPLMTLSLQSVPLHHQVQPQAHLAPDSPAPAQTPPLHALPDLSPSPLPHPAMGRAPVDFINISTDMNTEVDALDPSIMDFALQGNLWEEMKDEGFSLDTLGAFADSPLGCDLGASGLTPASGGSDQSFPDLQVTGLYTAYSTPDSVAASGTSSSSQYLGAQGNKPIALL

SEQ ID NO: 13133 - protein, 258 aa, Homo sapiens
MIESDTSSIMSGIIRNSGQNHHPSPQEYRLLATTSDDDLPGDLQSLSWLTAVDVPRLQQMASGRVDLGGPCVPHPHPGALAGVADLHVGATPSPLLHGPAGMAPRGMPGLGPITGHRDSQMSQFPVGGQPSSGLQDPPHLYSPATQPQFPLPPGAQQLSDRHGPEEQQDRQPACERDLQLHEGALPLLQDGPRRVEELGAAQPVSEQVLREGGEQDERLLPQGLPVGSEPGPHRQDGGGDAQVEEEGPGCHPPEYGQP

SEQ ID NO: 13134 - protein, 337 aa, Homo sapiens
MPGLPCPALPCPAPPPAPSCLIAMALKNSKTGSLPVSEIYSFMKEHFPYFKTAPDGWKNSVRHNLSLNKCFEKVENKMSGSSRKGCLWALNLARIDKMEEEMHKWKRKDLAAIHRSMANPEELDKLISDRPESCRRPGKPGEPEAPVLTHATTVAVAHGCLAVSQLPPQPLMTLSLQSVPLHHQVQPQAHLAPDSPAPAQTPPLHALPDLSPSPLPHPAMGRAPVDFINISTDMNTEVDALDPSIMDFALQGNLWEEMKDEGFSLDTLGAFADSPLGCDLGASGLTPASGGSDQSFPDLQVTGLYTAYSTPDSVAASGTSSSSQYLGAQGNKPIALL

SEQ ID NO: 13135 - protein, 673 aa, Homo sapiens
MAEAPASPAPLSPLEVELDPEFEPQSRPRSCTWPLQRPELQASPAKPSGETAADSMIPEEEDDEDDEDGGGRAGSAMAIGGGGGSGTLGSGLLLEDSARVLAPGGQDPGSGPATAAGGLSGGTQALLQPQQPLPPPQPGAAGGSGQPRKCSSRRNAWGNLSYADLITRAIESSPDKRLTLSQIYEWMVRCVPYFKDKGDSNSSAGWKNSIRHNLSLHSRFMRVQNEGTGKSSWWIINPDGGKSGKAPRRRAVSMDNSNKYTKSRGRAAKKKAALQTAPESADDSPSQLSKWPGSPTSRSSDELDAWTDFRSRTNSNASTVSGRLSPIMASTELDEVQDDDAPLSPMLYSSSASLSPSVSKPCTVELPRLTDMAGTMNLNDGLTENLMDDLLDNITLPPSQPSPTGGLMQRSSSFPYTTKGSGLGSPTSSFNSTVFGPSSLNSLRQSPMQTIQENKPATFSSMSHYGNQTLQDLLTSDSLSHSDVMMTQSDPLMSQASTAVSAQNSRRNVMLRNDPMMSFAAQPNQGSLVNQNLLHHQHQTQGALGGSRALSNSVSNMGLSESSSLGSAKHQQQSPVSQSMQTLSDSLSGSSLYSTSANLPVMGHEKFPSDLDLDMFNGSLECDMESIIRSELMDADGLDFNFDSLISTQNVVGLNVGNFTGAKQASSQSWVPG

SEQ ID NO: 13136 - protein, 453 aa, Homo sapiens
MRVQNEGTGKSSWWIINPDGGKSGKAPRRRAVSMDNSNKYTKSRGRAAKKKAALQTAPESADDSPSQLSKWPGSPTSRSSDELDAWTDFRSRTNSNASTVSGRLSPIMASTELDEVQDDDAPLSPMLYSSSASLSPSVSKPCTVELPRLTDMAGTMNLNDGLTENLMDDLLDNITLPPSQPSPTGGLMQRSSSFPYTTKGSGLGSPTSSFNSTVFGPSSLNSLRQSPMQTIQENKPATFSSMSHYGNQTLQDLLTSDSLSHSDVMMTQSDPLMSQASTAVSAQNSRRNVMLRNDPMMSFAAQPNQGSLVNQNLLHHQHQTQGALGGSRALSNSVSNMGLSESSSLGSAKHQQQSPVSQSMQTLSDSLSGSSLYSTSANLPVMGHEKFPSDLDLDMFNGSLECDMESIIRSELMDADGLDFNFDSLISTQNVVGLNVGNFTGAKQASSQSWVPG

SEQ ID NO: 13137 - protein, 345 aa, Homo sapiens
MSHLFDPRLPALAASPMLYLYGPERPGLPLAFAPAAALAASGRAETPQKPPYSYIALIAMAIQDAPEQRVTLNGIYQFIMDRFPFYHDNRQGWQNSIRHNLSLNDCFVKVPREKGRPGKGSYWTLDPRCLDMFENGNYRRRKRKPKPGPGAPEAKRPRAETHQRSAEAQPEAGSGAGGSGPAISRLQAAPAGPSPLLDGPSPPAPLHWPGTASPNEDAGDAAQGAAAVAVGQAARTGDGPGSPLRPASRSSPKSSDKSKSFSIDSILAGKQGQKPPSGDELLGGAKPGPGGRLGASLLAASSSLRPPFNASLMLDPHVQGGFYQLGIPFLSYFPLQVPDTVLHFQ

SEQ ID NO: 13138 - protein, 330 aa, Homo sapiens
MQQQPLPGPGAPTTEPTKPPYSYIALIAMAIQSSPGQRATLSGIYRYIMGRFAFYRHNRPGWQNSIRHNLSLNECFVKVPRDDRKPGKGSYWTLDPDCHDMFEHGSFLRRRRRFTRQTGAEGTRGPAKARRGPLRATSQDPGVPNATTGRQCSFPPELPDPKGLSFGGLVGAMPASMCPATTDGRPRPPMEPKEISTPKPACPGELPVATSSSSCPAFGFPAGFSEAESFNKAPTPVLSPESGIGSSYQCRLQALNFCMGADPGLEHLLASAAPSPAPPTPPGSLRAPLPLPTDHKEPWVAGGFPVQGGSGYPLGLTPCLYRTPGMFFFE

SEQ ID NO: 13139 - protein, 680 aa, Homo sapiens
MMVESASETIRSAPSGQNGVGSLSGQADGSSGGATGTTASGTGREVTTGADSNGEMSPAELLHFQQQQALQVARQFLLQQASGLSSPGNNDSKQSASAVQVPVSVAMMSPQMLTPQQMQQILSPPQLQALLQQQQALMLQQLQEYYKKQQEQLHLQLLTQQQAGKPQPKEALGNKQLAFQQQLLQMQQLQQQHLLNLQRQGLVSLQPNQASGPLQTLPQAAVCPTDLPQLWKGEGAPGQPAEDSVKQEGLDLTGTAATATSFAAPPKVSPPLSHHTLPNGQPTVLTSRRDSSSHEETPGSHPLYGHGECKWPGCETLCEDLGQFIKHLNTEHALDDRSTAQCRVQMQVVQQLEIQLAKESERLQAMMAHLHMRPSEPKPFSQPLNPVPGSSSFSKVTVSAADSFPDGLVHPPTSAAAPVTPLRPPGLGSASLHGGGPARRRSSDKFCSPISSELAQNHEFYKNADVRPPFTYASLIRQAILETPDRQLTLNEIYNWFTRMFAYFRRNTATWKNAVRHNLSLHKCFVRVENVKGAVWTVDEREYQKRRPPKMTGSPTLVKNMISGLSYGALNASYQAALAESSFPLLNSPGMLNPGSASSLLPLSHDDVGAPVEPLPSNGSSSPPRLSPPQYSHQVQVKEEPAEAEEDRQPGPPLGAPNPSASGPPEDRDLEEELPGEELS

SEQ ID NO: 13140 - protein, 678 aa, Homo sapiens
MMVESASETIRSAPSGQNGVGSLSGQADGSSGGATGTTASGTGREVTTGADSNGEMSPAELLHFQQQQALQVARQFLLQQASGLSSPGNNDSKQSASAVQVPVSVAMMSPQMLTPQQMQQILSPPQLQALLQQQQALMLQQEYYKKQQEQLHLQLLTQQQAGKPQPKEALGNKQLAFQQQLLQMQQLQQQHLLNLQRQGLVSLQPNQASGPLQTLPQAAVCPTDLPQLWKGEGAPGQPAEDSVKQEGLDLTGTAATATSFAAPPKVSPPLSHHTLPNGQPTVLTSRRDSSSHEETPGSHPLYGHGECKWPGCETLCEDLGQFIKHLNTEHALDDRSTAQCRVQMQVVQQLEIQLAKESERLQAMMAHLHMRPSEPKPFSQPLNPVPGSSSFSKVTVSAADSFPDGLVHPPTSAAAPVTPLRPPGLGSASLHGGGPARRRSSDKFCSPISSELAQNHEFYKNADVRPPFTYASLIRQAILETPDRQLTLNEIYNWFTRMFAYFRRNTATWKNAVRHNLSLHKCFVRVENVKGAVWTVDEREYQKRRPPKMTGSPTLVKNMISGLSYGALNASYQAALAESSFPLLNSPGMLNPGSASSLLPLSHDDVGAPVEPLPSNGSSSPPRLSPPQYSHQVQVKEEPAEAEEDRQPGPPLGAPNPSASGPPEDRDLEEELPGEELS

SEQ ID NO: 13141 - protein, 667 aa, Homo sapiens
MMVESASETIRSAPSGQNGVGSLSGQADGSSGGATGTTASGTGREVTTGADSNGEMSPAELLHFQQQQALQVARQFLLQQASGLSSPGNNDSKQSASAVQVPVSVAMMSPQMLTPQQMQQILSPPQLQALLQQQQALMLQQLQEYYKKQQEQLHLQLLTQQQAGKPQPKEALGNKQLAFQQQLLQMQQLQQQHLLNLQRQGLVSLQPNQASGPLQTLPQAVCPTDLPQLWKGEGAPGQPAEDSVKQEGLDLTGTAATATSFAAPPKVSPPLSHHTLPNGQPTVLTSRRDSSSHEETPGSHPLYGHGECKWPGCETLCEDLGQFIKHLNTEHALDDRSTAQCRVQMQVVQQLEIQLAKESERLQAMMAHLHMRPSEPKPFSQPVTVSAADSFPDGLVHPPTSAAAPVTPLRPPGLGSASLHGGGPARRRSSDKFCSPISSELAQNHEFYKNADVRPPFTYASLIRQAILETPDRQLTLNEIYNWFTRMFAYFRRNTATWKNAVRHNLSLHKCFVRVENVKGAVWTVDEREYQKRRPPKMTGSPTLVKNMISGLSYGALNASYQAALAESSFPLLNSPGMLNPGSASSLLPLSHDDVGAPVEPLPSNGSSSPPRLSPPQYSHQVQVKEEPAEAEEDRQPGPPLGAPNPSASGPPEDRDLEEELPGEELS

SEQ ID NO: 13142 - protein, 354 aa, Homo sapiens
MCGRTSCHLPRDVLTRACAYQDRRGQQRLPEWRDPDKYCPSYNKSPQSNSPVLLSRLHFEKDADSSERIIAPMRWGLVPSWFKESDPSKLQFNTTNCRSDTVMEKRSFKVPLGKGRRCVVLADGFYEWQRCQGTNQRQPYFIYFPQIKTEKSGSIGAADSPENWEKVWDNWRLLTMAGIFDCWEPPEGGDVLYSYTIITVDSCKGLSDIHHRMPAILDGEEAVSKWLDFGEVSTQEALKLIHPTENITFHAVSSVVNNSRNNTPECLAPVDLVVKKELRASGSSQRMLQWLATKSPKKEDSKTPQKEESDVPQWSSQFLQKSPLPTKRGTAGLLEQWLKREKEEEPVAKRPYSQ

SEQ ID NO: 13143 - protein, 1106 aa, Homo sapiens
MFNSMTPPPISSYGEPCCLRPLPSQGAPSVGTEGLSGPPFCHQANLMSGPHSYGPARETNSCTEGPLFSSPRSAVKLTKKRALSISPLSDASLDLQTVIRTSPSSLVAFINSRCTSPGGSYGHLSIGTMSPSLGFPAQMNHQKGPSPSFGVQPCGPHDSARGGMIPHPQSRGPFPTCQLKSELDMLVGKCREEPLEGDMSSPNSTGIQDPLLGMLDGREDLEREEKREPESVYETDCRWDGCSQEFDSQEQLVHHINSEHIHGERKEFVCHWGGCSRELRPFKAQYMLVVHMRRHTGEKPHKCTFEGCRKSYSRLENLKTHLRSHTGEKPYMCEHEGCSKAFSNASDRAKHQNRTHSNEKPYVCKLPGCTKRYTDPSSLRKHVKTVHGPDAHVTKRHRGDGPLPRAPSISTVEPKREREGGPIREESRLTVPEGAMKPQPSPGAQSSCSSDHSPAGSAANTDSGVEMTGNAGGSTEDLSSLDEGPCIAGTGLSTLRRLENLRLDQLHQLRPIGTRGLKLPSLSHTGTTVSRRVGPPVSLERRSSSSSSISSAYTVSRRSSLASPFPPGSPPENGASSLPGLMPAQHYLLRARYASARGGGTSPTAASSLDRIGGLPMPPWRSRAEYPGYNPNAGVTRRASDPAQAADRPAPARVQRFKSLGCVHTPPTVAGGGQNFDPYLPTSVYSPQPPSITENAAMDARGLQEEPEVGTSMVGSGLNPYMDFPPTDTLGYGGPEGAAAEPYGARGPGSLPLGPGPPTNYGPNPCPQQASYPDPTQETWGEFPSHSGLYPGPKALGGTYSQCPRLEHYGQVQVKPEQGCPVGSDSTGLAPCLNAHPSEGPPHPQPLFSHYPQPSPPQYLQSGPYTQPPPDYLPSEPRPCLDFDSPTHSTGQLKAQLVCNYVQSQQELLWEGGGREDAPAQEPSYQSPKFLGGSQVSPSRAKAPVNTYGPGFGPNLPNHKSGSYPTPSPCHENFVVGANRASHRAAAPPRLLPPLPTCYGPLKVGGTNPSCGHPEVGRLGGGPALYPPPEGQVCNPLDSLDLDNTQLDFVAILDEPQGLSPPPSHDQRGSSGHTPPPSGPPNMAVGNMSVLLRSLPGETEFLNSSA

SEQ ID NO: 13144 - protein, 1065 aa, Homo sapiens
MFNSMTPPPISSYGEPCCLRPLPSQGAPSVGTEVKLTKKRALSISPLSDASLDLQTVIRTSPSSLVAFINSRCTSPGGSYGHLSIGTMSPSLGFPAQMNHQKGPSPSFGVQPCGPHDSARGGMIPHPQSRGPFPTCQLKSELDMLVGKCREEPLEGDMSSPNSTGIQDPLLGMLDGREDLEREEKREPESVYETDCRWDGCSQEFDSQEQLVHHINSEHIHGERKEFVCHWGGCSRELRPFKAQYMLVVHMRRHTGEKPHKCTFEGCRKSYSRLENLKTHLRSHTGEKPYMCEHEGCSKAFSNASDRAKHQNRTHSNEKPYVCKLPGCTKRYTDPSSLRKHVKTVHGPDAHVTKRHRGDGPLPRAPSISTVEPKREREGGPIREESRLTVPEGAMKPQPSPGAQSSCSSDHSPAGSAANTDSGVEMTGNAGGSTEDLSSLDEGPCIAGTGLSTLRRLENLRLDQLHQLRPIGTRGLKLPSLSHTGTTVSRRVGPPVSLERRSSSSSSISSAYTVSRRSSLASPFPPGSPPENGASSLPGLMPAQHYLLRARYASARGGGTSPTAASSLDRIGGLPMPPWRSRAEYPGYNPNAGVTRRASDPAQAADRPAPARVQRFKSLGCVHTPPTVAGGGQNFDPYLPTSVYSPQPPSITENAAMDARGLQEEPEVGTSMVGSGLNPYMDFPPTDTLGYGGPEGAAAEPYGARGPGSLPLGPGPPTNYGPNPCPQQASYPDPTQETWGEFPSHSGLYPGPKALGGTYSQCPRLEHYGQVQVKPEQGCPVGSDSTGLAPCLNAHPSEGPPHPQPLFSHYPQPSPPQYLQSGPYTQPPPDYLPSEPRPCLDFDSPTHSTGQLKAQLVCNYVQSQQELLWEGGGREDAPAQEPSYQSPKFLGGSQVSPSRAKAPVNTYGPGFGPNLPNHKSGSYPTPSPCHENFVVGANRASHRAAAPPRLLPPLPTCYGPLKVGGTNPSCGHPEVGRLGGGPALYPPPEGQVCNPLDSLDLDNTQLDFVAILDEPQGLSPPPSHDQRGSSGHTPPPSGPPNMAVGNMSVLLRSLPGETEFLNSSA

SEQ ID NO: 13145 - protein, 978 aa, Homo sapiens
MSPSLGFPAQMNHQKGPSPSFGVQPCGPHDSARGGMIPHPQSRGPFPTCQLKSELDMLVGKCREEPLEGDMSSPNSTGIQDPLLGMLDGREDLEREEKREPESVYETDCRWDGCSQEFDSQEQLVHHINSEHIHGERKEFVCHWGGCSRELRPFKAQYMLVVHMRRHTGEKPHKCTFEGCRKSYSRLENLKTHLRSHTGEKPYMCEHEGCSKAFSNASDRAKHQNRTHSNEKPYVCKLPGCTKRYTDPSSLRKHVKTVHGPDAHVTKRHRGDGPLPRAPSISTVEPKREREGGPIREESRLTVPEGAMKPQPSPGAQSSCSSDHSPAGSAANTDSGVEMTGNAGGSTEDLSSLDEGPCIAGTGLSTLRRLENLRLDQLHQLRPIGTRGLKLPSLSHTGTTVSRRVGPPVSLERRSSSSSSISSAYTVSRRSSLASPFPPGSPPENGASSLPGLMPAQHYLLRARYASARGGGTSPTAASSLDRIGGLPMPPWRSRAEYPGYNPNAGVTRRASDPAQAADRPAPARVQRFKSLGCVHTPPTVAGGGQNFDPYLPTSVYSPQPPSITENAAMDARGLQEEPEVGTSMVGSGLNPYMDFPPTDTLGYGGPEGAAAEPYGARGPGSLPLGPGPPTNYGPNPCPQQASYPDPTQETWGEFPSHSGLYPGPKALGGTYSQCPRLEHYGQVQVKPEQGCPVGSDSTGLAPCLNAHPSEGPPHPQPLFSHYPQPSPPQYLQSGPYTQPPPDYLPSEPRPCLDFDSPTHSTGQLKAQLVCNYVQSQQELLWEGGGREDAPAQEPSYQSPKFLGGSQVSPSRAKAPVNTYGPGFGPNLPNHKSGSYPTPSPCHENFVVGANRASHRAAAPPRLLPPLPTCYGPLKVGGTNPSCGHPEVGRLGGGPALYPPPEGQVCNPLDSLDLDNTQLDFVAILDEPQGLSPPPSHDQRGSSGHTPPPSGPPNMAVGNMSVLLRSLPGETEFLNSSA

SEQ ID NO: 13146 - protein, 652 aa, Homo sapiens
MGNLQSEPSAGGGSRKVQPSDRAPDSRRTSLVEPEMTSQAMRLTRGLGVWFPGSATPPGLMVPREPQASPSTLPLTLERPSPVMPPPEEAAAVSAPPPAPAGTLLPGPSKWQKPAGTPVPRIRRLLEASHRGQGDPPSLRPLKPPPPPRQLSVKDTVPRAPSQFPPPLETWKPPPPLPSERQPADRRITPALATPASPPTESQAGPRNQGQTAGRARGGAPPHAGEGEMAQPADSESGLSLLCKITFKSRPSLAPPAASSSLAAKASLGGGGGGGLFAASGAISYAEVLKQGPLPPGAARPLGEVSRGAQEAEGGDGDGEGCSGPPSAPASQARALPPPPYTTFPGSKPKFDWVSAPDGPERHFRFNGAGGGIGAPRRRAAALSGPWGSPPPPPEQIHSAPGPRRPAPALLAPPTFIFPAPTNGEPMRPGPPGLQELPPLPPPTPPPTLQPPALQPTPLPVAPPLTPGLGHKESALAPTAAPALPPALAADQAPAPSPAPAPTVAEPSPPVSAPAPAAAPIKTRTRRNKGSRAARGATRKDGLHGDGPRERATATVPDSSGGGGGGSGASQTGAANTRAARHWLPFQVLNSCPCKCYCHHQPRHRRLPRNVSAWLSTSTNHLGEPPWVATIKLSGSLVAKLEHYDLQATHSN

SEQ ID NO: 13147 - protein, 457 aa, Homo sapiens
MPPPEEAAAVSAPPPAPAGTLLPGPSKWQKPAGTPVPRIRRLLEASHRGQGDPPSLRPLKPPPPPRQLSVKDTVPRAPSQFPPPLETWKPPPPLPSERQPADRRITPALATPASPPTESQAGPRNQGQTAGRARGGAPPHAGEGEMAQPADSESGLSLLCKITFKSRPSLAPPAASSSLAAKASLGGGGGGGLFAASGAISYAEVLKQGPLPPGAARPLGEVSRGAQEAEGGDGDGEGCSGPPSAPASQARALPPPPYTTFPGSKPKFDWVSAPDGPERHFRFNGAGGGIGAPRRRAAALSGPWGSPPPPPEQIHSAPGPRRPAPALLAPPTFIFPAPTNGEPMRPGPPGLQELPPLPPPTPPPTLQPPALQPTPLPVAPPLTPGLGHKESALAPTAAPALPPALAADQAPAPSPAPAPTVAEPSPPVSAPAPAAAPIKTRTRRNKGSRAARGATRA

SEQ ID NO: 13148 - protein, 224 aa, Homo sapiens
MGNLQSEPSAGGGSRKVQPSDRAPDSRRTSLVEPEMTSQAMRLTRGLGVWFPGSATPPGLMVPREPQASPSTLPLTLERPSPVMPPPEEAAAVSAPPPAPAGTLLPGPSKWQKPAGTPVPRIRRLLEASHRGQGDPPSLRPLKPPPPPRQLSVKDTVPRAPSQFPPPLETWKPPPPLPSERQPADRRITPALATPACVRARTRGCAHQDPHAQEQGFPCSPGRD

SEQ ID NO: 13149 - protein, 326 aa, Homo sapiens
ASTKGPSVFPLAPCSRSTSESTAALGCLVKDYFPEPVTVSWNSGALTSGVHTFPAVLQSSGLYSLSSVVTVPSSNFGTQTYTCNVDHKPSNTKVDKTVERKCCVECPPCPAPPVAGPSVFLFPPKPKDTLMISRTPEVTCVVVDVSHEDPEVQFNWYVDGVEVHNAKTKPREEQFNSTFRVVSVLTVVHQDWLNGKEYKCKVSNKGLPAPIEKTISKTKGQPREPQVYTLPPSREEMTKNQVSLTCLVKGFYPSDISVEWESNGQPENNYKTTPPMLDSDGSFFLYSKLTVDKSRWQQGNVFSCSVMHEALHNHYTQKSLSLSPGK

SEQ ID NO: 13150 - protein, 199 aa, Homo sapiens
MKSGLWYFFLFCLRIKVLTGEINGSANYEMFIFHNGGVQILCKYPDIVQQFKMQLLKGGQILCDLTKTKGSGNTVSIKSLKFCHSQLSNNSVSFFLYNLDHSHANYYFCNLSIFDPPPFKVTLTGGYLHIYESQLCCQLKFWLPIGCAAFVVVCILGCILICWLTKKKYSSSVHDPNGEYMFMRAVNTAKKSRLTDVTL

SEQ ID NO: 13151 - protein, 168 aa, Homo sapiens
MKSGLWYFFLFCLRIKVLTGEINGSANYEMFIFHNGGVQILCKYPDIVQQFKMQLLKGGQILCDLTKTKGSGNTVSIKSLKFCHSQLSNNSVSFFLYNLDHSHANYYFCNLSIFDPPPFKVTLTGGYLHIYESQLCCQLKFWLPIGCAAFVVVCILGCILICWLTKKM

SEQ ID NO: 13152 - protein, 393 aa, Homo sapiens
MALKVATVAGSAAKAVLGPALLCRPWEVLGAHEVPSRNIFSEQTIPPSAKYGGRHTVTMIPGDGIGPELMLHVKSVFRHACVPVDFEEVHVSSNADEEDIRNAIMAIRRNRVALKGNIETNHNLPPSHKSRNNILRTSLDLYANVIHCKSLPGVVTRHKDIDILIVRENTEGEYSSLEHESVAGVVESLKIITKAKSLRIAEYAFKLAQESGRKKVTAVHKANIMKLGDGLFLQCCREVAARYPQITFENMIVDNTTMQLVSRPQQFDVMVMPNLYGNIVNNVCAGLVGGPGLVAGANYGHVYAVFETATRNTGKSIANKNIANPTATLLASCMMLDHLKLHSYATSIRKAVLASMDNENMHTPDIGGQGTTSEAIQDVIRHIRVINGRAVEA

SEQ ID NO: 13153 - protein, 380 aa, Homo sapiens
MALKVATVAGSAAKAVLGPALLCRPWEVLGAHEVPSRNIFSEQTIPPSAKYGGRHTVTMIPGDGIGPELMLHVKSVFRHACVPVDFEEVHVSSNADEEDIRNAIMAIRRNRVALKGNIETNHNLPPSHKSRNNILRTSLDLYANVIHCKSLPGVVTRHKDIDILIVRENTEGEYSSLEHESVAGVVESLKIITKAKSLRIAEYAFKLAQESGRKKVTAVHKANIMKLGDGLFLQCCREVAARYPQITFENMIVDNTTMQLVSRPQQFDVMVMPNLYGNIVNNVCAGLVGGPGLVAGANYGHVYAVFETATRNTGKSIANKNIANPTATLLASCMMLDHLKLHSYATSIRKAVLASMDNENVRFPSHPTLLPRPVSPCSLL

SEQ ID NO: 13154 - protein, 129 aa, Homo sapiens
MRRRGEIDMATEGDVELELETETSGPERPPEKPRKHDSGAADLERVTDYAEEKEIQSSNLETAMSVIGDRRSREQKAKQEREKELAKVTIKKEDLELIMTEMEISRAAAERSLREHMGNVVEALIALTN

SEQ ID NO: 13155 - protein, 85 aa, Homo sapiens
MRRRGEIDMATEGDVELELETETSGPERPPEKPRKHDSGAADLERVTDYAEEKEIQSSNLETGERTGKSHYQEGRSGANSEWKEL

SEQ ID NO: 13156 - protein, 225 aa, Homo sapiens
MTSEFFAAQLRSQISDHTTHPISYYKPEFYTPDDGGTAHLSVVAEDGSAVSATSTINLYFGSKVCSPVSGILFNNEWTTSALPAFTNEFGAPPSPANFIQPGKQPLLSMCPTIMVGQDGQVRMVVGAAGGTQITTDTALAIIYNLWFGYDVKRAVEEPRLHNKLLPNVTTVERNIDQAVTAALETRHHHTQIASTFIAVVQAIVRTAGGWAAASDSRKGGEPAGY

SEQ ID NO: 13157 - protein, 225 aa, Homo sapiens
MTSEFFSAQLRAQISDDTTHPISYYKPEFYMPDDGGTAHLSVVAEDGSAVSATSTINLYFGSKVRSPVSGILLNNEMDDFSSTSITNEFGVPPSPANFIQPGKQPLSSMCPTIMVGQDGQVRMVVGAAGGTQITMATALAIIYNLWFGYDVKWAVEEPRLHNQLLPNVTTVERNIDQEVTAALETRHHHTQITSTFIAVVQAIVRMAGGWAAASDSRKGGEPAGY

SEQ ID NO: 13158 - protein, 334 aa, Homo sapiens
MNTILPCQDQYFVGGQSYNCPYSTTTSESSVDVSTETWVSFWAAGLLDNRELQQAPQAQESFSDSNFPLPDLCSWEEAQLSSQLYRNKQLQDTLVQKEEELARLHEENNHLRQYLNSALVKCLEEKAKKLLSSDEFSKAYGKFRKGKRKSKEQRYSPAEIPHPKNAKRNLSSEFANCEEQAGPPVDPWVLQTLGLKDLDTIDDTSSANYSALASHPRRVASTFSQFPDDAVDYKNIPREDMPIDYRGDRTTPLHSTATHGEDFHILSQLSNPPVGLKTLPYYTAHVSPNKTEMAFSTSLSPHCNVKTHSFHQGQAFVRRDEEGGWKFTWVPKQS

SEQ ID NO: 13159 - protein, 122 aa, Homo sapiens
MEASALTSSAVTSVAKVVRVASGSAVVLPLARIATVVIGGVVAMAAVPMVLSAMGFTAAGIASSSIAAKMMSAAAIANGGGVASGSLVATLQSLGATGLSGLTKFILGSIGSAIAAVIARFY

SEQ ID NO: 13160 - protein, 119 aa, Homo sapiens
MEASALTSSAVTSVAKVVRVASGSAVVLPLARIATVVIGGVVAVPMVLSAMGFTAAGIASSSIAAKMMSAAAIANGGGVASGSLVATLQSLGATGLSGLTKFILGSIGSAIAAVIARFY

SEQ ID NO: 13161 - protein, 79 aa, Homo sapiens
MAAVPMVLSAMGFTAAGIASSSIAAKMMSAAAIANGGGVASGSLVATLQSLGATGLSGLTKFILGSIGSAIAAVIARFY

SEQ ID NO: 13162 - protein, 74 aa, Homo sapiens
MVLSAMGFTAAGIASSSIAAKMMSAAAIANGGGVASGSLVATLQSLGATGLSGLTKFILGSIGSAIAAVIARFY

SEQ ID NO: 13163 - protein, 327 aa, Homo sapiens
MAAAAAMAEQESARNGGRNRGGVQRVEGKLRASVEKGDYYEAHQMYRTLFFRYMSQSKHTEARELMYSGALLFFSHGQQNSAADLSMLVLESLEKAEVEVADELLENLAKVFSLMDPNSPERVTFVSRALKWSSGGSGKLGHPRLHQLLALTLWKEQNYCESRYHFLHSADGEGCANMLVEYSTSRGFRSEVDMFVAQAVLQFLCLKNKSSASVVFTTYTQKHPSIEDGPPFVEPLLNFIWFLLLAVDGGKLTVFTVLCEQYQPSLRRDPMYNEYLDRIGQLFFGVPPKQTSSYGGLLGNLLTSLMGSSEQEDGEESPSDGSPIELD

SEQ ID NO: 13164 - protein, 274 aa, Homo sapiens
MSQSKHTEARELMYSGALLFFSHGQQNSAADLSMLVLESLEKAEVEVADELLENLAKVFSLMDPNSPERVTFVSRALKWSSGGSGKLGHPRLHQLLALTLWKEQNYCESRYHFLHSADGEGCANMLVEYSTSRGFRSEVDMFVAQAVLQFLCLKNKSSASVVFTTYTQKHPSIEDGPPFVEPLLNFIWFLLLAVDGGKLTVFTVLCEQYQPSLRRDPMYNEYLDRIGQLFFGVPPKQTSSYGGLLGNLLTSLMGSSEQEDGEESPSDGSPIELD

SEQ ID NO: 13165 - protein, 358 aa, Homo sapiens
MAERQEEQRGSPPLRAEGKADAEVKLILYHWTHSFSSQKVRLVIAEKALKCEEHDVSLPLSEHNEPWFMRLNSTGEVPVLIHGENIICEATQIIDYLEQTFLDERTPRLMPDKESMYYPRVQHYRELLDSLPMDAYTHGCILHPELTVDSMIPAYATTRIRSQIGNTESELKKLAEENPDLQEAYIAKQKRLKSKLLDHDNVKYLKKILDELEKVLDQVETELQRRNEETPEEGQQPWLCGESFTLADVSLAVTLHRLKFLGFARRNWGNGKRPNLETYYERVLKRKTFNKVLGHVNNILISAVLPTAFRVAKKRAPKVLGTTLVVGLLAGVGYFAFMLFRKRLGSMILAFRPRPNYF

SEQ ID NO: 13166 - protein, 290 aa, Homo sapiens
MRLNSTGEVPVLIHGENIICEATQIIDYLEQTFLDERTPRLMPDKESMYYPRVQHYRELLDSLPMDAYTHGCILHPELTVDSMIPAYATTRIRSQIGNTESELKKLAEENPDLQEAYIAKQKRLKSKLLDHDNVKYLKKILDELEKVLDQVETELQRRNEETPEEGQQPWLCGESFTLADVSLAVTLHRLKFLGFARRNWGNGKRPNLETYYERVLKRKTFNKVLGHVNNILISAVLPTAFRVAKKRAPKVLGTTLVVGLLAGVGYFAFMLFRKRLGSMILAFRPRPNYF

SEQ ID NO: 13167 - protein, 927 aa, Homo sapiens
MGTQDPGNMGTGVPASEQISCAKEDPQVYCPEETGGTKDVQVTDCKSPEDSRPPKETDCCNPEDSGQLMVSYEGKAMGYQVPPFGWRICLAHEFTEKRKPFQANNVSLSNMIKHIGMGLRYLQWWYRKTHVEKKTPFIDMINSVPLRQIYGCPLGGIGGGTITRGWRGQFCRWQLNPGMYQHRTVIADQFTVCLRREGQTVYQQVLSLERPSVLRSWNWGLCGYFAFYHALYPRAWTVYQLPGQNVTLTCRQITPILPHDYQDSSLPVGVFVWDVENEGDEALDVSIMFSMRNGLGGGDDAPGGLWNEPFCLERSGETVRGLLLHHPTLPNPYTMAVAARVTAATTVTHITAFDPDSTGQQVWQDLLQDGQLDSPTGQSTPTQKGVGIAGAVCVSSKLRPRGQCRLEFSLAWDMPRIMFGAKGQVHYRRYTRFFGQDGDAAPALSHYALCRYAEWEERISAWQSPVLDDRSLPAWYKSALFNELYFLADGGTVWLEVLEDSLPEELGRNMCHLRPTLRDYGRFGYLEGQEYRMYNTYDVHFYASFALIMLWPKLELSLQYDMALATLREDLTRRRYLMSGVMAPVKRRNVIPHDIGDPDDEPWLRVNAYLIHDTADWKDLNLKFVLQVYRDYYLTGDQNFLKDMWPVCLAVMESEMKFDKDHDGLIENGGYADQTYDGWVTTGPSAYCGGLWLAAVAVMVQMAALCGAQDIQDKFSSILSRGQEAYERLLWNGRYYNYDSSSRPQSRSVMSDQCAGQWFLKACGLGEGDTEVFPTQHVVRALQTIFELNVQAFAGGAMGAVNGMQPHGVPDKSSVQSDEVWVGVVYGLAATMIQEGLTWEGFQTAEGCYRTVWERLGLAFQTPEAYCQQRVFRSLAYMRPLSIWAMQLALQQQQHKKASWPKVKQGTGLRTGPMFGPKEAMANLSPE

SEQ ID NO: 13168 - protein, 877 aa, Homo sapiens
MGTQDPGNMGTGVPASEQISCAKEDPQVYCPEETGGTKDVQVTDCKSPEDSRPPKETDCCNPEDSGQLMVSYEGKAMGYQVPPFGWRICLAHEFTEKRKPFQANNVSLSNMIKHIGMGLRYLQWWYRKTHVEKKTPFIDMINSVPLRQIYGCPLGGIGGGTITRGWRGQFCRWQLNPGMYQHRTVIADQFTVCLRREGQTVYQQVLSLERPSVLRSWNWGLCGYFAFYHALYPRAWTVYQLPGQNVTLTCRQITPILPHDYQDSSLPVGVFVWDVENEGDEALDVSIMFSMRNGLGGGDDAPGGLWNEPFCLERSGETVRGLLLHHPTLPNPYTMAVAARVTAATTVTHITAFDPDSTGQQVWQDLLQDGQLDSPTGQSTPTQKGVGIAGAVCVSSKLRPRGQCRLEFSLAWDMPRIMFGAKGQVHYRRYTRFFGQDGDAAPALSHYALCRYAEWEERISAWQSPVLDDRSLPAWYKSALFNELYFLADGGTVWLEVLEDSLPEELGRNMCHLRPTLRDYGRFGYLEGQEYRMYNTYDVHFYASFALIMLWPKLELSLQYDMALATLREDLTRRRYLMSGVMAPVKRRNVIPHDIGDPDDEPWLRVNAYLIHDTADWKDLNLKFVLQVYRDYYLTGDQNFLKDMWPVCLAVMESEMKFDKDHDGLIENGGYADQTYDGWVTTGPSAYCGGLWLAAVAVMVQMAALCGAQDIQDKFSSILSRGQEAYERLLWNGRYYNYDSSSRPQSRSVMSDQCAGQWFLKACGLGEGDTEVFPTQHVVRALQTIFELNVQAFAGGAMGAVNGMQPHGVPDKSSVQSDEVWVGVVYGLAATMIQELLPSGFCLWVIVISSTCWELLEGKDSTASIYPVEVALQRVPS

SEQ ID NO: 13169 - protein, 640 aa, Homo sapiens
MFSMRNGLGGGDDAPGGLWNEPFCLERSGETVRGLLLHHPTLPNPYTMAVAARVTAATTVTHITAFDPDSTGQQVWQDLLQDGQLDSPTGQSTPTQKGVGIAGAVCVSSKLRPRGQCRLEFSLAWDMPRIMFGAKGQVHYRRYTRFFGQDGDAAPALSHYALCRYAEWEERISAWQSPVLDDRSLPAWYKSALFNELYFLADGGTVWLEVLEDSLPEELGRNMCHLRPTLRDYGRFGYLEGQEYRMYNTYDVHFYASFALIMLWPKLELSLQYDMALATLREDLTRRRYLMSGVMAPVKRRNVIPHDIGDPDDEPWLRVNAYLIHDTADWKDLNLKFVLQVYRDYYLTGDQNFLKDMWPVCLAVMESEMKFDKDHDGLIENGGYADQTYDGWVTTGPSAYCGGLWLAAVAVMVQMAALCGAQDIQDKFSSILSRGQEAYERLLWNGRYYNYDSSSRPQSRSVMSDQCAGQWFLKACGLGEGDTEVFPTQHVVRALQTIFELNVQAFAGGAMGAVNGMQPHGVPDKSSVQSDEVWVGVVYGLAATMIQEGLTWEGFQTAEGCYRTVWERLGLAFQTPEAYCQQRVFRSLAYMRPLSIWAMQLALQQQQHKKASWPKVKQGTGLRTGPMFGPKEAMANLSPE

SEQ ID NO: 13170 - protein, 1058 aa, Homo sapiens
MDLGPLNICEEMTILHGGFLLAEQLFHPKALAELTKSDWERVGRPIVEALREISSAAAHSQPFAWKKKALIIIWAKVLQPHPVTPSDTETRWQEDLFFSVGNMIPTINHTILFELLKSLEASGLFIQLLMALPTTICHAELERFLEHVTVDTSAEDVAFFLDVWWEVMKHKGHPQDPLLSQFSAMAHKYLPALDEFPHPPKRLRSDPDACPTMPLLAMLLRGLTQIQSRILGPGRKCCALANLADMLTVFALTEDDPQEVSATVYLDKLATVISVWNSDTQNPYHQQALAEKVKEAERDVSLTSLAKLPSETIFVGCEFLHHLLREWGEELQAVLRSSQGTSYDSYRLCDSLTSFSQNATLYLNRTSLSKEDRQVVSELAECVRDFLRKTSTVLKNRALEDITASIAMAVIQQKMDRHMEVCYIFASEKKWAFSDEWVACLGSNRALFRQPDLVLRLLETVIDVSTADRAIPESQIRQVIHLILECYADLSLPGKNKVLAGILRSWGRKGLSEKLLAYVEGFQEDLNTTFNQLTQSASEQGLAKAVASVARLVIVHPEVTVKKMCSLAVVNLGTHKFLAQILTAFPALRFVEEQGPNSSATFMVSCLKETVWMKFSTPKEEKQFLELLNCLMSPVKPQGIPVAALLEPDEVLKEFVLPFLRLDVEEVDLSLRIFIQTLEANACREEYWLQTCSPFPLLFSLCQLLDRFSKYWQLPKEKRCLSLDRKDLAIHILELLCEIVSANAETFSPDVWIKSLSWLHRKLEQLDWTVGLRLKSFFEGHFKCEVPATLFEICKLSEDEWTSQAHPGYGAGTGLLAWMECCCVSSGISERMLSLLVVDVGNPEEVRLFSKGFLVALVQVMPWCSPQEWQRLHQLTRRLLEKQLLHVPYSLEYIQFVPLLNLKPFAQELQLSVLFLRTFQFLCSHSCRDWLPLEGWNHVVKLLCGSLTRLLDSVRAIQAAGPWVQGPEQDLTQEALFVYTQVFCHALHIMAMLHPEVCEPLYVLALETLTCYETLSKTNPSVSSLLQRAHEQRFLKSIAEGIGPEERRQTLLQKMSSF

SEQ ID NO: 13171 - protein, 332 aa, Homo sapiens
MAAATAAAALAAADPPPAMPQAAGAGGPTTRRDFYWLRSFLAGGIAGCCAKTTVAPLDRVKVLLQAHNHHYKHLGVFSALRAVPQKEGFLGLYKGNGAMMIRIFPYGAIQFMAFEHYKTLITTKLGISGHVHRLMAGSMAGMTAVICTYPLDMVRVRLAFQVKGEHSYTGIIHAFKTIYAKEGGFFGFYRGLMPTILGMAPYAGVSFFTFGTLKSVGLSHAPTLLGRPSSDNPNVLVLKTHVNLLCGGVAGAIAQTISYPFDVTRRRMQLGTVLPEFEKCLTMRDTMKYVYGHHGIRKGLYRGLSLNYIRCIPSQAVAFTTYELMKQFFHLN

SEQ ID NO: 13172 - protein, 478 aa, Homo sapiens
MAHVPARTSPGPGPQLLLLLLPLFLLLLRDVAGSHRAPAWSALPAAADGLQGDRDLQRHPGDAAATLGPSAQDMVAVHMHRLYEKYSRQGARPGGGNTVRSFRARLEVVDQKAVYFFNLTSMQDSEMILTATFHFYSEPPRWPRALEVLCKPRAKNASGRPLPLGPPTRQHLLFRSLSQNTATQGLLRGAMALAPPPRGLWQAKDISPIVKAARRDGELLLSAQLDSEERDPGVPRPSPYAPYILVYANDLAISEPNSVAVTLQRYDPFPAGDPEPRAAPNNSADPRVRRAAQATGPLQDNELPGLDERPPRAHAQHFHKHQLWPSPFRALKPRPGRKDRRKKGQEVFMAASQVLDFDEKTMQKARRKQWDEPRVCSRRYLKVDFADIGWNEWIISPKSFDAYYCAGACEFPMPKIVRPSNHATIQSIVRAVGIIPGIPEPCCVPDKMNSLGVLFLDENRNVVLKVYPNMSVDTCACR

SEQ ID NO: 13173 - protein, 432 aa, Homo sapiens
MERRRITSAARRSYVSSGEMMVGGLAPGRRLGPGTRLSLARMPPPLPTRVDFSLAGALNAGFKETRASERAEMMELNDRFASYIEKVRFLEQQNKALAAELNQLRAKEPTKLADVYQAELRELRLRLDQLTANSARLEVERDNLAQDLATVRQKLQDETNLRLEAENNLAAYRQEADEATLARLDLERKIESLEEEIRFLRKIHEEEVRELQEQLARQQVHVELDVAKPDLTAALKEIRTQYEAMASSNMHEAEEWYRSKFADLTDAAARNAELLRQAKHEANDYRRQLQSLTCDLESLRGTNESLERQMREQEERHVREAASYQEALARLEEEGQSLKDEMARHLQEYQDLLNVKLALDIEIATYRKLLEGEENRITIPVQTFSNLQIRETSLDTKSVSEGHLKRNIVVKTVEMRDGEVIKESKQEHKDVM

SEQ ID NO: 13174 - protein, 431 aa, Homo sapiens
MERRRITSAARRSYVSSGEMMVGGLAPGRRLGPGTRLSLARMPPPLPTRVDFSLAGALNAGFKETRASERAEMMELNDRFASYIEKVRFLEQQNKALAAELNQLRAKEPTKLADVYQAELRELRLRLDQLTANSARLEVERDNLAQDLATVRQKLQDETNLRLEAENNLAAYRQEADEATLARLDLERKIESLEEEIRFLRKIHEEEVRELQEQLARQQVHVELDVAKPDLTAALKEIRTQYEAMASSNMHEAEEWYRSKFADLTDAAARNAELLRQAKHEANDYRRQLQSLTCDLESLRGTNESLERQMREQEERHVREAASYQEALARLEEEGQSLKDEMARHLQEYQDLLNVKLALDIEIATYRKLLEGEENRITIPVQTFSNLQIRGGKSTKDGENHKVTRYLKSLTIRVIPIQAHQIVNGTPPARG

SEQ ID NO: 13175 - protein, 438 aa, Homo sapiens
MERRRITSAARRSYVSSGEMMVGGLAPGRRLGPGTRLSLARMPPPLPTRVDFSLAGALNAGFKETRASERAEMMELNDRFASYIEKVRFLEQQNKALAAELNQLRAKEPTKLADVYQAELRELRLRLDQLTANSARLEVERDNLAQDLATVRQKLQDETNLRLEAENNLAAYRQEADEATLARLDLERKIESLEEEIRFLRKIHEEEVRELQEQLARQQVHVELDVAKPDLTAALKEIRTQYEAMASSNMHEAEEWYRSKFADLTDAAARNAELLRQAKHEANDYRRQLQSLTCDLESLRGTNESLERQMREQEERHVREAASYQEALARLEEEGQSLKDEMARHLQEYQDLLNVKLALDIEIATYRKLLEGEENRITIPVQTFSNLQIRGQYSRASWEGHWSPAPSSRACRLLQTGTEDQGKGIQLSLGAFVTLQRS

SEQ ID NO: 13176 - protein, 325 aa, Homo sapiens
MAWSLGSWLGGCLLVSALGMVPPPENVRMNSVNFKNILQWESPAFAKGNLTFTAQYLSYRIFQDKCMNTTLTECDFSSLSKYGDHTLRVRAEFADEHSDWVNITFCPVDDTIIGPPGMQVEVLADSLHMRFLAPKIENEYETWTMKNVYNSWTYNVQYWKNGTDEKFQITPQYDFEVLRNLEPWTTYCVQVRGFLPDRNKAGEWSEPVCEQTTHDETVPSWMVAVILMASVFMVCLALLGCFALLWCVYKKTKYAFSPRNSLPQHLKEFLGHPHHNTLLFFSFPLSDENDVFDKLSVIAEDSESGKQNPGDSCSLGTPPGQGPQS

SEQ ID NO: 13177 - protein, 455 aa, Homo sapiens
MDTPRVLLSAVFLISFLWDLPGFQQASISSSSSSAELGSTKGMRSRKEGKMQRAPRDSDAGREGQEPQPRPQDEPRAQQPRAQEPPGRGPRVVPHEYMLSIYRTYSIAEKLGINASFFQSSKSANTITSFVDRGLDDLSHTPLRRQKYLFDVSMLSDKEELVGAELRLFRQAPSAPWGPPAGPLHVQLFPCLSPLLLDARTLDPQGAPPAGWEVFDVWQGLRHQPWKQLCLELRAAWGELDAGEAEARARGPQQPPPPDLRSLGFGRRVRPPQERALLVVFTRSQRKNLFAEMREQLGSAEAAGPGAGAEGSWPPPSGAPDARPWLPSPGRRRRRTAFASRHGKRHGKKSRLRCSKKPLHVNFKELGWDDWIIAPLEYEAYHCEGVCDFPLRSHLEPTNHAIIQTLMNSMDPGSTPPSCCVPTKLTPISILYIDAGNNVVYKQYEDMVVESCGCR

SEQ ID NO: 13178 - protein, 340 aa, Homo sapiens
MSELEQLRQEAEQLRNQIRDARKACGDSTLTQITAGLDPVGRIQMRTRRTLRGHLAKIYAMHWGTDSRLLVSASQDGKLIIWDSYTTNKVHAIPLRSSWVMTCAYAPSGNFVACGGLDNICSIYSLKTREGNVRVSRELPGHTGYLSCCRFLDDNQIITSSGDTTCALWDIETGQQTVGFAGHSGDVMSLSLAPDGRTFVSGACDASIKLWDVRDSMCRQTFIGHESDINAVAFFPNGYAFTTGSDDATCRLFDLRADQELLMYSHDNIICGITSVAFSRSGRLLLAGYDDFNCNIWDAMKGDRAGVLAGHDNRVSCLGVTDDGMAVATGSWDSFLKIWN

SEQ ID NO: 13179 - protein, 240 aa, Homo sapiens
MTCAYAPSGNFVACGGLDNICSIYSLKTREGNVRVSRELPGHTGYLSCCRFLDDNQIITSSGDTTCALWDIETGQQTVGFAGHSGDVMSLSLAPDGRTFVSGACDASIKLWDVRDSMCRQTFIGHESDINAVAFFPNGYAFTTGSDDATCRLFDLRADQELLMYSHDNIICGITSVAFSRSGRLLLAGYDDFNCNIWDAMKGDRAGVLAGHDNRVSCLGVTDDGMAVATGSWDSFLKIWN

SEQ ID NO: 13180 - protein, 429 aa, Homo sapiens
MCPGALWVALPLLSLLAGSLQGKPLQSWGRGSAGGNAHSPLGVPGGGLPEHTFNLKMFLENVKVDFLRSLNLSGVPSQDKTRVEPPQYMIDLYNRYTSDKSTTPASNIVRSFSMEDAISITATEDFPFQKHILLFNISIPRHEQITRAELRLYVSCQNHVDPSHDLKGSVVIYDVLDGTDAWDSATETKTFLVSQDIQDEGWETLEVSSAVKRWVRSDSTKSKNKLEVTVESHRKGCDTLDISVPPGSRNLPFFVVFSNDHSSGTKETRLELREMISHEQESVLKKLSKDGSTEAGESSHEEDTDGHVAAGSTLARRKRSAGAGSHCQKTSLRVNFEDIGWDSWIIAPKEYEAYECKGGCFFPLADDVTPTKHAIVQTLVHLKFPTKVGKACCVPTKLSPISVLYKDDMGVPTLKYHYEGMSVAECGCR

SEQ ID NO: 13181 - protein, 625 aa, Homo sapiens [sequence omitted]

SEQ ID NO: 13182 - protein, 150 aa, Homo sapiens
MPGTKRFQHVIETPEPGKWELSGYEAAVPITEKSNPLTQDLDKADAENIVRLLGQCDAEIFQEEGQALSTYQRLYSESILTTMVQVAGKVQEVLKEPDGGLVVLSGGGTSGRMAFLMSVSFNQLMKGLGQKPLYTYLIAGGDRWLPGRRE

SEQ ID NO: 13183 - protein, 450 aa, Homo sapiens
MDLSAAAALCLWLLSACRPRDGLEAAAVLRAAGAGPVRSPGGGGGGGGGGRTLAQAAGAAAVPAAAVPRARAARRAAGSGFRNGSVVPHHFMMSLYRSLAGRAPAGAAAVSASGHGRADTITGFTDQATQDESAAETGQSFLFDVSSLNDADEVVGAELRVLRRGSPESGPGSWTSPPLLLLSTCPGAARAPRLLYSRAAEPLVGQRWEAFDVADAMRRHRREPRPPRAFCLLLRAVAGPVPSPLALRRLGFGWPGGGGSAAEERAVLVVSSRTQRKESLFREIRAQARALGAALASEPLPDPGTGTASPRAVIGGRRRRRTALAGTRTAQGSGGGAGRGHGRRGRSRCSRKPLHVDFKELGWDDWIIAPLDYEAYHCEGLCDFPLRSHLEPTNHAIIQTLLNSMAPDAAPASCCVPARLSPISILYIDAANNVVYKQYEDMVVEACGCR

SEQ ID NO: 13184 - protein, 522 aa, Homo sapiens
MVRSGKNGDLHLKQIAYYKRTGEYHSTTLPSERSGIRRAAKKFVFKEKKLFYVGKDRKQNRLVIVSEEEKKKVLRECHENDSGAHHGISRTLTLVESNYYWTSVTNDVKQWVYACQHCQVAKNTVIVAPKQHLLKVENPWSLVTVDLMGPFHTSNRSHVYAIIMTDLFTKWIVILPLCDVSASEVSKAIINIFFLYGPPQKIIMDQRDEFIQQINIELYRLFGIKQIVISHTSGTVNPTESTPNTIKAFLSKHCADHPNNWDDHLSAVSFAFNVTHLEPTKNTPYFQMFSRNPYMPETSDSLHEVDGDNTSMFAKILDAIKEADKIMENKTTSLGQMENNNLDELNKSKIIVKKKPKQLNPFHLKVGHEVLRQRKNWWKDGRFQSEWVGPCVIDYITESGCAVLRDNTGVRLKRPIKMSHLKPYIRESSEQESLYLLQGSVVADHDYIGLPEIPIGAYQANILVEDATIGIVDNELLTSSKDRELLEYRNTKISPLIDDHSSLEKQTFSLLDSSNQVLEYLS

SEQ ID NO: 13185 - protein, 80 aa, Homo sapiens
MVRSGKNGDLHLKQIAYYKRTGEYHSTTLPSERSGIRRAAKKFVFKGICLSALPSGKKYSYCSTETAPSQGGKSMEFSYC

SEQ ID NO: 13186 - protein, 222 aa, Homo sapiens
MVRSGKNGDLHLKQIAYYKRTGEYHSTTLPSERSGIRRAAKKFVFKEKKLFYVGKDRKQNRLVIVSEEEKKKVLRECHENDSGAHHGISRTLTLVESNYYWTSVTNDVKQWVYACQHCQVAKNTVIVAPKQHLLKVENPWSLVTVDLMGPFHTSNRSHVYAIIMTDLFTKWIVILPLCDVSASEVSKAIINIFFLYGPPQKIIMDQRDEFIQQKVFISCKVQ

SEQ ID NO: 13187 - protein, 306 aa, Homo sapiens
MGGRKMATDEENVYGLEENAQSRQESTRRLILVGRTGAGKSATGNSILGQRRFFSRLGATSVTRACTTGSRRWDKCHVEVVDTPDIFSSQVSKTDPGCEERGHCYLLSAPGPHALLLVTQLGRFTAQDQQAVRQVRDMFGEDVLKWMVIVFTRKEDLAGGSLHDYVSNTENRALRELVAECGGRVCAFDNRATGREQEAQVEQLLGMVEGLVLEHKGAHYSNEVYELAQVLRWAGPEERLRRVAERVAARVQRRPWGAWLSARLWKWLKSPRSWRLGLALLLGGALLFWVLLHRRWSEAVAEVGPD

SEQ ID NO: 13188 - protein, 217 aa, Homo sapiens
MTDPNKMIINLALFGMTQSGKSSAGNILLGSTDFHSSFAPCSVTTCCSLGRSCHLHSFMRRGGLEVALQVQVLDTPGYPHSRLSKKYVKQEVKEALAHHFGQGGLHLALLVQRADVPFCGQEVTDPVQMIQELLGHAWMNYTAILFTHAEKIEEAGLTEDKYLHEASDTLKTLLNSIQHKYVFQYKKGKSLNEQRMKILERIMEFIKENCYQVLTFK
